United States Patent Application Publication US 2011/0183924 A1 - sequence listing, part 94

SEQ ID NO: 303119 - DNA, 4730 bp, Homo sapiens
cgggagacattcgaggcggacagaaacggggcttggcgccccccggtgcacgtgtgctagcccaggcaggagggagcgcctcggcggaggagtcaaggaagagggggagggagaaacgcgccagaacctcggcccgggcgccctcgtcggccgcggaggagctgcagcctccaacaggaaggtgtgatccctgccatgctatctgctctgctcagcgactgaaggtgcccgcatcccagctctgccaggaagcaaaggtaagttgtcacatcttcccaagccaggccagccaggagcgctgcatgcaaattctgccgtgggctaaggcacgctaaccagagccggcggcatggacttcgtcatgaagcaggcccttggaggggccacaaaggacatggggaagatgctggggggagaggaggagaaggaccccgacgcgcagaaaaaggaggaggagcggcaggaggcgctgcggcagcaggaggaggagcgtaaggccaagcacgcgcgcatggaggcggagcgggagaaggtccggcagcagatccgagataagtatgggctgaagaagaaggaggagaaggaagcagaggagaaagcagccctggagcagccctgcgaggggagcctgacccggcccaagaaggccatccctgcgggctgcggggacgaggaggaggaggaagaggagagcatcctggacacggtgctcaaatacctgcccgggccgctgcaggacatgttcaagaagtaaccaggcctcctgccccagcctactccacctgttactacttctttttggttctttcttttctttttattaggttaagtctcaattctgaaggggaaaacctcagttggcctctgcccctcttccctggccaggggcttctccccctcagctctccctcacacctcccttcatcccagggtatccacctgcaccccactcccaagtagcttgaaaaagggaggacagtctttccccagcaggggtcaggggggcccctcaggaagcctaaggtcgtgctagtgtggtgacccccatacattcctccctgctccccactgccaggaggaccactgtccccagccagccaaagtaatgacacattccagccctgcccagcatgctgacctttggcctctaaccctcagtgggcccccaggtcagggcaggggcactgagtggcctggctctgaggaagggagtcaggggaagcctgtcccgggaaggcccaggctgagaggccctggctctggccaggctgggatctgggtgggaggctggggctcttcttcttccatctccttggtgacacccagcccaggggcacccccttccccagcccccacctggagagacatggcccctgccaagctggtcccttcaaatggatcctttgtggactttagctcatttgtggaggaaccccaggtagggacgccccttgttcctcacccccaccccacttaggtcctgggcccccactgccaggctgggcccagcttgctcagtcaaggggctgccaggcccccagaaaacacttggagccatcgggtagcgatggtctatgccatggggaacacctccattggtgtggccaagctgcccccattcctatccacccctctccccaccccgtcctgtccatgcgcttccagggccccacggtccccaggaggacgcttcctggccaaagccccaagcctttggtgagaagccaattcccacttgacagaaggcgtccatccattcatctcattggccaaggacaaactctcctctgggacgtctgggactggcatttgtcccccactcaaattatcaaagctttctgctcagtcagttgtgtggggatggtgagggaagaggggtcacatgagggaggaaactgtatccatgcatgcatgataatgcgtggcagagactgcaacagggattgtgtgttcagagatcatatgcatatgtgtagggctggagcgtgtgtgtgtcttgagattgtgtgtgttgcagtcatcatatctatgtgttacagattgtgtatgttagccttgtgtatgtgtgcttgattgaggtggtgtatttgggttgaaatgtgtcatatgtgtgtgctatccatctcgtgtttagaggctgtatatgttagcttgtgtaagaatgtgttttcaaaacagtgtgtgtattgggagtgatgggtatgtgttaggtatgtgatgggttgtagaagcgtgtgtttgagagaattcagagacatttgaaggctgctgtgtgcatgtttgggggtctgaaaagacagttgtgtgcatggatgtgtgcgtggggagaaagaacgtgggtaagatgtcccttcccagccctgagaccactggtcacagttggccacctccaacgggagaccttgtccttggcctagagtcctcccacccttggggggctcctgcctgaggtcctcagaatcccactgcaatggacccaggcagcgccccaggaagccatgctgggcccccgccagggcctatcccaaaagcaggggccagggagggggcgacttgcctgcccctgaagcccttgttcccattggccccagtttgcattctgcaggttttccattttagtgggttctgcttttatttcagagacagacatgtgtcttctctgtccgtttccaataggtaaagccatatcagttagactgcaatactttaaacacgagacaaaacaatccatatgtttagggaaccagaaaagtcccctggtctgtcccttctttggggagcagggcctcgacagctccagctcccttgacctaccttcctccccgcaccccgcccccaccttgtgcccctgtgtccagccccccagggggcctgtgtctgtgtctgtgcctgtgtctgtgatggggagccgcctcgcacccctgttgtctgcttgtctctttgtgtctgttatcctgggcaggatggtcattctcaaaaaccctggggtcctgggccagagacaggcagggcccagtccaggggccccaggcctccccagtcccagtgtgcgagccccacttggacacaagtgttcagagaggtccccctctgccacttgacagggaccttcaaacctcgacagtgatgcaaggacacagagagtaccagataggtagcagagaccaaggcgcagggtgcttcagatgagcaagagaacccagtcgaaccagataccccaggtgggccggagggaccccagaccttcagagggctgccctggtgttctccacagtgcagtccctctgtattcccagagtgggatcggggctttcagccccaccctgatgcctgccctccaggatggctggtttagtctgggtccatgtcccagacccctctattctgctccaggacagcaggacttcaggtcttcctgggggtggatataggagaaaatttctgcctggcacacacctggctccaaccactgccaagtgatcactcttaggcccaggggaacacaatgactatcattactgatgcagacctggctgtggagagcagctaatgtgtggcccagagagcctgtctgtgtggagcacgtagtgcacagaatacgtgagagttgctctggcaggggcaggatcctcacaggatcgcctgggaggtgaggtgtgtgtgacccactggatgggagggcaatgagtgtgcacatacaaatggggcagtgtgcatgcaacacacttaggggaggagtggccccagaattcagcacgcacacaacacacaagggagagaacccccagatgagaaaataggaaggagcaatcatttgtagatgggtgaaaaaagaatgaggttcaagggagcgtgcaccaggtgaggtgagcgtgtgtgctctcagggaagggcccaggctcccatgcctgggaggagctgccagagagaagcaaaaaggcggctgtggatcgccctgggctgggcaccagtgacaggtcaggatctccaaacatggacgtcctcccctccaaatccagaagctcccagaaggtgtccttaactgcaaagctgtgcagggtactcctccagatggaatcaggaagtcgagacaccatcccaggtgtgtgtaagagagagagagagaacagggaggatacagaagtattgcagcccagatcccctatcagggggacagctggtgggcaaagcagccaccccacagccttgtggctagagtacagtggggtggaccctccagccccaatagccctagtacccagctggcagggttgcccacccctgctgtccacctgctccatcctctagggttccacaggcccctgaccgcacagggaggctggggccagcctggtctcccaggcctgaggacatgcctcccacccaaatgtcccctgctccagtcccactcctgtcaccccacgctctgcactggggagaaaacgggaggtgctcgtgctggccctgggtgggagcggggagtcctggtgagaccccggtgagatggaccatcctgcccgcgtgggggatcccctttcccacatccgtgctgtgtcattgttgctctgcttcctttcaatgtgtcagtgcctggggggaggggaggagcaccccctcagcccccctgaacctgaccaaaagccatggctgttgctcccccctttgtatgatgcaaatgctgaaatgtacaaaatcaaccatgacaacaaagaaaaagaccttgtacagca

SEQ ID NO: 303120 - DNA, 5043 bp, Homo sapiens
  misc_feature (4738)..(4738): n is a, c, g, or t
  misc_feature (4752)..(4752): n is a, c, g, or t
cgggagacattcgaggcggacagaaacggggcttggcgccccccggtgcacgtgtgctagcccaggcaggagggagcgcctcggcggaggagtcaaggaagagggggagggagaaacgcgccagaacctcggcccgggcgccctcgtcggccgcggaggagctgcagcctccaacaggaaggtgtgatccctgccatgctatctgctctgctcagcgactgaaggtgcccgcatcccagctctgccaggaagcaaaggtaagttgtcacatcttcccaagccaggccagccaggagcgctgcatgcaaattctgccgtgggctaaggcacgctaaccagagccggcggcatggacttcgtcatgaagcaggcccttggaggggccacaaaggacatggggaagatgctggggggagaggaggagaaggaccccgacgcgcagaaaaaggaggaggagcggcaggaggcgctgcggcagcaggaggaggagcgtaaggccaagcacgcgcgcatggaggcggagcgggagaaggtccggcagcagatccgagataagtatgggctgaagaagaaggaggagaaggaagcagaggagaaagcagccctggagcagccctgcgaggggagcctgacccggcccaagaaggccatccctgcgggctgcggggacgaggaggaggaggaagaggagagcatcctggacacggtgctcaaatacctgcccgggccgctgcaggacatgttcaagaagtaaccaggcctcctgccccagcctactccacctgttactacttctttttggttctttcttttctttttattaggttaagtctcaattctgaaggggaaaacctcagttggcctctgcccctcttccctggccaggggcttctccccctcagctctccctcacacctcccttcatcccagggtatccacctgcaccccactcccaagtagcttgaaaaagggaggacagtctttccccagcaggggtcaggggggcccctcaggaagcctaaggtcgtgctagtgtggtgacccccatacattcctccctgctccccactgccaggaggaccactgtccccagccagccaaagtaatgacacattccagccctgcccagcatgctgacctttggcctctaaccctcagtgggcccccaggtcagggcaggggcactgagtggcctggctctgaggaagggagtcaggggaagcctgtcccgggaaggcccaggctgagaggccctggctctggccaggctgggatctgggtgggaggctggggctcttcttcttccatctccttggtgacacccagcccaggggcacccccttccccagcccccacctggagagacatggcccctgccaagctggtcccttcaaatggatcctttgtggactttagctcatttgtggaggaaccccaggtagggacgccccttgttcctcacccccaccccacttaggtcctgggcccccactgccaggctgggcccagcttgctcagtcaaggggctgccaggcccccagaaaacacttggagccatcgggtagcgatggtctatgccatggggaacacctccattggtgtggccaagctgcccccattcctatccacccctctccccaccccgtcctgtccatgcgcttccagggccccacggtccccaggaggacgcttcctggccaaagccccaagcctttggtgagaagccaattcccacttgacagaaggcgtccatccattcatctcattggccaaggacaaactctcctctgggacgtctgggactggcatttgtcccccactcaaattatcaaagctttctgctcagtcagttgtgtggggatggtgagggaagaggggtcacatgagggaggaaactgtatccatgcatgcatgataatgcgtggcagagactgcaacagggattgtgtgttcagagatcatatgcatatgtgtagggctggagcgtgtgtgtgtcttgagattgtgtgtgttgcagtcatcatatctatgtgttacagattgtgtatgttagccttgtgtatgtgtgcttgattgaggtggtgtatttgggttgaaatgtgtcatatgtgtgtgctatccatctcgtgtttagaggctgtatatgttagcttgtgtaagaatgtgttttcaaaacagtgtgtgtattgggagtgatgggtatgtgttaggtatgtgatgggttgtagaagcgtgtgtttgagagaattcagagacatttgaaggctgctgtgtgcatgtttgggggtctgaaaagacagttgtgtgcatggatgtgtgcgtggggagaaagaacgtgggtaagatgtcccttcccagccctgagaccactggtcacagttggccacctccaacgggagaccttgtccttggcctagagtcctcccacccttggggggctcctgcctgaggtcctcagaatcccactgcaatggacccaggcagcgccccaggaagccatgctgggcccccgccagggcctatcccaaaagcaggggccagggagggggcgacttgcctgcccctgaagcccttgttcccattggccccagtttgcattctgcaggttttccattttagtgggttctgcttttatttcagagacagacatgtgtcttctctgtccgtttccaataggtaaagccatatcagttagactgcaatactttaaacacgagacaaaacaatccatatgtttagggaaccagaaaagtcccctggtctgtcccttctttggggagcagggcctcgacagctccagctcccttgacctaccttcctccccgcaccccgcccccaccttgtgcccctgtgtccagccccccagggggcctgtgtctgtgtctgtgcctgtgtctgtgatggggagccgcctcgcacccctgttgtctgcttgtctctttgtgtctgttatcctgggcaggatggtcattctcaaaaaccctggggtcctgggccagagacaggcagggcccagtccaggggccccaggcctccccagtcccagtgtgcgagccccacttggacacaagtgttcagagaggtccccctctgccacttgacagggaccttcaaacctcgacagtgatgcaaggacacagagagtaccagataggtagcagagaccaaggcgcagggtgcttcagatgagcaagagaacccagtcgaaccagataccccaggtgggccggagggaccccagaccttcagagggctgccctggtgttctccacagtgcagtccctctgtattcccagagtgggatcggggctttcagccccaccctgatgcctgccctccaggatggctggtttagtctgggtccatgtcccagacccctctattctgctccaggacagcaggacttcaggtcttcctgggggtggatataggagaaaatttctgcctggcacacacctggctccaaccactgccaagtgatcactcttaggcccaggggaacacaatgactatcattactgatgcagacctggctgtggagagcagctaatgtgtggcccagagagcctgtctgtgtggagcacgtagtgcacagaatacgtgagagttgctctggcaggggcaggatcctcacaggatcgcctgggaggtgaggtgtgtgtgacccactggatgggagggcaatgagtgtgcacatacaaatggggcagtgtgcatgcaacacacttaggggaggagtggccccagaattcagcacgcacacaacacacaagggagagaacccccagatgagaaaataggaaggagcaatcatttgtagatgggtgaaaaaagaatgaggttcaagggagcgtgcaccaggtgaggtgagcgtgtgtgctctcagggaagggcccaggctcccatgcctgggaggagctgccagagagaagcaaaaaggcggctgtggatcgccctgggctgggcaccagtgacaggtcaggatctccaaacatggacgtcctcccctccaaatccagaagctcccagaaggtgtccttaactgcaaagctgtgcagggtactcctccagatggaatcaggaagtcgagacaccatcccaggtgtgtgtaagagagagagagagaacagggaggatacagaagtattgcagcccagatcccctatcagggggacagctggtgggcaaagcagccaccccacagccttgtggctagagtacagtggggtggaccctccagccccaatagccctagtacccagctggcagggttgcccacccctgctgtccacctgctccatcctctagggttccacaggcccctgaccgcacagggaggctggggccagcctggtctcccaggcctgaggacatgcctcccacccaaatgtcccctgctccagtcccactcctgtcaccccacgctctgcactggggagaaaacgggaggtgctcgtgctggccctgggtgggagcggggagtcctggtgagaccccggtgagatggaccatcctgcccgcgtgggggatcccctttcccacatccgtgctgtgtcattgttgctctgcttcctttcaatgtgtcagtgcctggggggaggggaggagcaccccctcagcccccctgaacctgaccaaaagccatggctgttgctcccccctttgtatgatgcaaatgctgaaatgtacaaaatcaaccatgacaacaaagaaaaagaccttgtacagcaaaaaacanaaacaacaaaaaanaaccacagggggggcccaacaaaaaaactcccccaaaggggccaaccaaacgcgaaaccacaaaaccaagcgacccaacggggcccacaaacggaaaacagaaaaaaacaccaagcacaggggccacggagacacagaaaagcagagaaagggaaaaaaagggcaaaacagagaacacatagaaaaggaacccaaacaccaagagagaggacaacacaaccgggcaacaacaaccccacaaaacaacttaaaaggccaaaagggaaacacaaaaaaaaagaacgggacaaa

SEQ ID NO: 303121 - DNA, 4088 bp, Homo sapiens
gcagatccgagataagtatgggctgaagaagaaggaggaggaagaggagagcatcctggacacggtgctcaaatacctgcccgggccgctgcaggacatgttcaagaagtaaccaggcctcctgccccagcctactccacctgttactacttctttttggttctttcttttctttttattaggttaagtctcaattctgaaggggaaaacctcagttggcctctgcccctcttccctggccaggggcttctccccctcagctctccctcacacctcccttcatcccagggtatccacctgcaccccactcccaagtagcttgaaaaagggaggacagtctttccccagcaggggtcaggggggcccctcaggaagcctaaggtcgtgctagtgtggtgacccccatacattcctccctgctccccactgccaggaggaccactgtccccagccagccaaagtaatgacacattccagccctgcccagcatgctgacctttggcctctaaccctcagtgggcccccaggtcagggcaggggcactgagtggcctggctctgaggaagggagtcaggggaagcctgtcccgggaaggcccaggctgagaggccctggctctggccaggctgggatctgggtgggaggctggggctcttcttcttccatctccttggtgacacccagcccaggggcacccccttccccagcccccacctggagagacatggcccctgccaagctggtcccttcaaatggatcctttgtggactttagctcatttgtggaggaaccccaggtagggacgccccttgttcctcacccccaccccacttaggtcctgggcccccactgccaggctgggcccagcttgctcagtcaaggggctgccaggcccccagaaaacacttggagccatcgggtagcgatggtctatgccatggggaacacctccattggtgtggccaagctgcccccattcctatccacccctctccccaccccgtcctgtccatgcgcttccagggccccacggtccccaggaggacgcttcctggccaaagccccaagcctttggtgagaagccaattcccacttgacagaaggcgtccatccattcatctcattggccaaggacaaactctcctctgggacgtctgggactggcatttgtcccccactcaaattatcaaagctttctgctcagtcagttgtgtggggatggtgagggaagaggggtcacatgagggaggaaactgtatccatgcatgcatgataatgcgtggcagagactgcaacagggattgtgtgttcagagatcatatgcatatgtgtagggctggagcgtgtgtgtgtcttgagattgtgtgtgttgcagtcatcatatctatgtgttacagattgtgtatgttagccttgtgtatgtgtgcttgattgaggtggtgtatttgggttgaaatgtgtcatatgtgtgtgctatccatctcgtgtttagaggctgtatatgttagcttgtgtaagaatgtgttttcaaaacagtgtgtgtattgggagtgatgggtatgtgttaggtatgtgatgggttgtagaagcgtgtgtttgagagaattcagagacatttgaaggctgctgtgtgcatgtttgggggtctgaaaagacagttgtgtgcatggatgtgtgcgtggggagaaagaacgtgggtaagatgtcccttcccagccctgagaccactggtcacagttggccacctccaacgggagaccttgtccttggcctagagtcctcccacccttggggggctcctgcctgaggtcctcagaatcccactgcaatggacccaggcagcgccccaggaagccatgctgggcccccgccagggcctatcccaaaagcaggggccagggagggggcgacttgcctgcccctgaagcccttgttcccattggccccagtttgcattctgcaggttttccattttagtgggttctgcttttatttcagagacagacatgtgtcttctctgtccgtttccaataggtaaagccatatcagttagactgcaatactttaaacacgagacaaaacaatccatatgtttagggaaccagaaaagtcccctggtctgtcccttctttggggagcagggcctcgacagctccagctcccttgacctaccttcctccccgcaccccgcccccaccttgtgcccctgtgtccagccccccagggggcctgtgtctgtgtctgtgcctgtgtctgtgatggggagccgcctcgcacccctgttgtctgcttgtctctttgtgtctgttatcctgggcaggatggtcattctcaaaaaccctggggtcctgggccagagacaggcagggcccagtccaggggccccaggcctccccagtcccagtgtgcgagccccacttggacacaagtgttcagagaggtccccctctgccacttgacagggaccttcaaacctcgacagtgatgcaaggacacagagagtaccagataggtagcagagaccaaggcgcagggtgcttcagatgagcaagagaacccagtcgaaccagataccccaggtgggccggagggaccccagaccttcagagggctgccctggtgttctccacagtgcagtccctctgtattcccagagtgggatcggggctttcagccccaccctgatgcctgccctccaggatggctggtttagtctgggtccatgtcccagacccctctattctgctccaggacagcaggacttcaggtcttcctgggggtggatataggagaaaatttctgcctggcacacacctggctccaaccactgccaagtgatcactcttaggcccaggggaacacaatgactatcattactgatgcagacctggctgtggagagcagctaatgtgtggcccagagagcctgtctgtgtggagcacgtagtgcacagaatacgtgagagttgctctggcaggggcaggatcctcacaggatcgcctgggaggtgaggtgtgtgtgacccactggatgggagggcaatgagtgtgcacatacaaatggggcagtgtgcatgcaacacacttaggggaggagtggccccagaattcagcacgcacacaacacacaagggagagaacccccagatgagaaaataggaaggagcaatcatttgtagatgggtgaaaaaagaatgaggttcaagggagcgtgcaccaggtgaggtgagcgtgtgtgctctcagggaagggcccaggctcccatgcctgggaggagctgccagagagaagcaaaaaggcggctgtggatcgccctgggctgggcaccagtgacaggtcaggatctccaaacatggacgtcctcccctccaaatccagaagctcccagaaggtgtccttaactgcaaagctgtgcagggtactcctccagatggaatcaggaagtcgagacaccatcccaggtgtgtgtaagagagagagagagaacagggaggatacagaagtattgcagcccagatcccctatcagggggacagctggtgggcaaagcagccaccccacagccttgtggctagagtacagtggggtggaccctccagccccaatagccctagtacccagctggcagggttgcccacccctgctgtccacctgctccatcctctagggttccacaggcccctgaccgcacagggaggctggggccagcctggtctcccaggcctgaggacatgcctcccacccaaatgtcccctgctccagtcccactcctgtcaccccacgctctgcactggggagaaaacgggaggtgctcgtgctggccctgggtgggagcggggagtcctggtgagaccccggtgagatggaccatcctgcccgcgtgggggatcccctttcccacatccgtgctgtgtcattgttgctctgcttcctttcaatgtgtcagtgcctggggggaggggaggagcaccccctcagcccccctgaacctgaccaaaagccatggctgttgctcccccctttgtatgatgcaaatgctgaaatgtacaaaatcaaccatgacaacaaagaaaaagaccttgtacagca

SEQ ID NO: 303122 - DNA, 4549 bp, Homo sapiens
agctggaatagcagaaggaaccacctcgtggagtcgggccggagccctgcagtggctcagacggttgcagggaccgccaggttgtcacatcttcccaagccaggccagccaggagcgctgcatgcaaattctgccgtgggctaaggcacgctaaccagagccggcggcatggacttcgtcatgaagcaggcccttggaggggccacaaaggacatggggaagatgctggggggagaggaggagaaggaccccgacgcgcagaaaaaggaggaggagcggcaggaggcgctgcggcagcaggaggaggagcgtaaggccaagcacgcgcgcatggaggcggagcgggagaaggtccggcagcagatccgagataagtatgggctgaagaagaaggaggagaaggaagcagaggagaaagcagccctggagcagccctgcgaggggagcctgacccggcccaagaaggccatccctgcgggctgcggggacgaggaggaggaggaagaggagagcatcctggacacggtgctcaaatacctgcccgggccgctgcaggacatgttcaagaagtaaccaggcctcctgccccagcctactccacctgttactacttctttttggttctttcttttctttttattaggttaagtctcaattctgaaggggaaaacctcagttggcctctgcccctcttccctggccaggggcttctccccctcagctctccctcacacctcccttcatcccagggtatccacctgcaccccactcccaagtagcttgaaaaagggaggacagtctttccccagcaggggtcaggggggcccctcaggaagcctaaggtcgtgctagtgtggtgacccccatacattcctccctgctccccactgccaggaggaccactgtccccagccagccaaagtaatgacacattccagccctgcccagcatgctgacctttggcctctaaccctcagtgggcccccaggtcagggcaggggcactgagtggcctggctctgaggaagggagtcaggggaagcctgtcccgggaaggcccaggctgagaggccctggctctggccaggctgggatctgggtgggaggctggggctcttcttcttccatctccttggtgacacccagcccaggggcacccccttccccagcccccacctggagagacatggcccctgccaagctggtcccttcaaatggatcctttgtggactttagctcatttgtggaggaaccccaggtagggacgccccttgttcctcacccccaccccacttaggtcctgggcccccactgccaggctgggcccagcttgctcagtcaaggggctgccaggcccccagaaaacacttggagccatcgggtagcgatggtctatgccatggggaacacctccattggtgtggccaagctgcccccattcctatccacccctctccccaccccgtcctgtccatgcgcttccagggccccacggtccccaggaggacgcttcctggccaaagccccaagcctttggtgagaagccaattcccacttgacagaaggcgtccatccattcatctcattggccaaggacaaactctcctctgggacgtctgggactggcatttgtcccccactcaaattatcaaagctttctgctcagtcagttgtgtggggatggtgagggaagaggggtcacatgagggaggaaactgtatccatgcatgcatgataatgcgtggcagagactgcaacagggattgtgtgttcagagatcatatgcatatgtgtagggctggagcgtgtgtgtgtcttgagattgtgtgtgttgcagtcatcatatctatgtgttacagattgtgtatgttagccttgtgtatgtgtgcttgattgaggtggtgtatttgggttgaaatgtgtcatatgtgtgtgctatccatctcgtgtttagaggctgtatatgttagcttgtgtaagaatgtgttttcaaaacagtgtgtgtattgggagtgatgggtatgtgttaggtatgtgatgggttgtagaagcgtgtgtttgagagaattcagagacatttgaaggctgctgtgtgcatgtttgggggtctgaaaagacagttgtgtgcatggatgtgtgcgtggggagaaagaacgtgggtaagatgtcccttcccagccctgagaccactggtcacagttggccacctccaacgggagaccttgtccttggcctagagtcctcccacccttggggggctcctgcctgaggtcctcagaatcccactgcaatggacccaggcagcgccccaggaagccatgctgggcccccgccagggcctatcccaaaagcaggggccagggagggggcgacttgcctgcccctgaagcccttgttcccattggccccagtttgcattctgcaggttttccattttagtgggttctgcttttatttcagagacagacatgtgtcttctctgtccgtttccaataggtaaagccatatcagttagactgcaatactttaaacacgagacaaaacaatccatatgtttagggaaccagaaaagtcccctggtctgtcccttctttggggagcagggcctcgacagctccagctcccttgacctaccttcctccccgcaccccgcccccaccttgtgcccctgtgtccagccccccagggggcctgtgtctgtgtctgtgcctgtgtctgtgatggggagccgcctcgcacccctgttgtctgcttgtctctttgtgtctgttatcctgggcaggatggtcattctcaaaaaccctggggtcctgggccagagacaggcagggcccagtccaggggccccaggcctccccagtcccagtgtgcgagccccacttggacacaagtgttcagagaggtccccctctgccacttgacagggaccttcaaacctcgacagtgatgcaaggacacagagagtaccagataggtagcagagaccaaggcgcagggtgcttcagatgagcaagagaacccagtcgaaccagataccccaggtgggccggagggaccccagaccttcagagggctgccctggtgttctccacagtgcagtccctctgtattcccagagtgggatcggggctttcagccccaccctgatgcctgccctccaggatggctggtttagtctgggtccatgtcccagacccctctattctgctccaggacagcaggacttcaggtcttcctgggggtggatataggagaaaatttctgcctggcacacacctggctccaaccactgccaagtgatcactcttaggcccaggggaacacaatgactatcattactgatgcagacctggctgtggagagcagctaatgtgtggcccagagagcctgtctgtgtggagcacgtagtgcacagaatacgtgagagttgctctggcaggggcaggatcctcacaggatcgcctgggaggtgaggtgtgtgtgacccactggatgggagggcaatgagtgtgcacatacaaatggggcagtgtgcatgcaacacacttaggggaggagtggccccagaattcagcacgcacacaacacacaagggagagaacccccagatgagaaaataggaaggagcaatcatttgtagatgggtgaaaaaagaatgaggttcaagggagcgtgcaccaggtgaggtgagcgtgtgtgctctcagggaagggcccaggctcccatgcctgggaggagctgccagagagaagcaaaaaggcggctgtggatcgccctgggctgggcaccagtgacaggtcaggatctccaaacatggacgtcctcccctccaaatccagaagctcccagaaggtgtccttaactgcaaagctgtgcagggtactcctccagatggaatcaggaagtcgagacaccatcccaggtgtgtgtaagagagagagagagaacagggaggatacagaagtattgcagcccagatcccctatcagggggacagctggtgggcaaagcagccaccccacagccttgtggctagagtacagtggggtggaccctccagccccaatagccctagtacccagctggcagggttgcccacccctgctgtccacctgctccatcctctagggttccacaggcccctgaccgcacagggaggctggggccagcctggtctcccaggcctgaggacatgcctcccacccaaatgtcccctgctccagtcccactcctgtcaccccacgctctgcactggggagaaaacgggaggtgctcgtgctggccctgggtgggagcggggagtcctggtgagaccccggtgagatggaccatcctgcccgcgtgggggatcccctttcccacatccgtgctgtgtcattgttgctctgcttcctttcaatgtgtcagtgcctggggggaggggaggagcaccccctcagcccccctgaacctgaccaaaagccatggctgttgctcccccctttgtatgatgcaaatgctgaaatgtacaaaatcaaccatgacaacaaagaaaaagaccttgtacagca

SEQ ID NO: 303123 - DNA, 4593 bp, Homo sapiens
cgagctcggtacccaacgcgcttgattagcctcccaacaggaaggtgtgatccctgccatgctatctgctctgctcagcgactgaaggtgcccgcatcccagctctgccaggaagcaaaggtaagttgtcacatcttcccaagccaggccagccaggagcgctgcatgcaaattctgccgtgggctaaggcacgctaaccagagccggcggcatggacttcgtcatgaagcaggcccttggaggggccacaaaggacatggggaagatgctggggggagaggaggagaaggaccccgacgcgcagaaaaaggaggaggagcggcaggaggcgctgcggcagcaggaggaggagcgtaaggccaagcacgcgcgcatggaggcggagcgggagaaggtccggcagcagatccgagataagtatgggctgaagaagaaggaggagaaggaagcagaggagaaagcagccctggagcagccctgcgaggggagcctgacccggcccaagaaggccatccctgcgggctgcggggacgaggaggaggaggaagaggagagcatcctggacacggtgctcaaatacctgcccgggccgctgcaggacatgttcaagaagtaaccaggcctcctgccccagcctactccacctgttactacttctttttggttctttcttttctttttattaggttaagtctcaattctgaaggggaaaacctcagttggcctctgcccctcttccctggccaggggcttctccccctcagctctccctcacacctcccttcatcccagggtatccacctgcaccccactcccaagtagcttgaaaaagggaggacagtctttccccagcaggggtcaggggggcccctcaggaagcctaaggtcgtgctagtgtggtgacccccatacattcctccctgctccccactgccaggaggaccactgtccccagccagccaaagtaatgacacattccagccctgcccagcatgctgacctttggcctctaaccctcagtgggcccccaggtcagggcaggggcactgagtggcctggctctgaggaagggagtcaggggaagcctgtcccgggaaggcccaggctgagaggccctggctctggccaggctgggatctgggtgggaggctggggctcttcttcttccatctccttggtgacacccagcccaggggcacccccttccccagcccccacctggagagacatggcccctgccaagctggtcccttcaaatggatcctttgtggactttagctcatttgtggaggaaccccaggtagggacgccccttgttcctcacccccaccccacttaggtcctgggcccccactgccaggctgggcccagcttgctcagtcaaggggctgccaggcccccagaaaacacttggagccatcgggtagcgatggtctatgccatggggaacacctccattggtgtggccaagctgcccccattcctatccacccctctccccaccccgtcctgtccatgcgcttccagggccccacggtccccaggaggacgcttcctggccaaagccccaagcctttggtgagaagccaattcccacttgacagaaggcgtccatccattcatctcattggccaaggacaaactctcctctgggacgtctgggactggcatttgtcccccactcaaattatcaaagctttctgctcagtcagttgtgtggggatggtgagggaagaggggtcacatgagggaggaaactgtatccatgcatgcatgataatgcgtggcagagactgcaacagggattgtgtgttcagagatcatatgcatatgtgtagggctggagcgtgtgtgtgtcttgagattgtgtgtgttgcagtcatcatatctatgtgttacagattgtgtatgttagccttgtgtatgtgtgcttgattgaggtggtgtatttgggttgaaatgtgtcatatgtgtgtgctatccatctcgtgtttagaggctgtatatgttagcttgtgtaagaatgtgttttcaaaacagtgtgtgtattgggagtgatgggtatgtgttaggtatgtgatgggttgtagaagcgtgtgtttgagagaattcagagacatttgaaggctgctgtgtgcatgtttgggggtctgaaaagacagttgtgtgcatggatgtgtgcgtggggagaaagaacgtgggtaagatgtcccttcccagccctgagaccactggtcacagttggccacctccaacgggagaccttgtccttggcctagagtcctcccacccttggggggctcctgcctgaggtcctcagaatcccactgcaatggacccaggcagcgccccaggaagccatgctgggcccccgccagggcctatcccaaaagcaggggccagggagggggcgacttgcctgcccctgaagcccttgttcccattggccccagtttgcattctgcaggttttccattttagtgggttctgcttttatttcagagacagacatgtgtcttctctgtccgtttccaataggtaaagccatatcagttagactgcaatactttaaacacgagacaaaacaatccatatgtttagggaaccagaaaagtcccctggtctgtcccttctttggggagcagggcctcgacagctccagctcccttgacctaccttcctccccgcaccccgcccccaccttgtgcccctgtgtccagccccccagggggcctgtgtctgtgtctgtgcctgtgtctgtgatggggagccgcctcgcacccctgttgtctgcttgtctctttgtgtctgttatcctgggcaggatggtcattctcaaaaaccctggggtcctgggccagagacaggcagggcccagtccaggggccccaggcctccccagtcccagtgtgcgagccccacttggacacaagtgttcagagaggtccccctctgccacttgacagggaccttcaaacctcgacagtgatgcaaggacacagagagtaccagataggtagcagagaccaaggcgcagggtgcttcagatgagcaagagaacccagtcgaaccagataccccaggtgggccggagggaccccagaccttcagagggctgccctggtgttctccacagtgcagtccctctgtattcccagagtgggatcggggctttcagccccaccctgatgcctgccctccaggatggctggtttagtctgggtccatgtcccagacccctctattctgctccaggacagcaggacttcaggtcttcctgggggtggatataggagaaaatttctgcctggcacacacctggctccaaccactgccaagtgatcactcttaggcccaggggaacacaatgactatcattactgatgcagacctggctgtggagagcagctaatgtgtggcccagagagcctgtctgtgtggagcacgtagtgcacagaatacgtgagagttgctctggcaggggcaggatcctcacaggatcgcctgggaggtgaggtgtgtgtgacccactggatgggagggcaatgagtgtgcacatacaaatggggcagtgtgcatgcaacacacttaggggaggagtggccccagaattcagcacgcacacaacacacaagggagagaacccccagatgagaaaataggaaggagcaatcatttgtagatgggtgaaaaaagaatgaggttcaagggagcgtgcaccaggtgaggtgagcgtgtgtgctctcagggaagggcccaggctcccatgcctgggaggagctgccagagagaagcaaaaaggcggctgtggatcgccctgggctgggcaccagtgacaggtcaggatctccaaacatggacgtcctcccctccaaatccagaagctcccagaaggtgtccttaactgcaaagctgtgcagggtactcctccagatggaatcaggaagtcgagacaccatcccaggtgtgtgtaagagagagagagagaacagggaggatacagaagtattgcagcccagatcccctatcagggggacagctggtgggcaaagcagccaccccacagccttgtggctagagtacagtggggtggaccctccagccccaatagccctagtacccagctggcagggttgcccacccctgctgtccacctgctccatcctctagggttccacaggcccctgaccgcacagggaggctggggccagcctggtctcccaggcctgaggacatgcctcccacccaaatgtcccctgctccagtcccactcctgtcaccccacgctctgcactggggagaaaacgggaggtgctcgtgctggccctgggtgggagcggggagtcctggtgagaccccggtgagatggaccatcctgcccgcgtgggggatcccctttcccacatccgtgctgtgtcattgttgctctgcttcctttcaatgtgtcagtgcctggggggaggggaggagcaccccctcagcccccctgaacctgaccaaaagccatggctgttgctcccccctttgtatgatgcaaatgctgaaatgtacaaaatcaaccatgacaacaaagaaaaagaccttgtacagca

SEQ ID NO: 303124 - DNA, 3165 bp, Homo sapiens
cgggagacattcgaggcggacagaaacggggcttggcgccccccggtgcacgtgtgctagcccaggcaggagggagcgcctcggcggaggagtcaaggaagagggggagggagaaacgcgccagaacctcggcccgggcgccctcgtcggccgcggaggagctgcagcctccaacaggaaggtgtgatccctgccatgctatctgctctgctcagcgactgaaggtgcccgcatcccagctctgccaggaagcaaaggtaagttgtcacatcttcccaagccaggccagccaggagcgctgcatgcaaattctgccgtgggctaaggcacgctaaccagagccggcggcatggacttcgtcatgaagcaggcccttggaggggccacaaaggacatggggaagatgctggggggagaggaggagaaggaccccgacgcgcagaaaaaggaggaggagcggcaggaggcgctgcggcagcaggaggaggagcgtaaggccaagcacgcgcgcatggaggcggagcgggagaaggtccggcagcagatccgagataagtatgggctgaagaagaaggaggagaaggaagcagaggagaaagcagccctggagcagccctgcgaggggagcctgacccggcccaagaaggccatccctgcgggctgcggggacgaggaggaggaggaagaggagagcatcctggacacggtgctcaaatacctgcccgggccgctgcaggacatgttcaagaagtaaccaggcctcctgccccagcctactccacctgttactacttctttttggttctttcttttctttttattaggttaagtctcaattctgaaggggaaaacctcagttggcctctgcccctcttccctggccaggggcttctccccctcagctctccctcacacctcccttcatcccagggtatccacctgcaccccactcccaagtagcttgaaaaagggaggacagtctttccccagcaggggtcaggggggcccctcaggaagcctaaggtcgtgctagtgtggtgacccccatacattcctccctgctccccactgccaggaggaccactgtccccagccagccaaagtaatgacacattccagccctgcccagcatgctgacctttggcctctaaccctcagtgggcccccaggtcagggcaggggcactgagtggcctggctctgaggaagggagtcaggggaagcctgtcccgggaaggcccaggctgagaggccctggctctggccaggctgggatctgggtgggaggctggggctcttcttcttccatctccttggtgacacccagcccaggggcacccccttccccagcccccacctggagagacatggcccctgccaagctggtcccttcaaatggatcctttgtggactttagctcatttgtggaggaaccccaggtagggacgccccttgttcctcacccccaccccacttaggtcctgggcccccactgccaggctgggcccagcttgctcagtcaaggggctgccaggcccccagaaaacacttggagccatcgggtagcgatggtctatgccatggggaacacctccattggtgtggccaagctgcccccattcctatccacccctctccccaccccgtcctgtccatgcgcttccagggccccacggtccccaggaggacgcttcctggccaaagccccaagcctttggtgagaagccaattcccacttgacagaaggcgtccatccattcatctcattggccaaggacaaactctcctctgggacgtctgggactggcatttgtcccccactcaaattatcaaagctttctgctcagtcagttgtgtggggatggtgagggaagaggggtcacatgagggaggaaactgtatccatgcatgcatgataatgcgtggcagagactgcaacagggattgtgtgttcagagatcatatgcatatgtgtagggctggagcgtgtgtgtgtcttgagattgtgtgtgttgcagtcatcatatctatgtgttacagattgtgtatgttagccttgtgtatgtgtgcttgattgaggtggtgtatttgggttgaaatgtgtcatatgtgtgtgctatccatctcgtgtttagaggctgtatatgttagcttgtgtaagaatgtgttttcaaaacagtgtgtgtattgggagtgatgggtatgtgttaggtatgtgatgggttgtagaagcgtgtgtttgagagaattcagagacatttgaaggctgctgtgtgcatgtttgggggtctgaaaagacagttgtgtgcatggatgtgtgcgtggggagaaagaacgtgggtaagatgtcccttcccagccctgagaccactggtcacagttggccacctccaacgggagaccttgtccttggcctagagtcctcccacccttggggggctcctgcctgaggtcctcagaatcccactgcaatggacccaggcagcgccccaggaagccatgctgggcccccgccagggcctatcccaaaagcaggggccagggagggggcgacttgcctgcccctgaagcccttgttcccattggccccagtttgcattctgcaggttttccattttagtgggttctgcttttatttcagagacagacatgtgtcttctctgtccgtttccaataggtaaagccatatcagttagactgcaatactttaaacacgagacaaaacaatccatatgtttagggaaccagaaaagtcccctggtctgtcccttctttggggagcagggcctcgacagctccagctcccttgacctaccttcctccccgcaccccgcccccaccttgtgcccctgtgtccagccccccagggggcctgtgtctgtgtctgtgcctgtgtctgtgatggggagccgcctcgcacccctgttgtctgcttgtctctttgtgtctctgcccgcgtgggggatcccctttcccacatccgtgctgtgtcattgttgctctgcttcctttcaatgtgtcagtgcctggggggaggggaggagcaccccctcagcccccctgaacctgaccaaaagccatggctgttgctcccccctttgtatgatgcaaatgctgaaatgtacaaaatcaaccatgacaacaaagaaaaagaccttgtacagca

SEQ ID NO: 303125 - DNA, 3014 bp, Homo sapiens
cgggagacattcgaggcggacagaaacggggcttggcgccccccggtgcacgtgtgctagcccaggcaggagggagcgcctcggcggaggagtcaaggaagagggggagggagaaacgcgccagaacctcggcccgggcgccctcgtcggccgcggaggagctgcagcctccaacaggaaggtgtgatccctgccatgctatctgctctgctcagcgactgaaggtgcccgcatcccagctctgccaggaagcaaaggtaagttgtcacatcttcccaagccaggccagccaggagcgctgcatgcaaattctgccgtgggctaaggcacgctaaccagagccggcggcatggacttcgtcatgaagcaggcccttggaggggccacaaaggacatggggaagatgctggggggagaggaggagaaggaccccgacgcgcagaaaaaggaggaggagcggcaggaggcgctgcggcagcaggaggaggagcgtaaggccaagcacgcgcgcatggaggcggagcgggagaaggtccggcagcagatccgagataagtatgggctgaagaagaaggaggagaaggaagcagaggagaaagcagccctggagcagccctgcgaggggagcctgacccggcccaagaaggccatccctgcgggctgcggggacgaggaggaggaggaagaggagagcatcctggacacggtgctcaaatacctgcccgggccgctgcaggacatgttcaagaagtaaccaggcctcctgccccagcctactccacctgttactacttctttttggttctttcttttctttttattaggttaagtctcaattctgaaggggaaaacctcagttggcctctgcccctcttccctggccaggggcttctccccctcagctctccctcacacctcccttcatcccagggtatccacctgcaccccactcccaagtagcttgaaaaagggaggacagtctttccccagcaggggtcaggggggcccctcaggaagcctaaggtcgtgctagtgtggtgacccccatacattcctccctgctccccactgccaggaggaccactgtccccagccagccaaagtaatgacacattccagccctgcccagcatgctgacctttggcctctaaccctcagtgggcccccaggtcagggcaggggcactgagtggcctggctctgaggaagggagtcaggggaagcctgtcccgggaaggcccaggctgagaggccctggctctggccaggctgggatctgggtgggaggctggggctcttcttcttccatctccttggtgacacccagcccaggggcacccccttccccagcccccacctggagagacatggcccctgccaagctggtcccttcaaatggatcctttgtggactttagctcatttgtggaggaaccccaggtagggacgccccttgttcctcacccccaccccacttaggtcctgggcccccactgccaggctgggcccagcttgctcagtcaaggggctgccaggcccccagaaaacacttggagccatcgggtagcgatggtctatgccatggggaacacctccattggtgtggccaagctgcccccattcctatccacccctctccccaccccgtcctgtccatgcgcttccagggccccacggtccccaggaggacgcttcctggccaaagccccaagcctttggtgagaagccaattcccacttgacagaaggcgtccatccattcatctcattggccaaggacaaactctcctctgggacgtctgggactggcatttgtcccccactcaaattatcaaagctttctgctcagtcagttgtgtggggatggtgagggaagaggggtcacatgagggaggaaactgtatccatgcatgcatgataatgcgtggcagagactgcaacagggattgtgtgttcagagatcatatgcatatgtgtagggctggagcgtgtgtgtgtcttgagattgtgtgtgttgcagtcatcatatctatgtgttacagattgtgtatgttagccttgtgtatgtgtgcttgattgaggtggtgtatttgggttgaaatgtgtcatatgtgtgtgctatccatctcgtgtttagaggctgtatatgttagcttgtgtaagaatgtgttttcaaaacagtgtgtgtattgggagtgatgggtatgtgttaggtatgtgatgggttgtagaagcgtgtgtttgagagaattcagagacatttgaaggctgctgtgtgcatgtttgggggtctgaaaagacagttgtgtgcatggatgtgtgcgtggggagaaagaacgtgggtaagatgtcccttcccagccctgagaccactggtcacagttggccacctccaacgggagaccttgtccttggcctagagtcctcccacccttggggggctcctgcctgaggtcctcagaatcccactgcaatggacccaggcagcgccccaggaagccatgctgggcccccgccagggcctatcccaaaagcaggggccagggagggggcgacttgcctgcccctgaagcccttgttcccattggccccagtttgcattctgcaggttttccattttagtgggttctgcttttatttcagagacagacatgtgtcttctctgtccgtttccaataggtaaagccatatcagttagactgcaatactttaaacacgagacaaaacaatccatatgtttagggaaccagaaaagtcccctggtctgtcccttctttggggagcagggcctcgacagctccagctcccttgacctaccttcctccccgcaccccgcccccaccttgtgcccctgtgtccagccccccagggggcctgtgtctgtgtctgtgcctgtgtctgtgatggggagccgcctcgcacccctgttgtctgcttgtctctttgtgtctgtatgatgcaaatgctgaaatgtacaaaatcaaccatgacaacaaagaaaaagaccttgtacagca

SEQ ID NO: 303126 - DNA, 971 bp, Homo sapiens
ctggaaaccctggattcaaggagagaacccagatcgacattgaaggagcaatcatttgtagatgggtgaaaaaagaatgaggttcaagggagcgtgcaccaggtgaggtgagcgtgtgtgctctcagggaagggcccaggctcccatgcctgggaggagctgccagagagaagcaaaaaggcggctgtggatcgccctgggctgggcaccagtgacaggtcaggatctccaaacatggacgtcctcccctccaaatccagaagctcccagaaggtgtccttaactgcaaagctgtgcagggtactcctccagatggaatcaggaagtcgagacaccatcccaggtgtgtgtaagagagagagagagaacagggaggatacagaagtattgcagcccagatcccctatcagggggacagctggtgggcaaagcagccaccccacagccttgtggctagagtacagtggggtggaccctccagccccaatagccctagtacccagctggcagggttgcccacccctgctgtccacctgctccatcctctagggttccacaggcccctgaccgcacagggaggctggggccagcctggtctcccaggcctgaggacatgcctcccacccaaatgtcccctgctccagtcccactcctgtcaccccacgctctgcactggggagaaaacgggaggtgctcgtgctggccctgggtgggagcggggagtcctggtgagaccccggtgagatggaccatcctgcccgcgtgggggatcccctttcccacatccgtgctgtgtcattgttgctctgcttcctttcaatgtgtcagtgcctggggggaggggaggagcaccccctcagcccccctgaacctgaccaaaagccatggctgttgctcccccctttgtatgatgcaaatgctgaaatgtacaaaatcaaccatgacaacaaagaaaaagaccttgtacagca

SEQ ID NO: 303127 - DNA, 855 bp, Homo sapiens
ttcctcatggctgactctagaggatacacaactcaggggcgagctgccagagagaagcaaaaaggcggctgtggatcgccctgggctgggcaccagtgacaggtcaggatctccaaacatggacgtcctcccctccaaatccagaagctcccagaaggtgtccttaactgcaaagctgtgcagggtactcctccagatggaatcaggaagtcgagacaccatcccaggtgtgtgtaagagagagagagagaacagggaggatacagaagtattgcagcccagatcccctatcagggggacagctggtgggcaaagcagccaccccacagccttgtggctagagtacagtggggtggaccctccagccccaatagccctagtacccagctggcagggttgcccacccctgctgtccacctgctccatcctctagggttccacaggcccctgaccgcacagggaggctggggccagcctggtctcccaggcctgaggacatgcctcccacccaaatgtcccctgctccagtcccactcctgtcaccccacgctctgcactggggagaaaacgggaggtgctcgtgctggccctgggtgggagcggggagtcctggtgagaccccggtgagatggaccatcctgcccgcgtgggggatcccctttcccacatccgtgctgtgtcattgttgctctgcttcctttcaatgtgtcagtgcctggggggaggggaggagcaccccctcagcccccctgaacctgaccaaaagccatggctgttgctcccccctttgtatgatgcaaatgctgaaatgtacaaaatcaaccatgacaacaaagaaaaagaccttgtacagca

SEQ ID NO: 303128 - DNA, 1530 bp, Homo sapiens
cgggagacattcgaggcggacagaaacggggcttggcgccccccggtgcacgtgtgctagcccaggcaggagggagcgcctcggcggaggagtcaaggaagagggggagggagaaacgcgccagaacctcggcccgggcgccctcgtcggccgcggaggagctgcagcctccaacaggaaggtgtgatccctgccatgctatctgctctgctcagcgactgaaggtgcccgcatcccagctctgccaggaagcaaaggtaagttgtcacatcttcccaagccaggccagccaggagcgctgcatgcaaattctgccgtgggctaaggcacgctaaccagagccggcggcatggacttcgtcatgaagcaggcccttggaggggccacaaaggacatggggaagatgctggggggagaggaggagaaggaccccgacgcgcagaaaaaggaggaggagcggcaggaggcgctgcggcagcaggaggaggagcgtaaggccaagcacgcgcgcatggaggcggagcgggagaaggtccggcagcagatccgagataagtatgggctgaagaagaaggaggagaaggaagcagaggagaaagcagccctggagcagccctgcgaggggagcctgacccggcccaagaaggccatccctgcgggctgcggggacgaggaggaggaggaagaggagagcatcctggacacggtgctcaaatacctgcccgggccgctgcaggacatgttcaagaagtaaccaggcctcctgccccagcctactccacctgttactacttctttttggttctttcttttctttttattaggttaagtctcaattctgaaggggaaaacctcagttggcctctgcccctcttccctggccaggggcttctccccctcagctctccctcacacctcccttcatcccagggtatccacctgcaccccactcccaagtagcttgaaaaagggaggacagtctttccccagcaggggtcaggggggcccctcaggaagcctaaggtcgtgctagtgtggtgacccccatacattcctccctgctccccactgccaggaggaccactgtccccagccagccaaagtaatgacacattccagccctgcccagcatgctgacctttggcctctaaccctcagtgggcccccaggtcaggatgcggggcaggggtggaatgtgtcattacttggctggctggggagagtggtacggcgcggctgcagccagcaacgcgacgcacgatccgtcgcgcgcccgcccacacaccatcactgcacgcgaccgctaccaggcgcggcgacgcggggtggtgagccgacccccagagccggagcggcaacgagccgccaggcgaaccggacaagaccaaacggacaacacagcaaactaccgcggaagacgcggagagcaaaacgtagcgatcacgcgggcccaacagtcgcacgaacttccgccacccccacgagaccgacgccaaacccatacgaaccagaggactaataaacgacgtc

SEQ ID NO: 303129 - DNA, 697 bp, Homo sapiens
  misc_feature (37)..(37): n is a, c, g, or t
  misc_feature (53)..(53): n is a, c, g, or t
aatggaacaggggaaatttggtgggaggcatgtcctnaggcctgggagaccangctggccccagcctccctgtgcggtcaggggcctgtggaaccctggaggatacagaagtattgcagcccagatcccctatcagggggacagctggtgggcaaagcagccaccccacagccttgtggctagagtacagtggggtggaccctccagccccaatagccctagtacccagctggcagggttgcccacccctgctgtccacctgctccatcctctagggttccacaggcccctgaccgcacagggaggctggggccagcctggtctcccaggcctgaggacatgcctcccacccaaatgtcccctgctccagtcccactcctgtcaccccacgctctgcactggggagaaaacgggaggtgctcgtgctggccctgggtgggagcggggagtcctggtgagaccccggtgagatggaccatcctgcccgcgtgggggatcccctttcccacatccgtgctgtgtcattgttgctctgcttcctttcaatgtgtcagtgcctggggggaggggaggagcaccccctcagcccccctgaacctgaccaaaagccatggctgttgctcccccctttgtatgatgcaaatgctgaaatgtacaaaatcaaccatgacaacaaagaaaaagaccttgtacagca

SEQ ID NO: 303130 - DNA, 598 bp, Homo sapiens
ctctagaggatcttccgggggccttatcccctatcagggggacagctggtgggcaaagcagccaccccacagccttgtggctagagtacagtggggtggaccctccagccccaatagccctagtacccagctggcagggttgcccacccctgctgtccacctgctccatcctctagggttccacaggcccctgaccgcacagggaggctggggccagcctggtctcccaggcctgaggacatgcctcccacccaaatgtcccctgctccagtcccactcctgtcaccccacgctctgcactggggagaaaacgggaggtgctcgtgctggccctgggtgggagcggggagtcctggtgagaccccggtgagatggaccatcctgcccgcgtgggggatcccctttcccacatccgtgctgtgtcattgttgctctgcttcctttcaatgtgtcagtgcctggggggaggggaggagcaccccctcagcccccctgaacctgaccaaaagccatggctgttgctcccccctttgtatgatgcaaatgctgaaatgtacaaaatcaaccatgacaacaaagaaaaagaccttgtacagca

SEQ ID NO: 303131 - DNA, 523 bp, Homo sapiens
agctggaatagcagaaggaaccacctcgtggagtcgggccggagccctgcagtggctcagacggttgcagggaccgccaggttgtcacatcttcccaagccaggccagccaggagcgctgcatgcaaattctgccgtgggctaaggcacgctaaccagagccggcggcatggacttcgtcatgaagcaggcccttggaggggccacaaaggacatggggaagatgctggggggagaggaggagaaggaccccgacgcgcagaaaaaggaggaggagcggcaggaggcgctgcggcagcaggaggaggagcgtaaggccaagcacgcgcgcatggaggcggagcgggagaaggtccggcagcagatccgagataagtatgggctgaagaagaaggaggagaaggaagcagaggagaaagcagccctggagcagccctgcgaggggagcctgacccggcccgggccattcaacgcctccgggccattcaacgcctccgggccattcaacgcctccgggccattca

SEQ ID NO: 303132 - DNA, 4795 bp, Homo sapiens
aaatttgcaattttatattttgcaaatattttgagagacattgatttttctccccgtgctcccccgttcttccctgcggagtgcgctgcgccgcccagccctgtcgccccccggaggtgatccctccctcctgcctgcccgccagcctgacctgtgcccggctcgcgggccgcagcctcggccccggcgcgcccccggcagctctcggcgcgatgagcatagagacgctactggaggcggcccgcttcctggaatggcaagcgcagcaacaacagagagcacgtgaggagcaggagcggcttcgcttggagcaggagcgagagcaggaacagaagaaggccaatagcctggccaggctggcacatacccttcctgtggaggaaccccgcatggaggcgccacccctgcctctgtctccaccggctcccccgccggcacccccaccaccacttgccacccctgccccactgactgtcatccctatccctgtggtgaccaactcccctcagcctctacccccacccccacccttgcccgcggcagcccagcctctgcccctggcgcctcgtcagccggccctggttggcgcccccggactcagcattaaggagcctgcccccctgcccagcaggccgcaggtgcccacccctgctcccctactgccggactcgaaggccaccattccacccaatggcagccccaagcctttgcagcccctccccacgcctgtcctgaccatagcgccacaccctggagtccagcctcagctggccccccagcagccgcccccacccacgctggggaccctgaagttggcaccagctgaagaagtcaaatccagtgaacagaagaagaggcccggggggatcggaaccagagaagtccacaacaaattggagaagaacaggagggcccatctgaaagagtgctttgagaccctgaagcggaacatccccaacgtggatgacaagaagacgtccaatctgagcgtgctgcggacggcgctgcggtacatccagtccctgaagaggaaggagaaggaatatgagcatgaaatggagcggctggcacgtgagaagattgccacgcagcagcggctggcagagctcaagcacgagctgagccagtggatggacgtactggagattgaccgcgtgctgcggcagacgggccagcccgaggatgaccaggcctccacctccaccgcctctgagggtgaggacaacatagacgaggatatggaggaggaccgggcgggcctgggcccacctaagctgagccatcgtccccagccggagctgctgaagtccaccctgccaccccccagcaccacccctgcgcctctgcctccacacccacaccctcacccccactccgtggccctacctcctgcccacctccccgtgcagcagcagcagccacagcagaagacccctctgccagcccctcctcccccaccggctgcccctgcccagacactggtgccagctccagcccatctggtggcgacggctgggggtggctccacggtcatcgcccacacagctaccactcacgcttcagtcatccagactgtgaaccacgttctgcaggggccaggcggcaagcacatcgcccacatcgccccctcggcccccagccctgcggtgcaactggcgcctgccacaccccccattgggcacatcactgtgcaccctgccaccctcaaccatgtggcccacctgggctcccagctgcccttgtacccgcagcccgtggcagtgagccacatcgcccacaccctctcgcaccagcaagtcaacggcacggccggcctggggcccccggctactgtcatggcaaagccggccgtgggggctcaggtggtgcaccacccccagctggtgggccagaccgtgctcaaccctgtgaccatggtcaccatgccctccttcccagtcagcacactcaagctggcttgaggacgaggccactcagaggcccccagtggggacagggagggggacctgtcccccactctctcacccaccagctccacacattccagccaggcccaggccagcccccccacccacccccaggcctcctaggggaagggggtgcaaagactctgagccaagggagggaagggccaccctgctgcactaggacttggtaagatgactctgagaaaatgcgagactctgatggaatgtgccacctgtccggcccagtgccagctccagtgccgctcctgcttcccctccctaccctcggaaatcagtgcgatgtggacgtcacgctccctgacttcttcccccggccctgccccggccttcgtgtgctgctgctgctattgctgtctggtgaaggtggcccaggcccccggctttcctccggagcctcatgttctcttcccaggcctttggaggggaaatggggaaagcagaactgaagccacttggcccagaaagctgcggattggggtgataaggggccttgctctgagcacaggtgacagatcataggaagtggctggtctggagtcccacccggacaggtggggcctcagcctggggctctctgacccggttgcagtcactgtgattcgttaccgtagatactacttaaaatgattctctaccaacaataaaccaaacccagccactgccaagcttcctgtgccctcaccccaatccctgccactgggctctggacctcaggagggcaggctgaggtggggaaggagggacttggctgtccttccccttccccgtcccctgcagcctgggtctggatgggaggagagccactgggcccctgtcgtccccagtccccagccctgggcttggctcttggcttccagaaggcagcaaagaggggcgctgtcctgcgttcagcccctgatctctgacctctgctgagtgctgggcactgctccaagggacaggtgggcctggcggcctgtgggtttgggtgcctcctgcagtttgggagacatggaccagcatctggtcttgtttccaggagcatagaagccacatcgttgagacatcaggaaggtaaaaacccagcggcttagccaagccctaagcctgtccccagaccaaccctgggacctatacagaacagagggccagagctagggctgctgcttctgctccagcccctttgcctctgtcctcccatcccctcaacaccctgcttctcccggggacgcttttgagtgggccctgcccggggagctgcagagcagcagcacctttctctgagaagaggtccttggttgggtcaaggacagggctgagcgtggaagggggaggagtcaggggctctgtgttaggatgcggctttctctgcctctgggcagcctgctttggcctttccttgtatgtgggtgtttattacaagtggctttgtgtcagacacgctcggctccccacctggacacacactcaccagtggcctttcagtgtagcgggaggaagccggtgtccctggatgtgaagctcacactgatgggctggggcaggggcctgggccggcgagggggccggggggaggggacagagctgaggatttcctggagtgccctgcaggcacagaggaggtcagcaaaggtcttgaatagattttctctggaaataaagaatccttagatgcctaaaaattcccttcctgttccctcctggtcctggacacctcccaggggactgttccttatttctctctcctggtgtgggtaaagggacagttacaaaccaggtcaccatcctcagaggctgagccctgtacccaccccagcacagccacctccgccagaccccgtggctctgggagagccagctttgctattcccattgtgacagcgatggcaggcctgacccacggggcagttagagcagcctcgtggagctcgcccctcccctcagcctgcccacctctccctgcatcctgaggccagtggcccccgggcctgcacagatacctcatcatccacccgctgcccctccccgtccctgtcccccagcatcgggggcctgcaaatctagtgccgaatgactatgtccagattggtgacgatgggtgttgctgtttttcttgtcgtttgtgaacgctgtgatgctgtgtgcccaagtgggcagtcaccacccagcccttccttgggcgtctcccccagagtgctgtcgggaccacatctgtcctcaccctgtgggaccgcctggccctccctccctagcccttccagcctgggacacacacacacacacacacacacacacacacacacgcacgcacacgcacacatcttacctctcatgcgtgttttaccttttgatgttcagagtggctcactggctgggagtccttacctcggggagagggggaggttggttccttggggggccaaagaaggcagggaatgcctggagggtaactggggggccaccatgaccccttctctctccagaaacagctgcttctccccccatcccagggtcccacccccaacccccagaggtggcccttgtttacagtgaggactcggccactgtgtctctgtttcctgaaatataaactgtagcgaccccagactgtagagatttttatgtgtttggatacatctgctgtgtggaaaaaaaaaaaaactacaaaaaccctaattttgtacatactgtatttttactattgaactgtattctagtggctgttcatgctccaagactttagttaccgagacatgaatactatccatgtaataagcacttgcctggaataaaatataaaactgaaataaacctgcactgaaacctga

SEQ ID NO: 303133 - DNA, 473 bp, Homo sapiens
tagggggtcggggagcaggtgcagaccagcagccaggagggaggcgagtcctggagatgagatggggcgagggcgtgtcactgcctagtggctcatcgtgcaaggatgttgatgttaccagggagacaagtgaacggtgaggtggaagcgcaggatcaggttccttagagggtagctcgcggcagaagtgtgcaaagtgaagaggctgctggaggagggatggggcgagaggcggagaagcccctgaggatgaattgtggaggactgctcagggtgtcctgctgtcccttactctgtgtgccagtccctgaagaggaaggagaaggaatatgagcatgaaatggagcggctggcacgtgagaagattgccacgcagcagcggctggcagagctcaagcaagattttgccgtcccattcccattttttcctttacaattttaaacaagtttcttcattaaaaactatggtgatg

SEQ ID NO: 303134 - DNA, 4080 bp, Homo sapiens
tagggggtcggggagcaggtgcagaccagcagccaggagggaggcgagtcctggagatgagatggggcgagggcgtgtcactgcctagtggctcatcgtgcaaggatgttgatgttaccagggagacaagtgaacggtgaggtggaagcgcaggatcaggttccttagagggtagctcgcggcagaagtgtgcaaagtgaagaggctgctggaggagggatggggcgagaggcggagaagcccctgaggatgaattgtggaggactgctcagggtgtcctgctgtcccttactctgtgtgccagtccctgaagaggaaggagaaggaatatgagcatgaaatggagcggctggcacgtgagaagattgccacgcagcagcggctggcagagctcaagcacgagctgagccagtggatggacgtactggagattgaccgcgtgctgcggcagacgggccagcccgaggatgaccaggcctccacctccaccgcctctgagggtgaggacaacatagacgaggatatggaggaggaccgggcgggcctgggcccacctaagctgagccatcgtccccagccggagctgctgaagtccaccctgccaccccccagcaccacccctgcgcctctgcctccacacccacaccctcacccccactccgtggccctacctcctgcccacctccccgtgcagcagcagcagccacagcagaagacccctctgccagcccctcctcccccaccggctgcccctgcccagacactggtgccagctccagcccatctggtggcgacggctgggggtggctccacggtcatcgcccacacagctaccactcacgcttcagtcatccagactgtgaaccacgttctgcaggggccaggcggcaagcacatcgcccacatcgccccctcggcccccagccctgcggtgcaactggcgcctgccacaccccccattgggcacatcactgtgcaccctgccaccctcaaccatgtggcccacctgggctcccagctgcccttgtacccgcagcccgtggcagtgagccacatcgcccacaccctctcgcaccagcaagtcaacggcacggccggcctggggcccccggctactgtcatggcaaagccggccgtgggggctcaggtggtgcaccacccccagctggtgggccagaccgtgctcaaccctgtgaccatggtcaccatgccctccttcccagtcagcacactcaagctggcttgaggacgaggccactcagaggcccccagtggggacagggagggggacctgtcccccactctctcacccaccagctccacacattccagccaggcccaggccagcccccccacccacccccaggcctcctaggggaagggggtgcaaagactctgagccaagggagggaagggccaccctgctgcactaggacttggtaagatgactctgagaaaatgcgagactctgatggaatgtgccacctgtccggcccagtgccagctccagtgccgctcctgcttcccctccctaccctcggaaatcagtgcgatgtggacgtcacgctccctgacttcttcccccggccctgccccggccttcgtgtgctgctgctgctattgctgtctggtgaaggtggcccaggcccccggctttcctccggagcctcatgttctcttcccaggcctttggaggggaaatggggaaagcagaactgaagccacttggcccagaaagctgcggattggggtgataaggggccttgctctgagcacaggtgacagatcataggaagtggctggtctggagtcccacccggacaggtggggcctcagcctggggctctctgacccggttgcagtcactgtgattcgttaccgtagatactacttaaaatgattctctaccaacaataaaccaaacccagccactgccaagcttcctgtgccctcaccccaatccctgccactgggctctggacctcaggagggcaggctgaggtggggaaggagggacttggctgtccttccccttccccgtcccctgcagcctgggtctggatgggaggagagccactgggcccctgtcgtccccagtccccagccctgggcttggctcttggcttccagaaggcagcaaagaggggcgctgtcctgcgttcagcccctgatctctgacctctgctgagtgctgggcactgctccaagggacaggtgggcctggcggcctgtgggtttgggtgcctcctgcagtttgggagacatggaccagcatctggtcttgtttccaggagcatagaagccacatcgttgagacatcaggaaggtaaaaacccagcggcttagccaagccctaagcctgtccccagaccaaccctgggacctatacagaacagagggccagagctagggctgctgcttctgctccagcccctttgcctctgtcctcccatcccctcaacaccctgcttctcccggggacgcttttgagtgggccctgcccggggagctgcagagcagcagcacctttctctgagaagaggtccttggttgggtcaaggacagggctgagcgtggaagggggaggagtcaggggctctgtgttaggatgcggctttctctgcctctgggcagcctgctttggcctttccttgtatgtgggtgtttattacaagtggctttgtgtcagacacgctcggctccccacctggacacacactcaccagtggcctttcagtgtagcgggaggaagccggtgtccctggatgtgaagctcacactgatgggctggggcaggggcctgggccggcgagggggccggggggaggggacagagctgaggatttcctggagtgccctgcaggcacagaggaggtcagcaaaggtcttgaatagattttctctggaaataaagaatccttagatgcctaaaaattcccttcctgttccctcctggtcctggacacctcccaggggactgttccttatttctctctcctggtgtgggtaaagggacagttacaaaccaggtcaccatcctcagaggctgagccctgtacccaccccagcacagccacctccgccagaccccgtggctctgggagagccagctttgctattcccattgtgacagcgatggcaggcctgacccacggggcagttagagcagcctcgtggagctcgcccctcccctcagcctgcccacctctccctgcatcctgaggccagtggcccccgggcctgcacagatacctcatcatccacccgctgcccctccccgtccctgtcccccagcatcgggggcctgcaaatctagtgccgaatgactatgtccagattggtgacgatgggtgttgctgtttttcttgtcgtttgtgaacgctgtgatgctgtgtgcccaagtgggcagtcaccacccagcccttccttgggcgtctcccccagagtgctgtcgggaccacatctgtcctcaccctgtgggaccgcctggccctccctccctagcccttccagcctgggacacacacacacacacacacacacacacacacacacgcacgcacacgcacacatcttacctctcatgcgtgttttaccttttgatgttcagagtggctcactggctgggagtccttacctcggggagagggggaggttggttccttggggggccaaagaaggcagggaatgcctggagggtaactggggggccaccatgaccccttctctctccagaaacagctgcttctccccccatcccagggtcccacccccaacccccagaggtggcccttgtttacagtgaggactcggccactgtgtctctgtttcctgaaatataaactgtagcgaccccagactgtagagatttttatgtgtttggatacatctgctgtgtggaaaaaaaaaaaaactacaaaaaccctaattttgtacatactgtatttttactattgaactgtattctagtggctgttcatgctccaagactttagttaccgagacatgaatactatccatgtaataagcacttgcctggaataaaatataaaactgaaataaacctgcactgaaacctga

SEQ ID NO: 303135 - DNA, 4498 bp, Homo sapiens
aaatttgcaattttatattttgcaaatattttgagagacattgatttttctccccgtgctcccccgttcttccctgcggagtgcgctgcgccgcccagccctgtcgccccccggaggtgatccctccctcctgcctgcccgccagcctgacctgtgcccggctcgcgggccgcagcctcggccccggcgcgcccccggcagctctcggcgcgatgagcatagagacgctactggaggcggcccgcttcctggaatggcaagcgcagcaacaacagagagcacgtgaggagcaggagcggcttcgcttggagcaggagcgagagcaggaacagaagaaggccaatagcctggccaggctggcacatacccttcctgtggaggaaccccgcatggaggcgccacccctgcctctgtctccaccggctcccccgccggcacccccaccaccacttgccacccctgccccactgactgtcatccctatccctgtggtgaccaactcccctcagcctctacccccacccccacccttgcccgcggcagcccagcctctgcccctggcgcctcgtcagccggccctggttggcgcccccggactcagcattaaggagcctgcccccctgcccagcaggccgcaggtgcccacccctgctcccctactgccggactcgaaggccaccattccacccaatggcagccccaagcctttgcagcccctccccacgcctgtcctgaccatagcgccacaccctggagtccagcctcagctggccccccagcagccgcccccacccacgctggggaccctgaagttggcaccagctgaagaagtcaaatccagtgaacagaagaagaggcccggggggatcggaaccagagaagtccacaacaaattggagaagaacaggagggcccatctgaaagagtgctttgagaccctgaagcggaacatccccaacgtggatgacaagaagacgtccaatctgagcgtgctgcggacggcgctgcggtacatccagtccctgaagaggaaggagaaggaatatgagcatgaaatggagcggctggcacgtgagaagattgccacgcagcagcggctggcagagctcaagcacgagctgagccagtggatggacgtactggagattgaccgcgtgctgcggcagacgggccagcccgaggatgaccaggcctccacctccaccgcctctgagggtgaggacaacatagacgaggatatggaggaggaccgggcgggcctgggcccacctaagctgagccatcgtccccagccggagctgctgaagtccaccctgccaccccccagcaccacccctgcgcctctgcctccacacccacaccctcacccccactccgtggccctacctcctgcccacctccccgtgcagcagcagcagccacagcagaagacccctctgccagcccctcctcccccaccggctgcccctgcccagacactggtgccagctccagcccatctggtggcgacggctgggggtggctccacggtcatcgcccacacagctaccactcacgcttcagtcatccagactgtgaaccacgttctgcaggggccaggcggcaagcacatcgcccacatcgccccctcggcccccagccctgcggtgcaactggcgcctgccacaccccccattgggcacatcactgtgcaccctgccaccctcaaccatgtggcccacctgggctcccagctgcccttgtacccgcagcccgtggcagtgagccacatcgcccacaccctctcgcaccagcaagtcaacggcacggccggcctggggcccccggctactgtcatggcaaagccggccgtgggggctcaggtggtgcaccacccccagctggtgggccagaccgtgctcaaccctgtgaccatggtcaccatgccctccttcccagtcagcacactcaagctggcttgaggacgaggccactcagaggcccccagtggggacagggagggggacctgtcccccactctctcacccaccagctccacacattccagccaggcccaggccagcccccccacccacccccaggcctcctaggggaagggggtgcaaagactctgagccaagggagggaagggccaccctgctgcactaggacttggtaagatgactctgagaaaatgcgagactctgatggaatgtgccacctgtccggcccagtgccagctccagtgccgctcctgcttcccctccctaccctcggaaatcagtgcgatgtggacgtcacgctccctgacttcttcccccggccctgccccggccttcgtgtgctgctgctgctattgctgtctggtgaaggtggcccaggcccccggctttcctccggagcctcatgttctcttcccaggcctttggaggggaaatggggaaagcagaactgaagccacttggcccagaaagctgcggattggggtgataaggggccttgctctgagcacaggtgacagatcataggaagtggctggtctggagtcccacccggacaggtggggcctcagcctggggctctctgacccggttgcagtcactgtgattcgttaccgtagatactacttaaaatgattctctaccaacaataaaccaaacccagccactgccaagcttcctgtgccctcaccccaatccctgccactgggctctggacctcaggagggcaggctgaggtggggaaggagggacttggctgtccttccccttccccgtcccctgcagcctgggtctggatgggaggagagccactgggcccctgtcgtccccagtccccagccctgggcttggctcttggcttccagaaggcagcaaagaggggcgctgtcctgcgttcagcccctgatctctgacctctgctgagtgctgggcactgctccaagggacaggtgggcctggcggcctgtgggtttgggtgcctcctgcagtttgggagacatggaccagcatctggtcttgtttccaggagcatagaagccacatcgttgagacatcaggaaggtaaaaacccagcggcttagccaagccctaagcctgtccccagaccaaccctgggacctatacagaacagagggccagagctagggctgctgcttctgctccagcccctttgcctctgtcctcccatcccctcaacaccctgcttctcccggggacgcttttgagtgggccctgcccggggagctgcagagcagcagcacctttctctgagaagaggtccttggttgggtcaaggacagggctgagcgtggaagggggaggagtcaggggctctgtgttaggatgcggctttctctgcctctgggcagcctgctttggcctttccttgtatgtgggtgtttattacaagtggctttgtgtcagacacgctcggctccccacctggacacacactcaccagtggcctttcagtgtagcgggaggaagccggtgtccctggatgtgaagctcacactgatgggctggggcaggggcctgggccggcgagggggccggggggaggggacagagctgaggatttcctggagtgccctgcaggcacagaggaggtcagcaaaggtcttgaatagattttctctggaaataaagaatccttagatgcctaaaaattcccttcctgttccctcctggtcctggacacctcccaggggactgttccttatttctctctcctggtgtgggtaaagggacagttacaaaccaggtcaccatcctcagaggctgagccctgtacccaccccagcacagccacctccgccagaccccgtggctctgggagagccagctttgctattcccattgtgacagcgatggcaggcctgacccacggggcagttagagcagcctcgtggagctcgcccctcccctcagcctgcccacctctccctgcatcctgaggccagtggcccccgggcctgcacagatacctcatcatccacccgctgcccctccccgtccctgtcccccagcatcgggggcctgcaaatctagtgccgaatgactatgtccagattggtgacgatgggtgttgctgtttttcttgtcgtttgtgaacgctgtgatgctgtgtgcccaagtgggcagtcaccacccagcccttccttgggcgtctcccccagagtgctgtcgggaccacatctgtcctcaccctgtgggaccgcctggccctccctccctagcccttccagcctgggacacacacacacacacacacacacacacacacacacgcacgcacacgcacacatcttacctctcatgcgtgttttaccttttgatgttcagagtggctcactggctgggagtccttacctcggggagagggggaggctcctccttcctctcctctcctcctccttctctcatacccacccactctctatcacaccctccttatcttccttctatttcttctcccatctcatccttccttcattttacccacttccgcatctctt

SEQ ID NO: 303136 - DNA, 3283 bp, Homo sapiens
aaatttgcaattttatattttgcaaatattttgagagacattgatttttctccccgtgctcccccgttcttccctgcggagtgcgctgcgccgcccagccctgtcgccccccggaggtgatccctccctcctgcctgcccgccagcctgacctgtgcccggctcgcgggccgcagcctcggccccggcgcgcccccggcagctctcggcgcgatgagcatagagacgctactggaggcggcccgcttcctggaatggcaagcgcagcaacaacagagagcacgtgaggagcaggagcggcttcgcttggagcaggagcgagagcaggaacagaagaaggccaatagcctggccaggctggcacatacccttcctgtggaggaaccccgcatggaggcgccacccctgcctctgtctccaccggctcccccgccggcacccccaccaccacttgccacccctgccccactgactgtcatccctatccctgtggtgaccaactcccctcagcctctacccccacccccacccttgcccgcggcagcccagcctctgcccctggcgcctcgtcagccggccctggttggcgcccccggactcagcattaaggagcctgcccccctgcccagcaggccgcaggtgcccacccctgctcccctactgccggactcgaaggccaccattccacccaatggcagccccaagcctttgcagcccctccccacgcctgtcctgaccatagcgccacaccctggagtccagcctcagctggccccccagcagccgcccccacccacgctggggaccctgaagttggcaccagctgaagaagtcaaatccagtgaacagaagaagaggcccggggggatcggaaccagagaagtccacaacaaattggagaagaacaggagggcccatctgaaagagtgctttgagaccctgaagcggaacatccccaacgtggatgacaagaagacgtccaatctgagcgtgctgcggacggcgctgcggtacatccagtccctgaagaggaaggagaaggaatatgagcatgaaatggagcggctggcacgtgagaagattgccacgcagcagcggctggcagagctcaagcacgagctgagccagtggatggacgtactggagattgaccgcgtgctgcggcagacgggccagcccgaggatgaccaggcctccacctccaccgcctctgagggtgaggacaacatagacgaggatatggaggaggaccgggcgggcctgggcccacctaagctgagccatcgtccccagccggagctgctgaagtccaccctgccaccccccagcaccacccctgcgcctctgcctccacacccacaccctcacccccactccgtggccctacctcctgcccacctccccgtgcagcagcagcagccacagcagaagacccctctgccagcccctcctcccccaccggctgcccctgcccagacactggtgccagctccagcccatctggtggcgacggctgggggtggctccacggtcatcgcccacacagctaccactcacgcttcagtcatccagactgtgaaccacgttctgcaggggccaggcggcaagcacatcgcccacatcgccccctcggcccccagccctgcggtgcaactggcgcctgccacaccccccattgggcacatcactgtgcaccctgccaccctcaaccatgtggcccacctgggctcccagctgcccttgtacccgcagcccgtggcagtgagccacatcgcccacaccctctcgcaccagcaagtcaacggcacggccggcctggggcccccggctactgtcatggcaaagccggccgtgggggctcaggtggtgcaccacccccagctggtgggccagaccgtgctcaaccctgtgaccatggtcaccatgccctccttcccagtcagcacactcaagctggcttgaggacgaggccactcagaggcccccagtggggacagggagggggacctgtcccccactctctcacccaccagctccacacattccagccaggcccaggccagcccccccacccacccccaggcctcctaggggaagggggtgcaaagactctgagccaagggagggaagggccaccctgctgcactaggacttggtaagatgactctgagaaaatgcgagactctgatggaatgtgccacctgtccggcccagtgccagctccagtgccgctcctgcttcccctccctaccctcggaaatcagtgcgatgtggacgtcacgctccctgacttcttcccccggccctgccccggccttcgtgtgctgctgctgctattgctgtctggtgaaggtggcccaggcccccggctttcctccggagcctcatgttctcttcccaggcctttggaggggaaatggggaaagcagaactgaagccacttggcccagaaagctgcggattggggtgataaggggccttgctctgagcacaggtgacagatcataggaagtggctggtctggagtcccacccggacaggtggggcctcagcctggggctctctgacccggttgcagtcactgtgattcgttaccgtagatactacttaaaatgattctctaccaacaataaaccaaacccagccactgccaagcttcctgtgccctcaccccaatccctgccactgggctctggacctcaggagggcaggctgaggtggggaaggagggacttggctgtccttccccttccccgtcccctgcagcctgggtctggatgggagggggacctgtcccccactctctcacccaccagctccacacattccatgccagtgcccaggccatgcccccccccaaaccagcacgccaaggtcctcacataggggaaatatggtggtgcataagaagacatgagacaatggaaaggtacatgcaaaaatcttaagtagcacgagatgatgctaccttttcgcgagacactttgggtagatcagaaaatcgcgctgtaggcctgggataagaaccgatggttacggtgaccggagacccagcgatagataaattagccatggttgtaggcccagagacggattggagacagatcacctcaagacacaagaagtcagaacccctctaggtggagtgacatacccgccaaacaagtcggattggatgaaggatcgaaaaatcacgaggtcgcacaggagttgtttagagagcaccgtacagaagaccatgaaggctaacagaaagactccattaacaacaacttgtgcaagac

SEQ ID NO: 303137 - DNA, 841 bp, Homo sapiens
gcggccgccgcccgcctgcgctcatagactcacgcagccccagtcccgccagtccgccaacacagtagtgccggcccccctctttccctggccctgccccccctccccgcctttggctcgctccgcctttctgccccccacccccacctcacgggtacgggccattcccggccaggaaacgccgtggcgccgcgttgggcctaactcgagtcctgccgcctcccgggagtgccgtgcgccgcagcccgggcccaggccccggcagcgcctgggacaaggtcttcagaactactagcagataatttggggggacttcatattcagaagtctatataaaggattcctcatgtccataacatgttggatgaggctctgcagctcacccccactctcagagtggtcagtctccattaattggaccccgtgatttccaatctctgctgtgttggacgtcatgagcattgcaatccctctgggagtcaccacatcagatacatcctactcagatatggctgctggatcagagtaagtgctactttctaggtagtaggtacattatcagtctgtgtggagacagccttcttatggatagctaataggataatatgtagtattttcttaaccagatcctattccactgtaattaacattagacctttccctttacccccattgaaggtggtggaaaaaaggaattagaaggggaaggaagagttttcagaggggtatttctgggcaaataattaatagaaccaaagttgcaaagtaggaattcattttcatttgttttaatgggtggagaaaattggaataaagtaggtgttactacctgcttctgtag

SEQ ID NO: 303138 - DNA, 537 bp, Homo sapiens
gcggccgccgcccgcctgcgctcatagactcacgcagccccagtcccgccagtccgccaacacagtagtgccggcccccctctttccctggccctgccccccctccccgcctttggctcgctccgcctttctgccccccacccccacctcacgggtacgggccattcccggccaggaaacgccgtggcgccgcgttgggcctaactcgagtcctgccgcctcccgggagtgccgtgcgccgcagcccgggcccaggccccggcagcgcctgggacaagacactgaaattgaggaagagagattttggcgttctgttggtttatggagagagttgatcagagattgctccttggctgagttgctgtctgcataggctgttaacaattgtttctctggcagcagatcttgttcatcaggattgcatcatttctgggagaatggccaaggtccacagcctcaatacaaagactgtctgaagcatatgaggcctgttctctttctgaagcggcactcctcttcctgccagtcctcttcaca

SEQ ID NO: 303139 - DNA, 6843 bp, Homo sapiens
gcggccgccgcccgcctgcgctcatagactcacgcagccccagtcccgccagtccgccaacacagtagtgccggcccccctctttccctggccctgccccccctccccgcctttggctcgctccgcctttctgccccccacccccacctcacgggtacgggccattcccggccaggaaacgccgtggcgccgcgttgggcctaactcgagtcctgccgcctcccgggagtgccgtgcgccgcagcccgggcccaggccccggcagcgcctgggacaaggtcttcagaactactagcagataatttggggggacttcatattcagaagtctatataaaggattcctcatgtccataacatgttggatgaggctctgcagctcacccccactctcagagtggtcagtctccattaattggaccccgtgatttccaatctctgctgtgttggacgtcatgagcattgcaatccctctgggagtcaccacatcagatacatcctactcagatatggctgctggatcagaccctgaatctgtggaggctagtccagcagttaatgagaagagcgtgtattccactcataattatgggaccactcagaggcatgggtgtcgaggactgccttatgctacgatcatccctcgttctgacctgaatggcctgccgtcgcctgtagaggaacgctgtggagacagcccgaactctgaaggagaaactgtacctacctggtgtccttgtggtctttctcaggatggcttccttctcaactgtgacaagtgcaggggaatgagcagggggaaggttattagacttcatcggcggaagcaggacaacatatcaggtggggatagcagtgcaacagaaagctgggatgaggagctttctccttccactgtgttgtatacagcaacacagcacacacctacaagcatcaccttaactgttagaagaaccaaacccaagaagcggaaaaagagtccagaaaagggtcgtgcagcaccaaagacgaagaaaatcaagaattctccctctgaagcacagaatttagatgagaatacaactgagggctgggaaaatcggataagactatggactgaccagtatgaagaagctttcactaatcagtacagtgcagatgtacagaacgcgcttgaacaacacctacattctagcaaggaatttgtgggcaaacctactattttagacactattaataagactgaattggcctgtaataacacagttattggttcccaaatgcagttacagctgggaagagtcactcgtgttcaaaagcaccggaagatcctgagggctgcaagagatttggctttggacactcttataatagagtatcgtgggaaagtcatgttacgacagcaatttgaggtcaatgggcatttcttcaaaaaaccatacccctttgtgctcttctactcaaaattcaatggtgtagagatgtgtgtggatgcccgtactttcggtaatgatgctcggttcatcagaagatcatgtacaccaaatgcagaggtgcgacacatgattgcagatgggatgattcacctgtgcatctatgctgtgtctgccatcaccaaggatgctgaggtcaccatagcatttgattatgagtatagtaactgtaattataaagtggactgtgcctgtcacaagggaaaccggaattgtcctatacaaaaaaggaatcctaatgctacagaactgccactcctaccacctcctccaagcctacccaccattggagcagagactagacgtagaaaagcacgacggaaagagctagagatggagcagcagaatgaggcttcagaggagaataatgaccagcaatcacaagaagttccagaaaaagtaactgtatccagtgatcatgaggaagtagacaatccagaagaaaaaccagaagaagagaaagaagaggttatagatgaccaggagaacctagctcatagcaggaggaccagggaagatagaaaggtagaagccatcatgcatgcttttgaaaacttagagaaaagaaagaagcggcgggatcagcccttggaacagagcaactctgatgtagagattactacaaccacctcagagactcctgttggtgaagagacaaaaactgaagcccctgaatctgaagttagcaactctgtttcaaatgttaccatcccaagcaccccacagagtgttggtgtgaatacccggaggtcttcccaagcaggggatattgctgcagaaaaactagtccccaagccacctccagcaaagccttctaggccccggccgaagagtcgaatttctcggtacaggaccagttcagcccaaagactaaagcgtcagaagcaggccaatgcacagcaggcagaattgtcacaagctgccttggaagagggaggaagtaacagtttagtaactcctactgaagctggaagtctagacagttcaggagaaaacaggccattaacagggtctgacccaactgtggtgtcaattactggatcccatgtcaaccgtgctgcatctaaataccccaaaaccaaaaagtatctagttacagaatggttgaatgacaaagcagagaagcaagagtgccctgttgagtgccctttacgtatcacaacggatccaactgtactggcaacgaccctaaacatgttaccaggtcttatccattccccgttaatttgcaccacccccaaacactacattcgctttggctcaccctttatccctgagagacgtcgaaggccccttctgcctgatggcacattcagctcctgtaagaagcgctggataaaacaagccttagaagaagggatgactcaaacatcatctgtaccccaagagactagaactcagcacctataccaaagcaatgagaatagtagctcttctagtatctgcaaagacaatgcagacttgttgagcccattaaagaaatggaagtctcgctatctgatggagcagaatgtcaccaagttacttcggcctctgtctccagtcacaccaccccctcccaattcaggctcaaagagtccccagctggccacacctggctcatctcacccaggagaagaggagtgtcgaaatggatacagcctcatgttttcaccagtcacatctcttactactgctagtcgctgcaacactcctctacagtttgagctttgtcaccgaaaagacctggatttggcaaaagtaggataccttgactccaacactaacagctgtgctgatagaccttccctactcaactcaggtcattctgacctggctcctcatccctccctcggacccacttctgagactggtttcccaagcagaagtggagatggacatcagaccctcgtgagaaactcagaccaggcatttcggacagagttcaacttgatgtatgcctactcccctttgaatgctatgcctcgagcagatggactgtatcgaggatctcctctagtgggggataggaagcctttacatttggatgggggatattgttcccctgcagaaggattttccagcagatatgaacatggcttaatgaaagacctctctcgtggatccttgtcacctggtggtgaaagggcctgtgaaggagtcccatctgccccccagaacccaccacagaggaaaaaagtatccctgctggagtaccgaaaacggaaacaagaagctaaggaaaattctgctggtgggggaggtgactctgcacagagcaaaagcaagtctgcaggagctgggcaaggcagcagtaactccgtttccgacactggtgcccatggtgtgcagggatcctcagcccgaactccatcttcccctcacaaaaaattctccccatctcattcctctatgtcccatttggaggcggtaagcccatcagattccagaggcacttcttcatctcactgcagacctcaagagaatatcagcagtaggtggatggttcccacatcagtagaacgactccgagaaggagggagcatccccaaggtcctccgaagcagcgtgagggtggcccaaaagggagagccctctcccacatgggagagtaacatcacagagaaagactcagaccctgcagatggagaaggcccagagacattaagctcagcactctctaaaggagcaacagtttacagcccttccagatacagctaccagctcctgcagtgtgatagtcctcggacagaatcacaaagcctccttcagcagagttcctcccccttcagaggacatcctacacagtctccaggatacagttatcgaactactgcactgagacctggaaaccccccctctcacggttcttcagaatcatccctctcttccacgtcctattccagccccgcccaccctgtgtccacagactcgttggccccatttacggggacaccagggtattttagcagccagccacattctggaaacagcactggcagcaatcttccaaggaggagctgcccttctagtgctgctagccctaccctgcagggaccctcagactcgccaacctcagattcagtttctcagtccagcacaggaactctgagttccacctcctttcctcagaactctaggtcgtcattgccatcagacttacggactatcagtctgcccagtgctgggcagtcagctgtctaccaggcctccagggtatctgcggtttccaattcacagcactacccacaccgtgggagtgggggtgtgcaccagtaccgactccagccactgcaagggtcaggagtcaagactcagacgggactttcctagggcttctggatttgggcaaacagaactgaatgagcccatagctgcttccttccagctgcctctggaacctaggccgagcatattgctgaggaacggggggtacaaggtgccagaggattgggtctggtggacaagaaacaagacttgtggtcacaattggcctctggccttggagaaagctgtaaatcttgtctgaagcagagactataaagaagtttctccctgctgtcaagggtacattgttgacaagcaaatggtgtttcggttagtaacggttctaagtgcaatgagttgtgttgaagcctccgtctcccatccttgcctgtagcccgtagtcacttgtgcagtgaggacatctttttaaatttaaaaaaaaaaaaaaaaaagttttcaaaggaaaaaaagttaaaagagccaatctcaaagccccaagccatctgagtactgttagggttttatgcacttaagaaaaaaggtaggtatgtaaatgttcatcctaagacaaccattccaaaagcaggtatctggccaatgtgtgtccaccaagaatactgtttatctttgtcttaagatcaccaagaaataggcaaggatagtaaagcttggaacctgcaccaactggagggtgcctggctctttgaagaaaagctcatggtcagctcttgattattcgggagcagattatttgagtagattgtctgagcctccaactgttaccatcctactcccccttcccaagctatttcacagctcagtaacccatgaagtaagtagacaagaaaaggaggaatgagacatgatataggccaattgcattgctacttaccagcttttggcaataaatttcattaggaaggataccgagtggtttgggaatgcttcgaattttattttttctactcccaattaatcaggagttgatgatcccatgagcaggaccgcctccatgattggggagcatgcacttgtgactgcagggtaagagtgggaagataggtttgtggagtggcaccgacaggactgtgattgtgtgtgggcctgccccacatttctctgggggatgcttatgtgagagtgggcccagtgaaagagttaccaagccacccacacccctaacactgttctggatgagagatgagagcagaccggcttctccccatcagtgcattgtgcctgttgtacacccctggaggagccctggagccagcccaggtggggtacacaatctttttaaattccatatggttgccagcttatttctttcacttgtttactgtaatatctggcgtgtttttatttatctaattttgtattcagttataaccatggtaggggtagtgaatatatgacaggtgtaatccctggtgctgcagtggaccttcttttcttttggacaagataatactgtgagtttccctccttccttccctctaatttgttttccttttttccccagcctcttgcatccccttcttttctaccctgtcctacaactatcatatgcacagtcttctctctttgtgtgtgactgttacaaaatttcacttttcaaaatcgaaatcaggtgtttgctcaaatgaggggagatttttttttttttttttttttaaatgctgagacctcagcagagtacttttctttttgttgtttcccccacaaacccatcagtctgggagagcattgggagtggaaatcatgttgcctgggatgctggtttctttgtatattatataaaacgtatgtaaatgtctctccatttgggctggggtttgcattctccccttggctatttaaccaaggggagaggccagcgggcaggcggccctcaccctgcctggcacgtgcagagaccccagccactctgtgtgggcagggtgctgtcaagaccagacctcttgggggggtaggggcgggggggtggggggaactcttggaagggaagaagtatcacttctttctcaagtggagtgtttacaccttgctgtaacatttgaactttcacaagagatgtaataattttgataataaaattcttaaccataataatcataaagttgaga

SEQ ID NO: 303140 - DNA, 6882 bp, Homo sapiens
gcggccgccgcccgcctgcgctcatagactcacgcagccccagtcccgccagtccgccaacacagtagtgccggcccccctctttccctggccctgccccccctccccgcctttggctcgctccgcctttctgccccccacccccacctcacgggtacgggccattcccggccaggaaacgccgtggcgccgcgttgggcctaactcgagtcctgccgcctcccgggagtgccgtgcgccgcagcccgggcccaggccccggcagcgcctgggacaaggtcttcagaactactagcagataatttggggggacttcatattcagaagtctatataaaggattcctcatgtccataacatgttggatgaggctctgcagctcacccccactctcagagtggtcagtctccattaattggaccccgtgatttccaatctctgctgtgttggacgtcatgagcattgcaatccctctgggagtcaccacatcagatacatcctactcagatatggctgctggatcagaccctgaatctgtggaggctagtccagcagttaatgagaagagcgtgtattccactcataattatgggaccactcagaggcatgggtgtcgaggactgccttatgctacgatcatccctcgttctgacctgaatggcctgccgtcgcctgtagaggaacgctgtggagacagcccgaactctgaaggagaaactgtacctacctggtgtccttgtggtctttctcaggatggcttccttctcaactgtgacaagtgcaggggaatgagcagggggaaggttattagacttcatcggcggaagcaggacaacatatcaggtggggatagcagtgcaacagaaagctgggatgaggagctttctccttccactgtgttgtatacagcaacacagcacacacctacaagcatcaccttaactgttagaagaaccaaacccaagaagcggaaaaagagtccagaaaagggtcgtgcagcaccaaagacgaagaaaatcaaggcatttcgagagggatcccggaagtccttgcggatgaagaattctccctctgaagcacagaatttagatgagaatacaactgagggctgggaaaatcggataagactatggactgaccagtatgaagaagctttcactaatcagtacagtgcagatgtacagaacgcgcttgaacaacacctacattctagcaaggaatttgtgggcaaacctactattttagacactattaataagactgaattggcctgtaataacacagttattggttcccaaatgcagttacagctgggaagagtcactcgtgttcaaaagcaccggaagatcctgagggctgcaagagatttggctttggacactcttataatagagtatcgtgggaaagtcatgttacgacagcaatttgaggtcaatgggcatttcttcaaaaaaccatacccctttgtgctcttctactcaaaattcaatggtgtagagatgtgtgtggatgcccgtactttcggtaatgatgctcggttcatcagaagatcatgtacaccaaatgcagaggtgcgacacatgattgcagatgggatgattcacctgtgcatctatgctgtgtctgccatcaccaaggatgctgaggtcaccatagcatttgattatgagtatagtaactgtaattataaagtggactgtgcctgtcacaagggaaaccggaattgtcctatacaaaaaaggaatcctaatgctacagaactgccactcctaccacctcctccaagcctacccaccattggagcagagactagacgtagaaaagcacgacggaaagagctagagatggagcagcagaatgaggcttcagaggagaataatgaccagcaatcacaagaagttccagaaaaagtaactgtatccagtgatcatgaggaagtagacaatccagaagaaaaaccagaagaagagaaagaagaggttatagatgaccaggagaacctagctcatagcaggaggaccagggaagatagaaaggtagaagccatcatgcatgcttttgaaaacttagagaaaagaaagaagcggcgggatcagcccttggaacagagcaactctgatgtagagattactacaaccacctcagagactcctgttggtgaagagacaaaaactgaagcccctgaatctgaagttagcaactctgtttcaaatgttaccatcccaagcaccccacagagtgttggtgtgaatacccggaggtcttcccaagcaggggatattgctgcagaaaaactagtccccaagccacctccagcaaagccttctaggccccggccgaagagtcgaatttctcggtacaggaccagttcagcccaaagactaaagcgtcagaagcaggccaatgcacagcaggcagaattgtcacaagctgccttggaagagggaggaagtaacagtttagtaactcctactgaagctggaagtctagacagttcaggagaaaacaggccattaacagggtctgacccaactgtggtgtcaattactggatcccatgtcaaccgtgctgcatctaaataccccaaaaccaaaaagtatctagttacagaatggttgaatgacaaagcagagaagcaagagtgccctgttgagtgccctttacgtatcacaacggatccaactgtactggcaacgaccctaaacatgttaccaggtcttatccattccccgttaatttgcaccacccccaaacactacattcgctttggctcaccctttatccctgagagacgtcgaaggccccttctgcctgatggcacattcagctcctgtaagaagcgctggataaaacaagccttagaagaagggatgactcaaacatcatctgtaccccaagagactagaactcagcacctataccaaagcaatgagaatagtagctcttctagtatctgcaaagacaatgcagacttgttgagcccattaaagaaatggaagtctcgctatctgatggagcagaatgtcaccaagttacttcggcctctgtctccagtcacaccaccccctcccaattcaggctcaaagagtccccagctggccacacctggctcatctcacccaggagaagaggagtgtcgaaatggatacagcctcatgttttcaccagtcacatctcttactactgctagtcgctgcaacactcctctacagtttgagctttgtcaccgaaaagacctggatttggcaaaagtaggataccttgactccaacactaacagctgtgctgatagaccttccctactcaactcaggtcattctgacctggctcctcatccctccctcggacccacttctgagactggtttcccaagcagaagtggagatggacatcagaccctcgtgagaaactcagaccaggcatttcggacagagttcaacttgatgtatgcctactcccctttgaatgctatgcctcgagcagatggactgtatcgaggatctcctctagtgggggataggaagcctttacatttggatgggggatattgttcccctgcagaaggattttccagcagatatgaacatggcttaatgaaagacctctctcgtggatccttgtcacctggtggtgaaagggcctgtgaaggagtcccatctgccccccagaacccaccacagaggaaaaaagtatccctgctggagtaccgaaaacggaaacaagaagctaaggaaaattctgctggtgggggaggtgactctgcacagagcaaaagcaagtctgcaggagctgggcaaggcagcagtaactccgtttccgacactggtgcccatggtgtgcagggatcctcagcccgaactccatcttcccctcacaaaaaattctccccatctcattcctctatgtcccatttggaggcggtaagcccatcagattccagaggcacttcttcatctcactgcagacctcaagagaatatcagcagtaggtggatggttcccacatcagtagaacgactccgagaaggagggagcatccccaaggtcctccgaagcagcgtgagggtggcccaaaagggagagccctctcccacatgggagagtaacatcacagagaaagactcagaccctgcagatggagaaggcccagagacattaagctcagcactctctaaaggagcaacagtttacagcccttccagatacagctaccagctcctgcagtgtgatagtcctcggacagaatcacaaagcctccttcagcagagttcctcccccttcagaggacatcctacacagtctccaggatacagttatcgaactactgcactgagacctggaaaccccccctctcacggttcttcagaatcatccctctcttccacgtcctattccagccccgcccaccctgtgtccacagactcgttggccccatttacggggacaccagggtattttagcagccagccacattctggaaacagcactggcagcaatcttccaaggaggagctgcccttctagtgctgctagccctaccctgcagggaccctcagactcgccaacctcagattcagtttctcagtccagcacaggaactctgagttccacctcctttcctcagaactctaggtcgtcattgccatcagacttacggactatcagtctgcccagtgctgggcagtcagctgtctaccaggcctccagggtatctgcggtttccaattcacagcactacccacaccgtgggagtgggggtgtgcaccagtaccgactccagccactgcaagggtcaggagtcaagactcagacgggactttcctagggcttctggatttgggcaaacagaactgaatgagcccatagctgcttccttccagctgcctctggaacctaggccgagcatattgctgaggaacggggggtacaaggtgccagaggattgggtctggtggacaagaaacaagacttgtggtcacaattggcctctggccttggagaaagctgtaaatcttgtctgaagcagagactataaagaagtttctccctgctgtcaagggtacattgttgacaagcaaatggtgtttcggttagtaacggttctaagtgcaatgagttgtgttgaagcctccgtctcccatccttgcctgtagcccgtagtcacttgtgcagtgaggacatctttttaaatttaaaaaaaaaaaaaaaaaagttttcaaaggaaaaaaagttaaaagagccaatctcaaagccccaagccatctgagtactgttagggttttatgcacttaagaaaaaaggtaggtatgtaaatgttcatcctaagacaaccattccaaaagcaggtatctggccaatgtgtgtccaccaagaatactgtttatctttgtcttaagatcaccaagaaataggcaaggatagtaaagcttggaacctgcaccaactggagggtgcctggctctttgaagaaaagctcatggtcagctcttgattattcgggagcagattatttgagtagattgtctgagcctccaactgttaccatcctactcccccttcccaagctatttcacagctcagtaacccatgaagtaagtagacaagaaaaggaggaatgagacatgatataggccaattgcattgctacttaccagcttttggcaataaatttcattaggaaggataccgagtggtttgggaatgcttcgaattttattttttctactcccaattaatcaggagttgatgatcccatgagcaggaccgcctccatgattggggagcatgcacttgtgactgcagggtaagagtgggaagataggtttgtggagtggcaccgacaggactgtgattgtgtgtgggcctgccccacatttctctgggggatgcttatgtgagagtgggcccagtgaaagagttaccaagccacccacacccctaacactgttctggatgagagatgagagcagaccggcttctccccatcagtgcattgtgcctgttgtacacccctggaggagccctggagccagcccaggtggggtacacaatctttttaaattccatatggttgccagcttatttctttcacttgtttactgtaatatctggcgtgtttttatttatctaattttgtattcagttataaccatggtaggggtagtgaatatatgacaggtgtaatccctggtgctgcagtggaccttcttttcttttggacaagataatactgtgagtttccctccttccttccctctaatttgttttccttttttccccagcctcttgcatccccttcttttctaccctgtcctacaactatcatatgcacagtcttctctctttgtgtgtgactgttacaaaatttcacttttcaaaatcgaaatcaggtgtttgctcaaatgaggggagatttttttttttttttttttttaaatgctgagacctcagcagagtacttttctttttgttgtttcccccacaaacccatcagtctgggagagcattgggagtggaaatcatgttgcctgggatgctggtttctttgtatattatataaaacgtatgtaaatgtctctccatttgggctggggtttgcattctccccttggctatttaaccaaggggagaggccagcgggcaggcggccctcaccctgcctggcacgtgcagagaccccagccactctgtgtgggcagggtgctgtcaagaccagacctcttgggggggtaggggcgggggggtggggggaactcttggaagggaagaagtatcacttctttctcaagtggagtgtttacaccttgctgtaacatttgaactttcacaagagatgtaataattttgataataaaattcttaaccataataatcataaagttgaga

SEQ ID NO: 303141 - DNA, 6900 bp, Homo sapiens
gcggccgccgcccgcctgcgctcatagactcacgcagccccagtcccgccagtccgccaacacagtagtgccggcccccctctttccctggccctgccccccctccccgcctttggctcgctccgcctttctgccccccacccccacctcacgggtacgggccattcccggccaggaaacgccgtggcgccgcgttgggcctaactcgagtcctgccgcctcccgggagtgccgtgcgccgcagcccgggcccaggccccggcagcgcctgggacaaggtcttcagaactactagcagataatttggggggacttcatattcagaagtctatataaaggattcctcatgtccataacatgttggatgaggctctgcagctcacccccactctcagagtggtcagtctccattaattggaccccgtgatttccaatctctgctgtgttggacgtcatgagcattgcaatccctctgggagtcaccacatcagatacatcctactcagatatggctgctggatcagaccctgaatctgtggaggctagtccagcagttaatgagaagagcgtgtattccactcataattatgggaccactcagaggcatgggtgtcgaggactgccttatgctgatcataattacggagcccctcctcctccgacacctcctgcttctccccctgtccagacgatcatccctcgttctgacctgaatggcctgccgtcgcctgtagaggaacgctgtggagacagcccgaactctgaaggagaaactgtacctacctggtgtccttgtggtctttctcaggatggcttccttctcaactgtgacaagtgcaggggaatgagcagggggaaggttattagacttcatcggcggaagcaggacaacatatcaggtggggatagcagtgcaacagaaagctgggatgaggagctttctccttccactgtgttgtatacagcaacacagcacacacctacaagcatcaccttaactgttagaagaaccaaacccaagaagcggaaaaagagtccagaaaagggtcgtgcagcaccaaagacgaagaaaatcaagaattctccctctgaagcacagaatttagatgagaatacaactgagggctgggaaaatcggataagactatggactgaccagtatgaagaagctttcactaatcagtacagtgcagatgtacagaacgcgcttgaacaacacctacattctagcaaggaatttgtgggcaaacctactattttagacactattaataagactgaattggcctgtaataacacagttattggttcccaaatgcagttacagctgggaagagtcactcgtgttcaaaagcaccggaagatcctgagggctgcaagagatttggctttggacactcttataatagagtatcgtgggaaagtcatgttacgacagcaatttgaggtcaatgggcatttcttcaaaaaaccatacccctttgtgctcttctactcaaaattcaatggtgtagagatgtgtgtggatgcccgtactttcggtaatgatgctcggttcatcagaagatcatgtacaccaaatgcagaggtgcgacacatgattgcagatgggatgattcacctgtgcatctatgctgtgtctgccatcaccaaggatgctgaggtcaccatagcatttgattatgagtatagtaactgtaattataaagtggactgtgcctgtcacaagggaaaccggaattgtcctatacaaaaaaggaatcctaatgctacagaactgccactcctaccacctcctccaagcctacccaccattggagcagagactagacgtagaaaagcacgacggaaagagctagagatggagcagcagaatgaggcttcagaggagaataatgaccagcaatcacaagaagttccagaaaaagtaactgtatccagtgatcatgaggaagtagacaatccagaagaaaaaccagaagaagagaaagaagaggttatagatgaccaggagaacctagctcatagcaggaggaccagggaagatagaaaggtagaagccatcatgcatgcttttgaaaacttagagaaaagaaagaagcggcgggatcagcccttggaacagagcaactctgatgtagagattactacaaccacctcagagactcctgttggtgaagagacaaaaactgaagcccctgaatctgaagttagcaactctgtttcaaatgttaccatcccaagcaccccacagagtgttggtgtgaatacccggaggtcttcccaagcaggggatattgctgcagaaaaactagtccccaagccacctccagcaaagccttctaggccccggccgaagagtcgaatttctcggtacaggaccagttcagcccaaagactaaagcgtcagaagcaggccaatgcacagcaggcagaattgtcacaagctgccttggaagagggaggaagtaacagtttagtaactcctactgaagctggaagtctagacagttcaggagaaaacaggccattaacagggtctgacccaactgtggtgtcaattactggatcccatgtcaaccgtgctgcatctaaataccccaaaaccaaaaagtatctagttacagaatggttgaatgacaaagcagagaagcaagagtgccctgttgagtgccctttacgtatcacaacggatccaactgtactggcaacgaccctaaacatgttaccaggtcttatccattccccgttaatttgcaccacccccaaacactacattcgctttggctcaccctttatccctgagagacgtcgaaggccccttctgcctgatggcacattcagctcctgtaagaagcgctggataaaacaagccttagaagaagggatgactcaaacatcatctgtaccccaagagactagaactcagcacctataccaaagcaatgagaatagtagctcttctagtatctgcaaagacaatgcagacttgttgagcccattaaagaaatggaagtctcgctatctgatggagcagaatgtcaccaagttacttcggcctctgtctccagtcacaccaccccctcccaattcaggctcaaagagtccccagctggccacacctggctcatctcacccaggagaagaggagtgtcgaaatggatacagcctcatgttttcaccagtcacatctcttactactgctagtcgctgcaacactcctctacagtttgagctttgtcaccgaaaagacctggatttggcaaaagtaggataccttgactccaacactaacagctgtgctgatagaccttccctactcaactcaggtcattctgacctggctcctcatccctccctcggacccacttctgagactggtttcccaagcagaagtggagatggacatcagaccctcgtgagaaactcagaccaggcatttcggacagagttcaacttgatgtatgcctactcccctttgaatgctatgcctcgagcagatggactgtatcgaggatctcctctagtgggggataggaagcctttacatttggatgggggatattgttcccctgcagaaggattttccagcagatatgaacatggcttaatgaaagacctctctcgtggatccttgtcacctggtggtgaaagggcctgtgaaggagtcccatctgccccccagaacccaccacagaggaaaaaagtatccctgctggagtaccgaaaacggaaacaagaagctaaggaaaattctgctggtgggggaggtgactctgcacagagcaaaagcaagtctgcaggagctgggcaaggcagcagtaactccgtttccgacactggtgcccatggtgtgcagggatcctcagcccgaactccatcttcccctcacaaaaaattctccccatctcattcctctatgtcccatttggaggcggtaagcccatcagattccagaggcacttcttcatctcactgcagacctcaagagaatatcagcagtaggtggatggttcccacatcagtagaacgactccgagaaggagggagcatccccaaggtcctccgaagcagcgtgagggtggcccaaaagggagagccctctcccacatgggagagtaacatcacagagaaagactcagaccctgcagatggagaaggcccagagacattaagctcagcactctctaaaggagcaacagtttacagcccttccagatacagctaccagctcctgcagtgtgatagtcctcggacagaatcacaaagcctccttcagcagagttcctcccccttcagaggacatcctacacagtctccaggatacagttatcgaactactgcactgagacctggaaaccccccctctcacggttcttcagaatcatccctctcttccacgtcctattccagccccgcccaccctgtgtccacagactcgttggccccatttacggggacaccagggtattttagcagccagccacattctggaaacagcactggcagcaatcttccaaggaggagctgcccttctagtgctgctagccctaccctgcagggaccctcagactcgccaacctcagattcagtttctcagtccagcacaggaactctgagttccacctcctttcctcagaactctaggtcgtcattgccatcagacttacggactatcagtctgcccagtgctgggcagtcagctgtctaccaggcctccagggtatctgcggtttccaattcacagcactacccacaccgtgggagtgggggtgtgcaccagtaccgactccagccactgcaagggtcaggagtcaagactcagacgggactttcctagggcttctggatttgggcaaacagaactgaatgagcccatagctgcttccttccagctgcctctggaacctaggccgagcatattgctgaggaacggggggtacaaggtgccagaggattgggtctggtggacaagaaacaagacttgtggtcacaattggcctctggccttggagaaagctgtaaatcttgtctgaagcagagactataaagaagtttctccctgctgtcaagggtacattgttgacaagcaaatggtgtttcggttagtaacggttctaagtgcaatgagttgtgttgaagcctccgtctcccatccttgcctgtagcccgtagtcacttgtgcagtgaggacatctttttaaatttaaaaaaaaaaaaaaaaaagttttcaaaggaaaaaaagttaaaagagccaatctcaaagccccaagccatctgagtactgttagggttttatgcacttaagaaaaaaggtaggtatgtaaatgttcatcctaagacaaccattccaaaagcaggtatctggccaatgtgtgtccaccaagaatactgtttatctttgtcttaagatcaccaagaaataggcaaggatagtaaagcttggaacctgcaccaactggagggtgcctggctctttgaagaaaagctcatggtcagctcttgattattcgggagcagattatttgagtagattgtctgagcctccaactgttaccatcctactcccccttcccaagctatttcacagctcagtaacccatgaagtaagtagacaagaaaaggaggaatgagacatgatataggccaattgcattgctacttaccagcttttggcaataaatttcattaggaaggataccgagtggtttgggaatgcttcgaattttattttttctactcccaattaatcaggagttgatgatcccatgagcaggaccgcctccatgattggggagcatgcacttgtgactgcagggtaagagtgggaagataggtttgtggagtggcaccgacaggactgtgattgtgtgtgggcctgccccacatttctctgggggatgcttatgtgagagtgggcccagtgaaagagttaccaagccacccacacccctaacactgttctggatgagagatgagagcagaccggcttctccccatcagtgcattgtgcctgttgtacacccctggaggagccctggagccagcccaggtggggtacacaatctttttaaattccatatggttgccagcttatttctttcacttgtttactgtaatatctggcgtgtttttatttatctaattttgtattcagttataaccatggtaggggtagtgaatatatgacaggtgtaatccctggtgctgcagtggaccttcttttcttttggacaagataatactgtgagtttccctccttccttccctctaatttgttttccttttttccccagcctcttgcatccccttcttttctaccctgtcctacaactatcatatgcacagtcttctctctttgtgtgtgactgttacaaaatttcacttttcaaaatcgaaatcaggtgtttgctcaaatgaggggagatttttttttttttttttttttaaatgctgagacctcagcagagtacttttctttttgttgtttcccccacaaacccatcagtctgggagagcattgggagtggaaatcatgttgcctgggatgctggtttctttgtatattatataaaacgtatgtaaatgtctctccatttgggctggggtttgcattctccccttggctatttaaccaaggggagaggccagcgggcaggcggccctcaccctgcctggcacgtgcagagaccccagccactctgtgtgggcagggtgctgtcaagaccagacctcttgggggggtaggggcgggggggtggggggaactcttggaagggaagaagtatcacttctttctcaagtggagtgtttacaccttgctgtaacatttgaactttcacaagagatgtaataattttgataataaaattcttaaccataataatcataaagttgaga

SEQ ID NO: 303142 - DNA, 6612 bp, Homo sapiens
tgatacagagactgttggccatttctgaaaccaattaaaaagatggggtcttcagaactactagcagataatttggggggacttcatattcagaagtctatataaaggattcctcatgtccataacatgttggatgaggctctgcagctcacccccactctcagagtggtcagtctccattaattggaccccgtgatttccaatctctgctgtgttggacgtcatgagcattgcaatccctctgggagtcaccacatcagatacatcctactcagatatggctgctggatcagaccctgaatctgtggaggctagtccagcagttaatgagaagagcgtgtattccactcataattatgggaccactcagaggcatgggtgtcgaggactgccttatgctacgatcatccctcgttctgacctgaatggcctgccgtcgcctgtagaggaacgctgtggagacagcccgaactctgaaggagaaactgtacctacctggtgtccttgtggtctttctcaggatggcttccttctcaactgtgacaagtgcaggggaatgagcagggggaaggttattagacttcatcggcggaagcaggacaacatatcaggtggggatagcagtgcaacagaaagctgggatgaggagctttctccttccactgtgttgtatacagcaacacagcacacacctacaagcatcaccttaactgttagaagaaccaaacccaagaagcggaaaaagagtccagaaaagggtcgtgcagcaccaaagacgaagaaaatcaagaattctccctctgaagcacagaatttagatgagaatacaactgagggctgggaaaatcggataagactatggactgaccagtatgaagaagctttcactaatcagtacagtgcagatgtacagaacgcgcttgaacaacacctacattctagcaaggaatttgtgggcaaacctactattttagacactattaataagactgaattggcctgtaataacacagttattggttcccaaatgcagttacagctgggaagagtcactcgtgttcaaaagcaccggaagatcctgagggctgcaagagatttggctttggacactcttataatagagtatcgtgggaaagtcatgttacgacagcaatttgaggtcaatgggcatttcttcaaaaaaccatacccctttgtgctcttctactcaaaattcaatggtgtagagatgtgtgtggatgcccgtactttcggtaatgatgctcggttcatcagaagatcatgtacaccaaatgcagaggtgcgacacatgattgcagatgggatgattcacctgtgcatctatgctgtgtctgccatcaccaaggatgctgaggtcaccatagcatttgattatgagtatagtaactgtaattataaagtggactgtgcctgtcacaagggaaaccggaattgtcctatacaaaaaaggaatcctaatgctacagaactgccactcctaccacctcctccaagcctacccaccattggagcagagactagacgtagaaaagcacgacggaaagagctagagatggagcagcagaatgaggcttcagaggagaataatgaccagcaatcacaagaagttccagaaaaagtaactgtatccagtgatcatgaggaagtagacaatccagaagaaaaaccagaagaagagaaagaagaggttatagatgaccaggagaacctagctcatagcaggaggaccagggaagatagaaaggtagaagccatcatgcatgcttttgaaaacttagagaaaagaaagaagcggcgggatcagcccttggaacagagcaactctgatgtagagattactacaaccacctcagagactcctgttggtgaagagacaaaaactgaagcccctgaatctgaagttagcaactctgtttcaaatgttaccatcccaagcaccccacagagtgttggtgtgaatacccggaggtcttcccaagcaggggatattgctgcagaaaaactagtccccaagccacctccagcaaagccttctaggccccggccgaagagtcgaatttctcggtacaggaccagttcagcccaaagactaaagcgtcagaagcaggccaatgcacagcaggcagaattgtcacaagctgccttggaagagggaggaagtaacagtttagtaactcctactgaagctggaagtctagacagttcaggagaaaacaggccattaacagggtctgacccaactgtggtgtcaattactggatcccatgtcaaccgtgctgcatctaaataccccaaaaccaaaaagtatctagttacagaatggttgaatgacaaagcagagaagcaagagtgccctgttgagtgccctttacgtatcacaacggatccaactgtactggcaacgaccctaaacatgttaccaggtcttatccattccccgttaatttgcaccacccccaaacactacattcgctttggctcaccctttatccctgagagacgtcgaaggccccttctgcctgatggcacattcagctcctgtaagaagcgctggataaaacaagccttagaagaagggatgactcaaacatcatctgtaccccaagagactagaactcagcacctataccaaagcaatgagaatagtagctcttctagtatctgcaaagacaatgcagacttgttgagcccattaaagaaatggaagtctcgctatctgatggagcagaatgtcaccaagttacttcggcctctgtctccagtcacaccaccccctcccaattcaggctcaaagagtccccagctggccacacctggctcatctcacccaggagaagaggagtgtcgaaatggatacagcctcatgttttcaccagtcacatctcttactactgctagtcgctgcaacactcctctacagtttgagctttgtcaccgaaaagacctggatttggcaaaagtaggataccttgactccaacactaacagctgtgctgatagaccttccctactcaactcaggtcattctgacctggctcctcatccctccctcggacccacttctgagactggtttcccaagcagaagtggagatggacatcagaccctcgtgagaaactcagaccaggcatttcggacagagttcaacttgatgtatgcctactcccctttgaatgctatgcctcgagcagatggactgtatcgaggatctcctctagtgggggataggaagcctttacatttggatgggggatattgttcccctgcagaaggattttccagcagatatgaacatggcttaatgaaagacctctctcgtggatccttgtcacctggtggtgaaagggcctgtgaaggagtcccatctgccccccagaacccaccacagaggaaaaaagtatccctgctggagtaccgaaaacggaaacaagaagctaaggaaaattctgctggtgggggaggtgactctgcacagagcaaaagcaagtctgcaggagctgggcaaggcagcagtaactccgtttccgacactggtgcccatggtgtgcagggatcctcagcccgaactccatcttcccctcacaaaaaattctccccatctcattcctctatgtcccatttggaggcggtaagcccatcagattccagaggcacttcttcatctcactgcagacctcaagagaatatcagcagtaggtggatggttcccacatcagtagaacgactccgagaaggagggagcatccccaaggtcctccgaagcagcgtgagggtggcccaaaagggagagccctctcccacatgggagagtaacatcacagagaaagactcagaccctgcagatggagaaggcccagagacattaagctcagcactctctaaaggagcaacagtttacagcccttccagatacagctaccagctcctgcagtgtgatagtcctcggacagaatcacaaagcctccttcagcagagttcctcccccttcagaggacatcctacacagtctccaggatacagttatcgaactactgcactgagacctggaaaccccccctctcacggttcttcagaatcatccctctcttccacgtcctattccagccccgcccaccctgtgtccacagactcgttggccccatttacggggacaccagggtattttagcagccagccacattctggaaacagcactggcagcaatcttccaaggaggagctgcccttctagtgctgctagccctaccctgcagggaccctcagactcgccaacctcagattcagtttctcagtccagcacaggaactctgagttccacctcctttcctcagaactctaggtcgtcattgccatcagacttacggactatcagtctgcccagtgctgggcagtcagctgtctaccaggcctccagggtatctgcggtttccaattcacagcactacccacaccgtgggagtgggggtgtgcaccagtaccgactccagccactgcaagggtcaggagtcaagactcagacgggactttcctagggcttctggatttgggcaaacagaactgaatgagcccatagctgcttccttccagctgcctctggaacctaggccgagcatattgctgaggaacggggggtacaaggtgccagaggattgggtctggtggacaagaaacaagacttgtggtcacaattggcctctggccttggagaaagctgtaaatcttgtctgaagcagagactataaagaagtttctccctgctgtcaagggtacattgttgacaagcaaatggtgtttcggttagtaacggttctaagtgcaatgagttgtgttgaagcctccgtctcccatccttgcctgtagcccgtagtcacttgtgcagtgaggacatctttttaaatttaaaaaaaaaaaaaaaaaagttttcaaaggaaaaaaagttaaaagagccaatctcaaagccccaagccatctgagtactgttagggttttatgcacttaagaaaaaaggtaggtatgtaaatgttcatcctaagacaaccattccaaaagcaggtatctggccaatgtgtgtccaccaagaatactgtttatctttgtcttaagatcaccaagaaataggcaaggatagtaaagcttggaacctgcaccaactggagggtgcctggctctttgaagaaaagctcatggtcagctcttgattattcgggagcagattatttgagtagattgtctgagcctccaactgttaccatcctactcccccttcccaagctatttcacagctcagtaacccatgaagtaagtagacaagaaaaggaggaatgagacatgatataggccaattgcattgctacttaccagcttttggcaataaatttcattaggaaggataccgagtggtttgggaatgcttcgaattttattttttctactcccaattaatcaggagttgatgatcccatgagcaggaccgcctccatgattggggagcatgcacttgtgactgcagggtaagagtgggaagataggtttgtggagtggcaccgacaggactgtgattgtgtgtgggcctgccccacatttctctgggggatgcttatgtgagagtgggcccagtgaaagagttaccaagccacccacacccctaacactgttctggatgagagatgagagcagaccggcttctccccatcagtgcattgtgcctgttgtacacccctggaggagccctggagccagcccaggtggggtacacaatctttttaaattccatatggttgccagcttatttctttcacttgtttactgtaatatctggcgtgtttttatttatctaattttgtattcagttataaccatggtaggggtagtgaatatatgacaggtgtaatccctggtgctgcagtggaccttcttttcttttggacaagataatactgtgagtttccctccttccttccctctaatttgttttccttttttccccagcctcttgcatccccttcttttctaccctgtcctacaactatcatatgcacagtcttctctctttgtgtgtgactgttacaaaatttcacttttcaaaatcgaaatcaggtgtttgctcaaatgaggggagatttttttttttttttttttttaaatgctgagacctcagcagagtacttttctttttgttgtttcccccacaaacccatcagtctgggagagcattgggagtggaaatcatgttgcctgggatgctggtttctttgtatattatataaaacgtatgtaaatgtctctccatttgggctggggtttgcattctccccttggctatttaaccaaggggagaggccagcgggcaggcggccctcaccctgcctggcacgtgcagagaccccagccactctgtgtgggcagggtgctgtcaagaccagacctcttgggggggtaggggcgggggggtggggggaactcttggaagggaagaagtatcacttctttctcaagtggagtgtttacaccttgctgtaacatttgaactttcacaagagatgtaataattttgataataaaattcttaaccataataatcataaagttgaga

SEQ ID NO: 303143 - DNA, 7229 bp, Homo sapiens
gcggccgccgcccgcctgcgctcatagactcacgcagccccagtcccgccagtccgccaacacagtagtgccggcccccctctttccctggccctgccccccctccccgcctttggctcgctccgcctttctgccccccacccccacctcacgggtacgggccattcccggccaggaaacgccgtggcgccgcgttgggcctaactcgagtcctgccgcctcccgggagtgccgtgcgccgcagcccgggcccaggccccggcagcgcctgggacaaggtcttcagaactactagcagataatttggggggacttcatattcagaagtctatataaaggattcctcatgtccataacatgttggatgaggctctgcagctcacccccactctcagagtggtcagtctccattaattggaccccgtgatttccaatctctgctgtgttggacgtcatgagcattgcaatccctctgggagtcaccacatcagatacatcctactcagatatggctgctggatcagaccctgaatctgtggaggctagtccagcagttaatgagaagagcgtgtattccactcataattatgggaccactcagaggcatgggtgtcgaggactgccttatgctacgatcatccctcgttctgacctgaatggcctgccgtcgcctgtagaggaacgctgtggagacagcccgaactctgaaggagaaactgtacctacctggtgtccttgtggtctttctcaggatggcttccttctcaactgtgacaagtgcaggggaatgagcagggggaaggttattagacttcatcggcggaagcaggacaacatatcaggtggggatagcagtgcaacagaaagctgggatgaggagctttctccttccactgtgttgtatacagcaacacagcacacacctacaagcatcaccttaactgttagaagaaccaaacccaagaagcggaaaaagagtccagaaaagggtcgtgcagcaccaaagacgaagaaaatcaagaattctccctctgaagcacagaatttagatgagaatacaactgagggctgggaaaatcggataagactatggactgaccagtatgaagaagctttcactaatcagtacagtgcagatgtacagaacgcgcttgaacaacacctacattctagcaaggaatttgtgggcaaacctactattttagacactattaataagactgaattggcctgtaataacacagttattggttcccaaatgcagttacagctgggaagagtcactcgtgttcaaaagcaccggaagatcctgagggctgcaagagatttggctttggacactcttataatagagtatcgtgggaaagtcatgttacgacagcaatttgaggtcaatgggcatttcttcaaaaagtaagaacgtcattcattgagcagtgagggctaaggtggacctggttgaccagtgttgttgtaaaaatcattctgtttgataagacgctcttgggagaaaaaaatcacaactcagataagctcacacctgtctgctatttgtagagaagtgcaagtaaatcttcaaattgttcaatgtataaaatggtgacacctcctttccaagccaagcattccttgctttgtgcttgttctttaatcaaaagcagacaaacgtgatgctttcccaagtttaggcgttgcaaaagactgctgctgcttctctcagcatatgcttcatatttggagtcatggggtggccttcttatttgtgttgagaattacaggaattttaattgtatccctagaccatacccctttgtgctcttctactcaaaattcaatggtgtagagatgtgtgtggatgcccgtactttcggtaatgatgctcggttcatcagaagatcatgtacaccaaatgcagaggtgcgacacatgattgcagatgggatgattcacctgtgcatctatgctgtgtctgccatcaccaaggatgctgaggtcaccatagcatttgattatgagtatagtaactgtaattataaagtggactgtgcctgtcacaagggaaaccggaattgtcctatacaaaaaaggaatcctaatgctacagaactgccactcctaccacctcctccaagcctacccaccattggagcagagactagacgtagaaaagcacgacggaaagagctagagatggagcagcagaatgaggcttcagaggagaataatgaccagcaatcacaagaagttccagaaaaagtaactgtatccagtgatcatgaggaagtagacaatccagaagaaaaaccagaagaagagaaagaagaggttatagatgaccaggagaacctagctcatagcaggaggaccagggaagatagaaaggtagaagccatcatgcatgcttttgaaaacttagagaaaagaaagaagcggcgggatcagcccttggaacagagcaactctgatgtagagattactacaaccacctcagagactcctgttggtgaagagacaaaaactgaagcccctgaatctgaagttagcaactctgtttcaaatgttaccatcccaagcaccccacagagtgttggtgtgaatacccggaggtcttcccaagcaggggatattgctgcagaaaaactagtccccaagccacctccagcaaagccttctaggccccggccgaagagtcgaatttctcggtacaggaccagttcagcccaaagactaaagcgtcagaagcaggccaatgcacagcaggcagaattgtcacaagctgccttggaagagggaggaagtaacagtttagtaactcctactgaagctggaagtctagacagttcaggagaaaacaggccattaacagggtctgacccaactgtggtgtcaattactggatcccatgtcaaccgtgctgcatctaaataccccaaaaccaaaaagtatctagttacagaatggttgaatgacaaagcagagaagcaagagtgccctgttgagtgccctttacgtatcacaacggatccaactgtactggcaacgaccctaaacatgttaccaggtcttatccattccccgttaatttgcaccacccccaaacactacattcgctttggctcaccctttatccctgagagacgtcgaaggccccttctgcctgatggcacattcagctcctgtaagaagcgctggataaaacaagccttagaagaagggatgactcaaacatcatctgtaccccaagagactagaactcagcacctataccaaagcaatgagaatagtagctcttctagtatctgcaaagacaatgcagacttgttgagcccattaaagaaatggaagtctcgctatctgatggagcagaatgtcaccaagttacttcggcctctgtctccagtcacaccaccccctcccaattcaggctcaaagagtccccagctggccacacctggctcatctcacccaggagaagaggagtgtcgaaatggatacagcctcatgttttcaccagtcacatctcttactactgctagtcgctgcaacactcctctacagtttgagctttgtcaccgaaaagacctggatttggcaaaagtaggataccttgactccaacactaacagctgtgctgatagaccttccctactcaactcaggtcattctgacctggctcctcatccctccctcggacccacttctgagactggtttcccaagcagaagtggagatggacatcagaccctcgtgagaaactcagaccaggcatttcggacagagttcaacttgatgtatgcctactcccctttgaatgctatgcctcgagcagatggactgtatcgaggatctcctctagtgggggataggaagcctttacatttggatgggggatattgttcccctgcagaaggattttccagcagatatgaacatggcttaatgaaagacctctctcgtggatccttgtcacctggtggtgaaagggcctgtgaaggagtcccatctgccccccagaacccaccacagaggaaaaaagtatccctgctggagtaccgaaaacggaaacaagaagctaaggaaaattctgctggtgggggaggtgactctgcacagagcaaaagcaagtctgcaggagctgggcaaggcagcagtaactccgtttccgacactggtgcccatggtgtgcagggatcctcagcccgaactccatcttcccctcacaaaaaattctccccatctcattcctctatgtcccatttggaggcggtaagcccatcagattccagaggcacttcttcatctcactgcagacctcaagagaatatcagcagtaggtggatggttcccacatcagtagaacgactccgagaaggagggagcatccccaaggtcctccgaagcagcgtgagggtggcccaaaagggagagccctctcccacatgggagagtaacatcacagagaaagactcagaccctgcagatggagaaggcccagagacattaagctcagcactctctaaaggagcaacagtttacagcccttccagatacagctaccagctcctgcagtgtgatagtcctcggacagaatcacaaagcctccttcagcagagttcctcccccttcagaggacatcctacacagtctccaggatacagttatcgaactactgcactgagacctggaaaccccccctctcacggttcttcagaatcatccctctcttccacgtcctattccagccccgcccaccctgtgtccacagactcgttggccccatttacggggacaccagggtattttagcagccagccacattctggaaacagcactggcagcaatcttccaaggaggagctgcccttctagtgctgctagccctaccctgcagggaccctcagactcgccaacctcagattcagtttctcagtccagcacaggaactctgagttccacctcctttcctcagaactctaggtcgtcattgccatcagacttacggactatcagtctgcccagtgctgggcagtcagctgtctaccaggcctccagggtatctgcggtttccaattcacagcactacccacaccgtgggagtgggggtgtgcaccagtaccgactccagccactgcaagggtcaggagtcaagactcagacgggactttcctagggcttctggatttgggcaaacagaactgaatgagcccatagctgcttccttccagctgcctctggaacctaggccgagcatattgctgaggaacggggggtacaaggtgccagaggattgggtctggtggacaagaaacaagacttgtggtcacaattggcctctggccttggagaaagctgtaaatcttgtctgaagcagagactataaagaagtttctccctgctgtcaagggtacattgttgacaagcaaatggtgtttcggttagtaacggttctaagtgcaatgagttgtgttgaagcctccgtctcccatccttgcctgtagcccgtagtcacttgtgcagtgaggacatctttttaaatttaaaaaaaaaaaaaaaaaagttttcaaaggaaaaaaagttaaaagagccaatctcaaagccccaagccatctgagtactgttagggttttatgcacttaagaaaaaaggtaggtatgtaaatgttcatcctaagacaaccattccaaaagcaggtatctggccaatgtgtgtccaccaagaatactgtttatctttgtcttaagatcaccaagaaataggcaaggatagtaaagcttggaacctgcaccaactggagggtgcctggctctttgaagaaaagctcatggtcagctcttgattattcgggagcagattatttgagtagattgtctgagcctccaactgttaccatcctactcccccttcccaagctatttcacagctcagtaacccatgaagtaagtagacaagaaaaggaggaatgagacatgatataggccaattgcattgctacttaccagcttttggcaataaatttcattaggaaggataccgagtggtttgggaatgcttcgaattttattttttctactcccaattaatcaggagttgatgatcccatgagcaggaccgcctccatgattggggagcatgcacttgtgactgcagggtaagagtgggaagataggtttgtggagtggcaccgacaggactgtgattgtgtgtgggcctgccccacatttctctgggggatgcttatgtgagagtgggcccagtgaaagagttaccaagccacccacacccctaacactgttctggatgagagatgagagcagaccggcttctccccatcagtgcattgtgcctgttgtacacccctggaggagccctggagccagcccaggtggggtacacaatctttttaaattccatatggttgccagcttatttctttcacttgtttactgtaatatctggcgtgtttttatttatctaattttgtattcagttataaccatggtaggggtagtgaatatatgacaggtgtaatccctggtgctgcagtggaccttcttttcttttggacaagataatactgtgagtttccctccttccttccctctaatttgttttccttttttccccagcctcttgcatccccttcttttctaccctgtcctacaactatcatatgcacagtcttctctctttgtgtgtgactgttacaaaatttcacttttcaaaatcgaaatcaggtgtttgctcaaatgaggggagatttttttttttttttttttttaaatgctgagacctcagcagagtacttttctttttgttgtttcccccacaaacccatcagtctgggagagcattgggagtggaaatcatgttgcctgggatgctggtttctttgtatattatataaaacgtatgtaaatgtctctccatttgggctggggtttgcattctccccttggctatttaaccaaggggagaggccagcgggcaggcggccctcaccctgcctggcacgtgcagagaccccagccactctgtgtgggcagggtgctgtcaagaccagacctcttgggggggtaggggcgggggggtggggggaactcttggaagggaagaagtatcacttctttctcaagtggagtgtttacaccttgctgtaacatttgaactttcacaagagatgtaataattttgataataaaattcttaaccataataatcataaagttgaga

SEQ ID NO: 303144 - DNA, 6430 bp, Homo sapiens
ctgagtctaaaccagcccagagtggcttctctaggggaaactccccgctcagctgccctgaatctgtggaggctagtccagcagttaatgagaagagcgtgtattccactcataattatgggaccactcagaggcatgggtgtcgaggactgccttatgctgatcataattacggagcccctcctcctccgacacctcctgcttctccccctgtccagacgatcatccctcgttctgacctgaatggcctgccgtcgcctgtagaggaacgctgtggagacagcccgaactctgaaggagaaactgtacctacctggtgtccttgtggtctttctcaggatggcttccttctcaactgtgacaagtgcaggggaatgagcagggggaaggttattagacttcatcggcggaagcaggacaacatatcaggtggggatagcagtgcaacagaaagctgggatgaggagctttctccttccactgtgttgtatacagcaacacagcacacacctacaagcatcaccttaactgttagaagaaccaaacccaagaagcggaaaaagagtccagaaaagggtcgtgcagcaccaaagacgaagaaaatcaagaattctccctctgaagcacagaatttagatgagaatacaactgagggctgggaaaatcggataagactatggactgaccagtatgaagaagctttcactaatcagtacagtgcagatgtacagaacgcgcttgaacaacacctacattctagcaaggaatttgtgggcaaacctactattttagacactattaataagactgaattggcctgtaataacacagttattggttcccaaatgcagttacagctgggaagagtcactcgtgttcaaaagcaccggaagatcctgagggctgcaagagatttggctttggacactcttataatagagtatcgtgggaaagtcatgttacgacagcaatttgaggtcaatgggcatttcttcaaaaaaccatacccctttgtgctcttctactcaaaattcaatggtgtagagatgtgtgtggatgcccgtactttcggtaatgatgctcggttcatcagaagatcatgtacaccaaatgcagaggtgcgacacatgattgcagatgggatgattcacctgtgcatctatgctgtgtctgccatcaccaaggatgctgaggtcaccatagcatttgattatgagtatagtaactgtaattataaagtggactgtgcctgtcacaagggaaaccggaattgtcctatacaaaaaaggaatcctaatgctacagaactgccactcctaccacctcctccaagcctacccaccattggagcagagactagacgtagaaaagcacgacggaaagagctagagatggagcagcagaatgaggcttcagaggagaataatgaccagcaatcacaagaagttccagaaaaagtaactgtatccagtgatcatgaggaagtagacaatccagaagaaaaaccagaagaagagaaagaagaggttatagatgaccaggagaacctagctcatagcaggaggaccagggaagatagaaaggtagaagccatcatgcatgcttttgaaaacttagagaaaagaaagaagcggcgggatcagcccttggaacagagcaactctgatgtagagattactacaaccacctcagagactcctgttggtgaagagacaaaaactgaagcccctgaatctgaagttagcaactctgtttcaaatgttaccatcccaagcaccccacagagtgttggtgtgaatacccggaggtcttcccaagcaggggatattgctgcagaaaaactagtccccaagccacctccagcaaagccttctaggccccggccgaagagtcgaatttctcggtacaggaccagttcagcccaaagactaaagcgtcagaagcaggccaatgcacagcaggcagaattgtcacaagctgccttggaagagggaggaagtaacagtttagtaactcctactgaagctggaagtctagacagttcaggagaaaacaggccattaacagggtctgacccaactgtggtgtcaattactggatcccatgtcaaccgtgctgcatctaaataccccaaaaccaaaaagtatctagttacagaatggttgaatgacaaagcagagaagcaagagtgccctgttgagtgccctttacgtatcacaacggatccaactgtactggcaacgaccctaaacatgttaccaggtcttatccattccccgttaatttgcaccacccccaaacactacattcgctttggctcaccctttatccctgagagacgtcgaaggccccttctgcctgatggcacattcagctcctgtaagaagcgctggataaaacaagccttagaagaagggatgactcaaacatcatctgtaccccaagagactagaactcagcacctataccaaagcaatgagaatagtagctcttctagtatctgcaaagacaatgcagacttgttgagcccattaaagaaatggaagtctcgctatctgatggagcagaatgtcaccaagttacttcggcctctgtctccagtcacaccaccccctcccaattcaggctcaaagagtccccagctggccacacctggctcatctcacccaggagaagaggagtgtcgaaatggatacagcctcatgttttcaccagtcacatctcttactactgctagtcgctgcaacactcctctacagtttgagctttgtcaccgaaaagacctggatttggcaaaagtaggataccttgactccaacactaacagctgtgctgatagaccttccctactcaactcaggtcattctgacctggctcctcatccctccctcggacccacttctgagactggtttcccaagcagaagtggagatggacatcagaccctcgtgagaaactcagaccaggcatttcggacagagttcaacttgatgtatgcctactcccctttgaatgctatgcctcgagcagatggactgtatcgaggatctcctctagtgggggataggaagcctttacatttggatgggggatattgttcccctgcagaaggattttccagcagatatgaacatggcttaatgaaagacctctctcgtggatccttgtcacctggtggtgaaagggcctgtgaaggagtcccatctgccccccagaacccaccacagaggaaaaaagtatccctgctggagtaccgaaaacggaaacaagaagctaaggaaaattctgctggtgggggaggtgactctgcacagagcaaaagcaagtctgcaggagctgggcaaggcagcagtaactccgtttccgacactggtgcccatggtgtgcagggatcctcagcccgaactccatcttcccctcacaaaaaattctccccatctcattcctctatgtcccatttggaggcggtaagcccatcagattccagaggcacttcttcatctcactgcagacctcaagagaatatcagcagtaggtggatggttcccacatcagtagaacgactccgagaaggagggagcatccccaaggtcctccgaagcagcgtgagggtggcccaaaagggagagccctctcccacatgggagagtaacatcacagagaaagactcagaccctgcagatggagaaggcccagagacattaagctcagcactctctaaaggagcaacagtttacagcccttccagatacagctaccagctcctgcagtgtgatagtcctcggacagaatcacaaagcctccttcagcagagttcctcccccttcagaggacatcctacacagtctccaggatacagttatcgaactactgcactgagacctggaaaccccccctctcacggttcttcagaatcatccctctcttccacgtcctattccagccccgcccaccctgtgtccacagactcgttggccccatttacggggacaccagggtattttagcagccagccacattctggaaacagcactggcagcaatcttccaaggaggagctgcccttctagtgctgctagccctaccctgcagggaccctcagactcgccaacctcagattcagtttctcagtccagcacaggaactctgagttccacctcctttcctcagaactctaggtcgtcattgccatcagacttacggactatcagtctgcccagtgctgggcagtcagctgtctaccaggcctccagggtatctgcggtttccaattcacagcactacccacaccgtgggagtgggggtgtgcaccagtaccgactccagccactgcaagggtcaggagtcaagactcagacgggactttcctagggcttctggatttgggcaaacagaactgaatgagcccatagctgcttccttccagctgcctctggaacctaggccgagcatattgctgaggaacggggggtacaaggtgccagaggattgggtctggtggacaagaaacaagacttgtggtcacaattggcctctggccttggagaaagctgtaaatcttgtctgaagcagagactataaagaagtttctccctgctgtcaagggtacattgttgacaagcaaatggtgtttcggttagtaacggttctaagtgcaatgagttgtgttgaagcctccgtctcccatccttgcctgtagcccgtagtcacttgtgcagtgaggacatctttttaaatttaaaaaaaaaaaaaaaaaagttttcaaaggaaaaaaagttaaaagagccaatctcaaagccccaagccatctgagtactgttagggttttatgcacttaagaaaaaaggtaggtatgtaaatgttcatcctaagacaaccattccaaaagcaggtatctggccaatgtgtgtccaccaagaatactgtttatctttgtcttaagatcaccaagaaataggcaaggatagtaaagcttggaacctgcaccaactggagggtgcctggctctttgaagaaaagctcatggtcagctcttgattattcgggagcagattatttgagtagattgtctgagcctccaactgttaccatcctactcccccttcccaagctatttcacagctcagtaacccatgaagtaagtagacaagaaaaggaggaatgagacatgatataggccaattgcattgctacttaccagcttttggcaataaatttcattaggaaggataccgagtggtttgggaatgcttcgaattttattttttctactcccaattaatcaggagttgatgatcccatgagcaggaccgcctccatgattggggagcatgcacttgtgactgcagggtaagagtgggaagataggtttgtggagtggcaccgacaggactgtgattgtgtgtgggcctgccccacatttctctgggggatgcttatgtgagagtgggcccagtgaaagagttaccaagccacccacacccctaacactgttctggatgagagatgagagcagaccggcttctccccatcagtgcattgtgcctgttgtacacccctggaggagccctggagccagcccaggtggggtacacaatctttttaaattccatatggttgccagcttatttctttcacttgtttactgtaatatctggcgtgtttttatttatctaattttgtattcagttataaccatggtaggggtagtgaatatatgacaggtgtaatccctggtgctgcagtggaccttcttttcttttggacaagataatactgtgagtttccctccttccttccctctaatttgttttccttttttccccagcctcttgcatccccttcttttctaccctgtcctacaactatcatatgcacagtcttctctctttgtgtgtgactgttacaaaatttcacttttcaaaatcgaaatcaggtgtttgctcaaatgaggggagatttttttttttttttttttttaaatgctgagacctcagcagagtacttttctttttgttgtttcccccacaaacccatcagtctgggagagcattgggagtggaaatcatgttgcctgggatgctggtttctttgtatattatataaaacgtatgtaaatgtctctccatttgggctggggtttgcattctccccttggctatttaaccaaggggagaggccagcgggcaggcggccctcaccctgcctggcacgtgcagagaccccagccactctgtgtgggcagggtgctgtcaagaccagacctcttgggggggtaggggcgggggggtggggggaactcttggaagggaagaagtatcacttctttctcaagtggagtgtttacaccttgctgtaacatttgaactttcacaagagatgtaataattttgataataaaattcttaaccataataatcataaagttgaga

SEQ ID NO: 303145 - DNA, 6052 bp, Homo sapiens
gcatgttttccttaattatgaagtaatttgagtgtctactaaggtgttcttgctgttgtttaatgttattgctctggttttattcagttacagctgggaagagtcactcgtgttcaaaagcaccggaagatcctgagggctgcaagagatttggctttggacactcttataatagagtatcgtgggaaagtcatgttacgacagcaatttgaggtcaatgggcatttcttcaaaaagtaagaacgtcattcattgagcagtgagggctaaggtggacctggttgaccagtgttgttgtaaaaatcattctgtttgataagacgctcttgggagaaaaaaatcacaactcagataagctcacacctgtctgctatttgtagagaagtgcaagtaaatcttcaaattgttcaatgtataaaatggtgacacctcctttccaagccaagcattccttgctttgtgcttgttctttaatcaaaagcagacaaacgtgatgctttcccaagtttaggcgttgcaaaagactgctgctgcttctctcagcatatgcttcatatttggagtcatggggtggccttcttatttgtgttgagaattacaggaattttaattgtatccctagaccatacccctttgtgctcttctactcaaaattcaatggtgtagagatgtgtgtggatgcccgtactttcggtaatgatgctcggttcatcagaagatcatgtacaccaaatgcagaggtgcgacacatgattgcagatgggatgattcacctgtgcatctatgctgtgtctgccatcaccaaggatgctgaggtcaccatagcatttgattatgagtatagtaactgtaattataaagtggactgtgcctgtcacaagggaaaccggaattgtcctatacaaaaaaggaatcctaatgctacagaactgccactcctaccacctcctccaagcctacccaccattggagcagagactagacgtagaaaagcacgacggaaagagctagagatggagcagcagaatgaggcttcagaggagaataatgaccagcaatcacaagaagttccagaaaaagtaactgtatccagtgatcatgaggaagtagacaatccagaagaaaaaccagaagaagagaaagaagaggttatagatgaccaggagaacctagctcatagcaggaggaccagggaagatagaaaggtagaagccatcatgcatgcttttgaaaacttagagaaaagaaagaagcggcgggatcagcccttggaacagagcaactctgatgtagagattactacaaccacctcagagactcctgttggtgaagagacaaaaactgaagcccctgaatctgaagttagcaactctgtttcaaatgttaccatcccaagcaccccacagagtgttggtgtgaatacccggaggtcttcccaagcaggggatattgctgcagaaaaactagtccccaagccacctccagcaaagccttctaggccccggccgaagagtcgaatttctcggtacaggaccagttcagcccaaagactaaagcgtcagaagcaggccaatgcacagcaggcagaattgtcacaagctgccttggaagagggaggaagtaacagtttagtaactcctactgaagctggaagtctagacagttcaggagaaaacaggccattaacagggtctgacccaactgtggtgtcaattactggatcccatgtcaaccgtgctgcatctaaataccccaaaaccaaaaagtatctagttacagaatggttgaatgacaaagcagagaagcaagagtgccctgttgagtgccctttacgtatcacaacggatccaactgtactggcaacgaccctaaacatgttaccaggtcttatccattccccgttaatttgcaccacccccaaacactacattcgctttggctcaccctttatccctgagagacgtcgaaggccccttctgcctgatggcacattcagctcctgtaagaagcgctggataaaacaagccttagaagaagggatgactcaaacatcatctgtaccccaagagactagaactcagcacctataccaaagcaatgagaatagtagctcttctagtatctgcaaagacaatgcagacttgttgagcccattaaagaaatggaagtctcgctatctgatggagcagaatgtcaccaagttacttcggcctctgtctccagtcacaccaccccctcccaattcaggctcaaagagtccccagctggccacacctggctcatctcacccaggagaagaggagtgtcgaaatggatacagcctcatgttttcaccagtcacatctcttactactgctagtcgctgcaacactcctctacagtttgagctttgtcaccgaaaagacctggatttggcaaaagtaggataccttgactccaacactaacagctgtgctgatagaccttccctactcaactcaggtcattctgacctggctcctcatccctccctcggacccacttctgagactggtttcccaagcagaagtggagatggacatcagaccctcgtgagaaactcagaccaggcatttcggacagagttcaacttgatgtatgcctactcccctttgaatgctatgcctcgagcagatggactgtatcgaggatctcctctagtgggggataggaagcctttacatttggatgggggatattgttcccctgcagaaggattttccagcagatatgaacatggcttaatgaaagacctctctcgtggatccttgtcacctggtggtgaaagggcctgtgaaggagtcccatctgccccccagaacccaccacagaggaaaaaagtatccctgctggagtaccgaaaacggaaacaagaagctaaggaaaattctgctggtgggggaggtgactctgcacagagcaaaagcaagtctgcaggagctgggcaaggcagcagtaactccgtttccgacactggtgcccatggtgtgcagggatcctcagcccgaactccatcttcccctcacaaaaaattctccccatctcattcctctatgtcccatttggaggcggtaagcccatcagattccagaggcacttcttcatctcactgcagacctcaagagaatatcagcagtaggtggatggttcccacatcagtagaacgactccgagaaggagggagcatccccaaggtcctccgaagcagcgtgagggtggcccaaaagggagagccctctcccacatgggagagtaacatcacagagaaagactcagaccctgcagatggagaaggcccagagacattaagctcagcactctctaaaggagcaacagtttacagcccttccagatacagctaccagctcctgcagtgtgatagtcctcggacagaatcacaaagcctccttcagcagagttcctcccccttcagaggacatcctacacagtctccaggatacagttatcgaactactgcactgagacctggaaaccccccctctcacggttcttcagaatcatccctctcttccacgtcctattccagccccgcccaccctgtgtccacagactcgttggccccatttacggggacaccagggtattttagcagccagccacattctggaaacagcactggcagcaatcttccaaggaggagctgcccttctagtgctgctagccctaccctgcagggaccctcagactcgccaacctcagattcagtttctcagtccagcacaggaactctgagttccacctcctttcctcagaactctaggtcgtcattgccatcagacttacggactatcagtctgcccagtgctgggcagtcagctgtctaccaggcctccagggtatctgcggtttccaattcacagcactacccacaccgtgggagtgggggtgtgcaccagtaccgactccagccactgcaagggtcaggagtcaagactcagacgggactttcctagggcttctggatttgggcaaacagaactgaatgagcccatagctgcttccttccagctgcctctggaacctaggccgagcatattgctgaggaacggggggtacaaggtgccagaggattgggtctggtggacaagaaacaagacttgtggtcacaattggcctctggccttggagaaagctgtaaatcttgtctgaagcagagactataaagaagtttctccctgctgtcaagggtacattgttgacaagcaaatggtgtttcggttagtaacggttctaagtgcaatgagttgtgttgaagcctccgtctcccatccttgcctgtagcccgtagtcacttgtgcagtgaggacatctttttaaatttaaaaaaaaaaaaaaaaaagttttcaaaggaaaaaaagttaaaagagccaatctcaaagccccaagccatctgagtactgttagggttttatgcacttaagaaaaaaggtaggtatgtaaatgttcatcctaagacaaccattccaaaagcaggtatctggccaatgtgtgtccaccaagaatactgtttatctttgtcttaagatcaccaagaaataggcaaggatagtaaagcttggaacctgcaccaactggagggtgcctggctctttgaagaaaagctcatggtcagctcttgattattcgggagcagattatttgagtagattgtctgagcctccaactgttaccatcctactcccccttcccaagctatttcacagctcagtaacccatgaagtaagtagacaagaaaaggaggaatgagacatgatataggccaattgcattgctacttaccagcttttggcaataaatttcattaggaaggataccgagtggtttgggaatgcttcgaattttattttttctactcccaattaatcaggagttgatgatcccatgagcaggaccgcctccatgattggggagcatgcacttgtgactgcagggtaagagtgggaagataggtttgtggagtggcaccgacaggactgtgattgtgtgtgggcctgccccacatttctctgggggatgcttatgtgagagtgggcccagtgaaagagttaccaagccacccacacccctaacactgttctggatgagagatgagagcagaccggcttctccccatcagtgcattgtgcctgttgtacacccctggaggagccctggagccagcccaggtggggtacacaatctttttaaattccatatggttgccagcttatttctttcacttgtttactgtaatatctggcgtgtttttatttatctaattttgtattcagttataaccatggtaggggtagtgaatatatgacaggtgtaatccctggtgctgcagtggaccttcttttcttttggacaagataatactgtgagtttccctccttccttccctctaatttgttttccttttttccccagcctcttgcatccccttcttttctaccctgtcctacaactatcatatgcacagtcttctctctttgtgtgtgactgttacaaaatttcacttttcaaaatcgaaatcaggtgtttgctcaaatgaggggagatttttttttttttttttttttaaatgctgagacctcagcagagtacttttctttttgttgtttcccccacaaacccatcagtctgggagagcattgggagtggaaatcatgttgcctgggatgctggtttctttgtatattatataaaacgtatgtaaatgtctctccatttgggctggggtttgcattctccccttggctatttaaccaaggggagaggccagcgggcaggcggccctcaccctgcctggcacgtgcagagaccccagccactctgtgtgggcagggtgctgtcaagaccagacctcttgggggggtaggggcgggggggtggggggaactcttggaagggaagaagtatcacttctttctcaagtggagtgtttacaccttgctgtaacatttgaactttcacaagagatgtaataattttgataataaaattcttaaccataataatcataaagttgaga

SEQ ID NO: 303146 - DNA, 5396 bp, Homo sapiens
tgacagagcgagattccgtctccaataaaaagaaaaacaaaagtatttataggactctctaatgtctctgtttaacttattcagagacaatatcagaggaagttactgtactgatattttaagagggtgaatggataatgtaactgaatttcaagggtactgagacaggcattttggttgtttctttggagcagtaattataaagtggactgtgcctgtcacaagggaaaccggaattgtcctatacaaaaaaggaatcctaatgctacagaactgccactcctaccacctcctccaagcctacccaccattggagcagagactagacgtagaaaagcacgacggaaagagctagagatggagcagcagaatgaggcttcagaggagaataatgaccagcaatcacaagaagttccagaaaaagtaactgtatccagtgatcatgaggaagtagacaatccagaagaaaaaccagaagaagagaaagaagaggttatagatgaccaggagaacctagctcatagcaggaggaccagggaagatagaaaggtagaagccatcatgcatgcttttgaaaacttagagaaaagaaagaagcggcgggatcagcccttggaacagagcaactctgatgtagagattactacaaccacctcagagactcctgttggtgaagagacaaaaactgaagcccctgaatctgaagttagcaactctgtttcaaatgttaccatcccaagcaccccacagagtgttggtgtgaatacccggaggtcttcccaagcaggggatattgctgcagaaaaactagtccccaagccacctccagcaaagccttctaggccccggccgaagagtcgaatttctcggtacaggaccagttcagcccaaagactaaagcgtcagaagcaggccaatgcacagcaggcagaattgtcacaagctgccttggaagagggaggaagtaacagtttagtaactcctactgaagctggaagtctagacagttcaggagaaaacaggccattaacagggtctgacccaactgtggtgtcaattactggatcccatgtcaaccgtgctgcatctaaataccccaaaaccaaaaagtatctagttacagaatggttgaatgacaaagcagagaagcaagagtgccctgttgagtgccctttacgtatcacaacggatccaactgtactggcaacgaccctaaacatgttaccaggtcttatccattccccgttaatttgcaccacccccaaacactacattcgctttggctcaccctttatccctgagagacgtcgaaggccccttctgcctgatggcacattcagctcctgtaagaagcgctggataaaacaagccttagaagaagggatgactcaaacatcatctgtaccccaagagactagaactcagcacctataccaaagcaatgagaatagtagctcttctagtatctgcaaagacaatgcagacttgttgagcccattaaagaaatggaagtctcgctatctgatggagcagaatgtcaccaagttacttcggcctctgtctccagtcacaccaccccctcccaattcaggctcaaagagtccccagctggccacacctggctcatctcacccaggagaagaggagtgtcgaaatggatacagcctcatgttttcaccagtcacatctcttactactgctagtcgctgcaacactcctctacagtttgagctttgtcaccgaaaagacctggatttggcaaaagtaggataccttgactccaacactaacagctgtgctgatagaccttccctactcaactcaggtcattctgacctggctcctcatccctccctcggacccacttctgagactggtttcccaagcagaagtggagatggacatcagaccctcgtgagaaactcagaccaggcatttcggacagagttcaacttgatgtatgcctactcccctttgaatgctatgcctcgagcagatggactgtatcgaggatctcctctagtgggggataggaagcctttacatttggatgggggatattgttcccctgcagaaggattttccagcagatatgaacatggcttaatgaaagacctctctcgtggatccttgtcacctggtggtgaaagggcctgtgaaggagtcccatctgccccccagaacccaccacagaggaaaaaagtatccctgctggagtaccgaaaacggaaacaagaagctaaggaaaattctgctggtgggggaggtgactctgcacagagcaaaagcaagtctgcaggagctgggcaaggcagcagtaactccgtttccgacactggtgcccatggtgtgcagggatcctcagcccgaactccatcttcccctcacaaaaaattctccccatctcattcctctatgtcccatttggaggcggtaagcccatcagattccagaggcacttcttcatctcactgcagacctcaagagaatatcagcagtaggtggatggttcccacatcagtagaacgactccgagaaggagggagcatccccaaggtcctccgaagcagcgtgagggtggcccaaaagggagagccctctcccacatgggagagtaacatcacagagaaagactcagaccctgcagatggagaaggcccagagacattaagctcagcactctctaaaggagcaacagtttacagcccttccagatacagctaccagctcctgcagtgtgatagtcctcggacagaatcacaaagcctccttcagcagagttcctcccccttcagaggacatcctacacagtctccaggatacagttatcgaactactgcactgagacctggaaaccccccctctcacggttcttcagaatcatccctctcttccacgtcctattccagccccgcccaccctgtgtccacagactcgttggccccatttacggggacaccagggtattttagcagccagccacattctggaaacagcactggcagcaatcttccaaggaggagctgcccttctagtgctgctagccctaccctgcagggaccctcagactcgccaacctcagattcagtttctcagtccagcacaggaactctgagttccacctcctttcctcagaactctaggtcgtcattgccatcagacttacggactatcagtctgcccagtgctgggcagtcagctgtctaccaggcctccagggtatctgcggtttccaattcacagcactacccacaccgtgggagtgggggtgtgcaccagtaccgactccagccactgcaagggtcaggagtcaagactcagacgggactttcctagggcttctggatttgggcaaacagaactgaatgagcccatagctgcttccttccagctgcctctggaacctaggccgagcatattgctgaggaacggggggtacaaggtgccagaggattgggtctggtggacaagaaacaagacttgtggtcacaattggcctctggccttggagaaagctgtaaatcttgtctgaagcagagactataaagaagtttctccctgctgtcaagggtacattgttgacaagcaaatggtgtttcggttagtaacggttctaagtgcaatgagttgtgttgaagcctccgtctcccatccttgcctgtagcccgtagtcacttgtgcagtgaggacatctttttaaatttaaaaaaaaaaaaaaaaaagttttcaaaggaaaaaaagttaaaagagccaatctcaaagccccaagccatctgagtactgttagggttttatgcacttaagaaaaaaggtaggtatgtaaatgttcatcctaagacaaccattccaaaagcaggtatctggccaatgtgtgtccaccaagaatactgtttatctttgtcttaagatcaccaagaaataggcaaggatagtaaagcttggaacctgcaccaactggagggtgcctggctctttgaagaaaagctcatggtcagctcttgattattcgggagcagattatttgagtagattgtctgagcctccaactgttaccatcctactcccccttcccaagctatttcacagctcagtaacccatgaagtaagtagacaagaaaaggaggaatgagacatgatataggccaattgcattgctacttaccagcttttggcaataaatttcattaggaaggataccgagtggtttgggaatgcttcgaattttattttttctactcccaattaatcaggagttgatgatcccatgagcaggaccgcctccatgattggggagcatgcacttgtgactgcagggtaagagtgggaagataggtttgtggagtggcaccgacaggactgtgattgtgtgtgggcctgccccacatttctctgggggatgcttatgtgagagtgggcccagtgaaagagttaccaagccacccacacccctaacactgttctggatgagagatgagagcagaccggcttctccccatcagtgcattgtgcctgttgtacacccctggaggagccctggagccagcccaggtggggtacacaatctttttaaattccatatggttgccagcttatttctttcacttgtttactgtaatatctggcgtgtttttatttatctaattttgtattcagttataaccatggtaggggtagtgaatatatgacaggtgtaatccctggtgctgcagtggaccttcttttcttttggacaagataatactgtgagtttccctccttccttccctctaatttgttttccttttttccccagcctcttgcatccccttcttttctaccctgtcctacaactatcatatgcacagtcttctctctttgtgtgtgactgttacaaaatttcacttttcaaaatcgaaatcaggtgtttgctcaaatgaggggagatttttttttttttttttttttaaatgctgagacctcagcagagtacttttctttttgttgtttcccccacaaacccatcagtctgggagagcattgggagtggaaatcatgttgcctgggatgctggtttctttgtatattatataaaacgtatgtaaatgtctctccatttgggctggggtttgcattctccccttggctatttaaccaaggggagaggccagcgggcaggcggccctcaccctgcctggcacgtgcagagaccccagccactctgtgtgggcagggtgctgtcaagaccagacctcttgggggggtaggggcgggggggtggggggaactcttggaagggaagaagtatcacttctttctcaagtggagtgtttacaccttgctgtaacatttgaactttcacaagagatgtaataattttgataataaaattcttaaccataataatcataaagttgaga

SEQ ID NO: 303147 - DNA, 6458 bp, Homo sapiens
gcggccgccgcccgcctgcgctcatagactcacgcagccccagtcccgccagtccgccaacacagtagtgccggcccccctctttccctggccctgccccccctccccgcctttggctcgctccgcctttctgccccccacccccacctcacgggtacgggccattcccggccaggaaacgccgtggcgccgcgttgggcctaactcgagtcctgccgcctcccgggagtgccgtgcgccgcagcccgggcccaggccccggcagcgcctgggacaaggtcttcagaactactagcagataatttggggggacttcatattcagaagtctatataaaggattcctcatgtccataacatgttggatgaggctctgcagctcacccccactctcagagtggtcagtctccattaattggaccccgtgatttccaatctctgctgtgttggacgtcatgagcattgcaatccctctgggagtcaccacatcagatacatcctactcagatatggctgctggatcagaccctgaatctgtggaggctagtccagcagttaatgagaagagcgtgtattccactcataattatgggaccactcagaggcatgggtgtcgaggactgccttatgctacgatcatccctcgttctgacctgaatggcctgccgtcgcctgtagaggaacgctgtggagacagcccgaactctgaaggagaaactgtacctacctggtgtccttgtggtctttctcaggatggcttccttctcaactgtgacaagtgcaggggaatgagcagggggaaggttattagacttcatcggcggaagcaggacaacatatcaggtggggatagcagtgcaacagaaagctgggatgaggagctttctccttccactgtgttgtatacagcaacacagcacacacctacaagcatcaccttaactgttagaagaaccaaacccaagaagcggaaaaagagtccagaaaagggtcgtgcagcaccaaagacgaagaaaatcaagaattctccctctgaagcacagaatttagatgagaatacaactgagggctgggaaaatcggataagactatggactgaccagtatgaagaagctttcactaatcagtacagtgcagatgtacagaacgcgcttgaacaacacctacattctagcaaggaatttgtgggcaaacctactattttagacactattaataagactgaattggcctgtaataacacagttattggttcccaaatgcagttacagctgggaagagtcactcgtgttcaaaagcaccggaagatcctgagggctgcaagagatttggctttggacactcttataatagagtatcgtgggaaagtcatgttacgacagcaatttgaggtcaatgggcatttcttcaaaaaaccatacccctttgtgctcttctactcaaaattcaatggtgtagagatgtgtgtggatgcccgtactttcggtaatgatgctcggttcatcagaagatcatgtacaccaaatgcagaggtgcgacacatgattgcagatgggatgattcacctgtgcatctatgctgtgtctgccatcaccaaggatgctgaggtcaccatagcatttgattatgagtatagtaactgtaattataaagtggactgtgcctgtcacaagggaaaccggaattgtcctatacaaaaaaggaatcctaatgctacagaactgccactcctaccacctcctccaagcctacccaccattggagcagagactagacgtagaaaagcacgacggaaagagctagagatggagcagcagaatgaggcttcagaggagaataatgaccagcaatcacaagaagttccagaaaaagtaactgtatccagtgatcatgaggaagtagacaatccagaagaaaaaccagaagaagagaaagaagaggttatagatgaccaggagaacctagctcatagcaggaggaccagggaagatagaaaggtagaagccatcatgcatgcttttgaaaacttagagaaaagaaagaagcggcgggatcagcccttggaacagagcaactctgatgtagagattactacaaccacctcagagactcctgttggtgaagagacaaaaactgaagcccctgaatctgaagttagcaactctgtttcaaatgttaccatcccaagcaccccacagagtgttggtgtgaatacccggaggtcttcccaagcaggggatattgctgcagaaaaactagtccccaagccacctccagcaaagccttctaggccccggccgaagagtcgaatttctcggtacaggaccagttcagcccaaagactaaagcgtcagaagcaggccaatgcacagcaggcagaattgtcacaagctgccttggaagagggaggaagtaacagtttagtaactcctactgaagctggaagtctagacagttcaggagaaaacaggccattaacagggtctgacccaactgtggtgtcaattactggatcccatgtcaaccgtgctgcatctaaataccccaaaaccaaaaagtatctagttacagaatggttgaatgacaaagcagagaagcaagagtgccctgttgagtgccctttacgtatcacaacggatccaactgtactggcaacgaccctaaacatgttaccaggtcttatccattccccgttaatttgcaccacccccaaacactacattcgctttggctcaccctttatccctgagagacgtcgaaggccccttctgcctgatggcacattcagctcctgtaagaagcgctggataaaacaagccttagaagaagggatgactcaaacatcatctgtaccccaagagactagaactcagcacctataccaaagcaatgagaatagtagctcttctagtatctgcaaagacaatgcagacttgttgagcccattaaagaaatggaagtctcgctatctgatggagcagaatgtcaccaagttacttcggcctctgtctccagtcacaccaccccctcccaattcaggctcaaagagtccccagctggccacacctggctcatctcacccaggagaagaggagtgtcgaaatggatacagcctcatgttttcaccagtcacatctcttactactgctagtcgctgcaacactcctctacagtttgagctttgtcaccgaaaagacctggatttggcaaaagtaggataccttgactccaacactaacagctgtgctgatagaccttccctactcaactcaggtcattctgacctggctcctcatccctccctcggacccacttctgagactggtttcccaagcagaagtggagatggacatcagaccctcgtgagaaactcagaccaggcatttcggacagagttcaacttgatgtatgcctactcccctttgaatgctatgcctcgagcagatggactgtatcgaggatctcctctagtgggggataggaagcctttacatttggatgggggatattgttcccctgcagaaggattttccagcagatatgaacatggcttaatgaaagacctctctcgtggatccttgtcacctggtggtgaaagggcctgtgaaggagtcccatctgccccccagaacccaccacagaggaaaaaagtatccctgctggagtaccgaaaacggaaacaagaagctaaggaaaattctgctggtgggggaggtgactctgcacagagcaaaagcaagtctgcaggagctgggcaaggcagcagtaactccgtttccgacactggtgcccatggtgtgcagggatcctcagcccgaactccatcttcccctcacaaaaaattctccccatctcattcctctatgtcccatttggaggcggtaagcccatcagattccagaggcacttcttcatctcactgcagacctcaagagaatatcagcagtaggtggatggttcccacatcagtagaacgactccgagaaggagggagcatccccaaggtcctccgaagcagcgtgagggtggcccaaaagggagagccctctcccacatgggagagtaacatcacagagaaagactcagaccctgcagatggagaaggcccagagacattaagctcagcactctctaaaggagcaacagtttacagcccttccagatacagctaccagctcctgcagtgtgatagtcctcggacagaatcacaaagcctccttcagcagagttcctcccccttcagaggacatcctacacagtctccaggatacagttatcgaactactgcactgagacctggaaaccccccctctcacggttcttcagaatcatccctctcttccacgtcctattccagccccgcccaccctgtgtccacagactcgttggccccatttacggggacaccagggtattttagcagccagccacattctggaaacagcactggcagcaatcttccaaggaggagctgcccttctagtgctgctagccctaccctgcagggaccctcagactcgccaacctcagattcagtttctcagtccagcacaggaactctgagttccacctcctttcctcagaactctaggtcgtcattgccatcagacttacggactatcagtctgcccagtgctgggcagtcagctgtctaccaggcctccagggtatctgcggtttccaattcacagcactacccacaccgtgggagtgggggtgtgcaccagtaccgactccagccactgcaagggtcaggagtcaagactcagacgggactttcctagggcttctggatttgggcaaacagaactgaatgagcccatagctgcttccttccagctgcctctggaacctaggccgagcatattgctgaggaacggggggtacaaggtgccagaggattgggtctggtggacaagaaacaagacttgtggtcacaattggcctctggccttggagaaagctgtaaatcttgtctgaagcagagactataaagaagtttctccctgctgtcaagggtacattgttgacaagcaaatggtgtttcggttagtaacggttctaagtgcaatgagttgtgttgaagcctccgtctcccatccttgcctgtagcccgtagtcacttgtgcagtgaggacatctttttaaatttaaaaaaaaaaaaaaaaaagttttcaaaggaaaaaaagttaaaagagccaatctcaaagccccaagccatctgagtactgttagggttttatgcacttaagaaaaaaggtaggtatgtaaatgttcatcctaagacaaccattccaaaagcaggtatctggccaatgtgtgtccaccaagaatactgtttatctttgtcttaagatcaccaagaaataggcaaggatagtaaagcttggaacctgcaccaactggagggtgcctggctctttgaagaaaagctcatggtcagctcttgattattcgggagcagattatttgagtagattgtctgagcctccaactgttaccatcctactcccccttcccaagctatttcacagctcagtaacccatgaagtaagtagacaagaaaaggaggaatgagacatgatataggccaattgcattgctacttaccagcttttggcaataaatttcattaggaaggataccgagtggtttgggaatgcttcgaattttattttttctactcccaattaatcaggagttgatgatcccatgagcaggaccgcctccatgattggggagcatgcacttgtgactgcagggtaagagtgggaagataggtttgtggagtggcaccgacaggactgtgattgtgtgtgggcctgccccacatttctctgggggatgcttatgtgagagtgggcccagtgaaagagttaccaagccacccacacccctaacactgttctggatgagagatgagagcagaccggcttctccccatcagtgcattgtgcctgttgtacacccctggaggagccctggagccagcccaggtggggtacacaatctttttaaattccatatggttgccagcttatttctttcacttgtttactgtaatatctggcgtgtttttatttatctaattttgtattcagttataaccatggtaggggtagtgaatatatgacaggtgtaatccctggtgctgcagtggaccttcttttcttttggacaagataatactgtgagtttccctccttccttccctctaatttgttttccttttttccccagcccctacccccccaagaggtctggtcttgacagcaccctgcccacacagagtggctgggggggtaggggcgggggggtggggggaactcttggaagggaagaagtatcacttctttctcaagtggagtgtttacaccttgctgtaacatttgaactttcacaagagatgtaataattttgataataaaattcttaaccataataatcataaagttgaga

SEQ ID NO: 303148 - DNA, 7199 bp, Homo sapiens
gcggccgccgcccgcctgcgctcatagactcacgcagccccagtcccgccagtccgccaacacagtagtgccggcccccctctttccctggccctgccccccctccccgcctttggctcgctccgcctttctgccccccacccccacctcacgggtacgggccattcccggccaggaaacgccgtggcgccgcgttgggcctaactcgagtcctgccgcctcccgggagtgccgtgcgccgcagcccgggcccaggccccggcagcgcctgggacaaggtcttcagaactactagcagataatttggggggacttcatattcagaagtctatataaaggattcctcatgtccataacatgttggatgaggctctgcagctcacccccactctcagagtggtcagtctccattaattggaccccgtgatttccaatctctgctgtgttggacgtcatgagcattgcaatccctctgggagtcaccacatcagatacatcctactcagatatggctgctggatcagaccctgaatctgtggaggctagtccagcagttaatgagaagagcgtgtattccactcataattatgggaccactcagaggcatgggtgtcgaggactgccttatgctacgatcatccctcgttctgacctgaatggcctgccgtcgcctgtagaggaacgctgtggagacagcccgaactctgaaggagaaactgtacctacctggtgtccttgtggtctttctcaggatggcttccttctcaactgtgacaagtgcaggggaatgagcagggggaaggttattagacttcatcggcggaagcaggacaacatatcaggtggggatagcagtgcaacagaaagctgggatgaggagctttctccttccactgtgttgtatacagcaacacagcacacacctacaagcatcaccttaactgttagaagaaccaaacccaagaagcggaaaaagagtccagaaaagggtcgtgcagcaccaaagacgaagaaaatcaagaattctccctctgaagcacagaatttagatgagaatacaactgagggctgggaaaatcggataagactatggactgaccagtatgaagaagctttcactaatcagtacagtgcagatgtacagaacgcgcttgaacaacacctacattctagcaaggaatttgtgggcaaacctactattttagacactattaataagactgaattggcctgtaataacacagttattggttcccaaatgcagttacagctgggaagagtcactcgtgttcaaaagcaccggaagatcctgagggctgcaagagatttggctttggacactcttataatagagtatcgtgggaaagtcatgttacgacagcaatttgaggtcaatgggcatttcttcaaaaaaccatacccctttgtgctcttctactcaaaattcaatggtgtagagatgtgtgtggatgcccgtactttcggtaatgatgctcggttcatcagaagatcatgtacaccaaatgcagaggtgcgacacatgattgcagatgggatgattcacctgtgcatctatgctgtgtctgccatcaccaaggatgctgaggtcaccatagcatttgattatgagtatagtaactgtaattataaagtggactgtgcctgtcacaagggaaaccggaattgtcctatacaaaaaaggaatcctaatgctacagaactgccactcctaccacctcctccaagcctacccaccattggagcagagactagacgtagaaaagcacgacggaaagagctagagatggagcagcagaatgaggcttcagaggagaataatgaccagcaatcacaagaagttccagaaaaagtaactgtatccagtgatcatgaggtaatcgcccctggtcaaatgatgatgctatggcatcaatcctccaaaggaagaggaacccgggttgccgcatggtttaagtaggggagctatagtaacacttagtgccctttatatcaatgtgggtttattgtgttcatacatttctttctgttttacaaagtcaaaaacatcctttgctggttttgcaccagagaataggggttagttatcatctgtgtttaccatgtggcctcacatgagttaacagtttaaagcactagagattgttatagagagttttaagctaccagaataaaacagattgattttttctcagagcttgagtacagctgaatattgcctctatcttaaaggaagtagacaatccagaagaaaaaccagaagaagagaaagaagaggttatagatgaccaggagaacctagctcatagcaggaggaccagggaagatagaaaggtagaagccatcatgcatgcttttgaaaacttagagaaaagaaagaagcggcgggatcagcccttggaacagagcaactctgatgtagagattactacaaccacctcagagactcctgttggtgaagagacaaaaactgaagcccctgaatctgaagttagcaactctgtttcaaatgttaccatcccaagcaccccacagagtgttggtgtgaatacccggaggtcttcccaagcaggggatattgctgcagaaaaactagtccccaagccacctccagcaaagccttctaggccccggccgaagagtcgaatttctcggtacaggaccagttcagcccaaagactaaagcgtcagaagcaggccaatgcacagcaggcagaattgtcacaagctgccttggaagagggaggaagtaacagtttagtaactcctactgaagctggaagtctagacagttcaggagaaaacaggccattaacagggtctgacccaactgtggtgtcaattactggatcccatgtcaaccgtgctgcatctaaataccccaaaaccaaaaagtatctagttacagaatggttgaatgacaaagcagagaagcaagagtgccctgttgagtgccctttacgtatcacaacggatccaactgtactggcaacgaccctaaacatgttaccaggtcttatccattccccgttaatttgcaccacccccaaacactacattcgctttggctcaccctttatccctgagagacgtcgaaggccccttctgcctgatggcacattcagctcctgtaagaagcgctggataaaacaagccttagaagaagggatgactcaaacatcatctgtaccccaagagactagaactcagcacctataccaaagcaatgagaatagtagctcttctagtatctgcaaagacaatgcagacttgttgagcccattaaagaaatggaagtctcgctatctgatggagcagaatgtcaccaagttacttcggcctctgtctccagtcacaccaccccctcccaattcaggctcaaagagtccccagctggccacacctggctcatctcacccaggagaagaggagtgtcgaaatggatacagcctcatgttttcaccagtcacatctcttactactgctagtcgctgcaacactcctctacagtttgagctttgtcaccgaaaagacctggatttggcaaaagtaggataccttgactccaacactaacagctgtgctgatagaccttccctactcaactcaggtcattctgacctggctcctcatccctccctcggacccacttctgagactggtttcccaagcagaagtggagatggacatcagaccctcgtgagaaactcagaccaggcatttcggacagagttcaacttgatgtatgcctactcccctttgaatgctatgcctcgagcagatggactgtatcgaggatctcctctagtgggggataggaagcctttacatttggatgggggatattgttcccctgcagaaggattttccagcagatatgaacatggcttaatgaaagacctctctcgtggatccttgtcacctggtggtgaaagggcctgtgaaggagtcccatctgccccccagaacccaccacagaggaaaaaagtatccctgctggagtaccgaaaacggaaacaagaagctaaggaaaattctgctggtgggggaggtgactctgcacagagcaaaagcaagtctgcaggagctgggcaaggcagcagtaactccgtttccgacactggtgcccatggtgtgcagggatcctcagcccgaactccatcttcccctcacaaaaaattctccccatctcattcctctatgtcccatttggaggcggtaagcccatcagattccagaggcacttcttcatctcactgcagacctcaagagaatatcagcagtaggtggatggttcccacatcagtagaacgactccgagaaggagggagcatccccaaggtcctccgaagcagcgtgagggtggcccaaaagggagagccctctcccacatgggagagtaacatcacagagaaagactcagaccctgcagatggagaaggcccagagacattaagctcagcactctctaaaggagcaacagtttacagcccttccagatacagctaccagctcctgcagtgtgatagtcctcggacagaatcacaaagcctccttcagcagagttcctcccccttcagaggacatcctacacagtctccaggatacagttatcgaactactgcactgagacctggaaaccccccctctcacggttcttcagaatcatccctctcttccacgtcctattccagccccgcccaccctgtgtccacagactcgttggccccatttacggggacaccagggtattttagcagccagccacattctggaaacagcactggcagcaatcttccaaggaggagctgcccttctagtgctgctagccctaccctgcagggaccctcagactcgccaacctcagattcagtttctcagtccagcacaggaactctgagttccacctcctttcctcagaactctaggtcgtcattgccatcagacttacggactatcagtctgcccagtgctgggcagtcagctgtctaccaggcctccagggtatctgcggtttccaattcacagcactacccacaccgtgggagtgggggtgtgcaccagtaccgactccagccactgcaagggtcaggagtcaagactcagacgggactttcctagggcttctggatttgggcaaacagaactgaatgagcccatagctgcttccttccagctgcctctggaacctaggccgagcatattgctgaggaacggggggtacaaggtgccagaggattgggtctggtggacaagaaacaagacttgtggtcacaattggcctctggccttggagaaagctgtaaatcttgtctgaagcagagactataaagaagtttctccctgctgtcaagggtacattgttgacaagcaaatggtgtttcggttagtaacggttctaagtgcaatgagttgtgttgaagcctccgtctcccatccttgcctgtagcccgtagtcacttgtgcagtgaggacatctttttaaatttaaaaaaaaaaaaaaaaaagttttcaaaggaaaaaaagttaaaagagccaatctcaaagccccaagccatctgagtactgttagggttttatgcacttaagaaaaaaggtaggtatgtaaatgttcatcctaagacaaccattccaaaagcaggtatctggccaatgtgtgtccaccaagaatactgtttatctttgtcttaagatcaccaagaaataggcaaggatagtaaagcttggaacctgcaccaactggagggtgcctggctctttgaagaaaagctcatggtcagctcttgattattcgggagcagattatttgagtagattgtctgagcctccaactgttaccatcctactcccccttcccaagctatttcacagctcagtaacccatgaagtaagtagacaagaaaaggaggaatgagacatgatataggccaattgcattgctacttaccagcttttggcaataaatttcattaggaaggataccgagtggtttgggaatgcttcgaattttattttttctactcccaattaatcaggagttgatgatcccatgagcaggaccgcctccatgattggggagcatgcacttgtgactgcagggtaagagtgggaagataggtttgtggagtggcaccgacaggactgtgattgtgtgtgggcctgccccacatttctctgggggatgcttatgtgagagtgggcccagtgaaagagttaccaagccacccacacccctaacactgttctggatgagagatgagagcagaccggcttctccccatcagtgcattgtgcctgttgtacacccctggaggagccctggagccagcccaggtggggtacacaatctttttaaattccatatggttgccagcttatttctttcacttgtttactgtaatatctggcgtgtttttatttatctaattttgtattcagttataaccatggtaggggtagtgaatatatgacaggtgtaatccctggtgctgcagtggaccttcttttcttttggacaagataatactgtgagtttccctccttccttccctctaatttgttttccttttttccccagcctcttgcatccccttcttttctaccctgtcctacaactatcatatgcacagtcttctctctttgtgtgtgactgttacaaaatttcacttttcaaaatcgaaatcaggtgtttgctcaaatgaggggagatttttttttttttttttttttaaatgctgagacctcagcagagtacttttctttttgttgtttcccccacaaacccatcagtctgggagagcattgggagtggaaatcatgttgcctgggatgctggtttctttgtatattatataaaacgtatgtaaatgtctctccatttgggctggggtttgcattctccccttggctatttaaccaaggggagaggccagcgggcaggcggccctcaccctgcctggcacgtgcagagaccccagccactctgtgtgggcagggtgctgtcaagaccagacctcttgggggggtaggggcgggggggtggggggaactcttggaagggaagaagtatcacttctttctcaagtggagtgtttacaccttgctgtaacatttgaactttcacaagagatgtaataattttgataataaaattcttaaccataataatcataaagttgaga

SEQ ID NO: 303149 - DNA, 5797 bp, Homo sapiens
attaccataactccttaaataaataatagattaccataactccaaatggagagaaagtatggtttttttctctcttacggaaagttcatggtctttatgaaaaatccaaccagaagccttttcacacaggtgcgacacatgattgcagatgggatgattcacctgtgcatctatgctgtgtctgccatcaccaaggatgctgaggtcaccatagcatttgattatgagtatagtaactgtaattataaagtggactgtgcctgtcacaagggaaaccggaattgtcctatacaaaaaaggaatcctaatgctacagaactgccactcctaccacctcctccaagcctacccaccattggagcagagactagacgtagaaaagcacgacggaaagagctagagatggagcagcagaatgaggcttcagaggagaataatgaccagcaatcacaagaagttccagaaaaagtaactgtatccagtgatcatgaggtaatcgcccctggtcaaatgatgatgctatggcatcaatcctccaaaggaagaggaacccgggttgccgcatggtttaagtaggggagctatagtaacacttagtgccctttatatcaatgtgggtttattgtgttcatacatttctttctgttttacaaagtcaaaaacatcctttgctggttttgcaccagagaataggggttagttatcatctgtgtttaccatgtggcctcacatgagttaacagtttaaagcactagagattgttatagagagttttaagctaccagaataaaacagattgattttttctcagagcttgagtacagctgaatattgcctctatcttaaaggaagtagacaatccagaagaaaaaccagaagaagagaaagaagaggttatagatgaccaggagaacctagctcatagcaggaggaccagggaagatagaaaggtagaagccatcatgcatgcttttgaaaacttagagaaaagaaagaagcggcgggatcagcccttggaacagagcaactctgatgtagagattactacaaccacctcagagactcctgttggtgaagagacaaaaactgaagcccctgaatctgaagttagcaactctgtttcaaatgttaccatcccaagcaccccacagagtgttggtgtgaatacccggaggtcttcccaagcaggggatattgctgcagaaaaactagtccccaagccacctccagcaaagccttctaggccccggccgaagagtcgaatttctcggtacaggaccagttcagcccaaagactaaagcgtcagaagcaggccaatgcacagcaggcagaattgtcacaagctgccttggaagagggaggaagtaacagtttagtaactcctactgaagctggaagtctagacagttcaggagaaaacaggccattaacagggtctgacccaactgtggtgtcaattactggatcccatgtcaaccgtgctgcatctaaataccccaaaaccaaaaagtatctagttacagaatggttgaatgacaaagcagagaagcaagagtgccctgttgagtgccctttacgtatcacaacggatccaactgtactggcaacgaccctaaacatgttaccaggtcttatccattccccgttaatttgcaccacccccaaacactacattcgctttggctcaccctttatccctgagagacgtcgaaggccccttctgcctgatggcacattcagctcctgtaagaagcgctggataaaacaagccttagaagaagggatgactcaaacatcatctgtaccccaagagactagaactcagcacctataccaaagcaatgagaatagtagctcttctagtatctgcaaagacaatgcagacttgttgagcccattaaagaaatggaagtctcgctatctgatggagcagaatgtcaccaagttacttcggcctctgtctccagtcacaccaccccctcccaattcaggctcaaagagtccccagctggccacacctggctcatctcacccaggagaagaggagtgtcgaaatggatacagcctcatgttttcaccagtcacatctcttactactgctagtcgctgcaacactcctctacagtttgagctttgtcaccgaaaagacctggatttggcaaaagtaggataccttgactccaacactaacagctgtgctgatagaccttccctactcaactcaggtcattctgacctggctcctcatccctccctcggacccacttctgagactggtttcccaagcagaagtggagatggacatcagaccctcgtgagaaactcagaccaggcatttcggacagagttcaacttgatgtatgcctactcccctttgaatgctatgcctcgagcagatggactgtatcgaggatctcctctagtgggggataggaagcctttacatttggatgggggatattgttcccctgcagaaggattttccagcagatatgaacatggcttaatgaaagacctctctcgtggatccttgtcacctggtggtgaaagggcctgtgaaggagtcccatctgccccccagaacccaccacagaggaaaaaagtatccctgctggagtaccgaaaacggaaacaagaagctaaggaaaattctgctggtgggggaggtgactctgcacagagcaaaagcaagtctgcaggagctgggcaaggcagcagtaactccgtttccgacactggtgcccatggtgtgcagggatcctcagcccgaactccatcttcccctcacaaaaaattctccccatctcattcctctatgtcccatttggaggcggtaagcccatcagattccagaggcacttcttcatctcactgcagacctcaagagaatatcagcagtaggtggatggttcccacatcagtagaacgactccgagaaggagggagcatccccaaggtcctccgaagcagcgtgagggtggcccaaaagggagagccctctcccacatgggagagtaacatcacagagaaagactcagaccctgcagatggagaaggcccagagacattaagctcagcactctctaaaggagcaacagtttacagcccttccagatacagctaccagctcctgcagtgtgatagtcctcggacagaatcacaaagcctccttcagcagagttcctcccccttcagaggacatcctacacagtctccaggatacagttatcgaactactgcactgagacctggaaaccccccctctcacggttcttcagaatcatccctctcttccacgtcctattccagccccgcccaccctgtgtccacagactcgttggccccatttacggggacaccagggtattttagcagccagccacattctggaaacagcactggcagcaatcttccaaggaggagctgcccttctagtgctgctagccctaccctgcagggaccctcagactcgccaacctcagattcagtttctcagtccagcacaggaactctgagttccacctcctttcctcagaactctaggtcgtcattgccatcagacttacggactatcagtctgcccagtgctgggcagtcagctgtctaccaggcctccagggtatctgcggtttccaattcacagcactacccacaccgtgggagtgggggtgtgcaccagtaccgactccagccactgcaagggtcaggagtcaagactcagacgggactttcctagggcttctggatttgggcaaacagaactgaatgagcccatagctgcttccttccagctgcctctggaacctaggccgagcatattgctgaggaacggggggtacaaggtgccagaggattgggtctggtggacaagaaacaagacttgtggtcacaattggcctctggccttggagaaagctgtaaatcttgtctgaagcagagactataaagaagtttctccctgctgtcaagggtacattgttgacaagcaaatggtgtttcggttagtaacggttctaagtgcaatgagttgtgttgaagcctccgtctcccatccttgcctgtagcccgtagtcacttgtgcagtgaggacatctttttaaatttaaaaaaaaaaaaaaaaaagttttcaaaggaaaaaaagttaaaagagccaatctcaaagccccaagccatctgagtactgttagggttttatgcacttaagaaaaaaggtaggtatgtaaatgttcatcctaagacaaccattccaaaagcaggtatctggccaatgtgtgtccaccaagaatactgtttatctttgtcttaagatcaccaagaaataggcaaggatagtaaagcttggaacctgcaccaactggagggtgcctggctctttgaagaaaagctcatggtcagctcttgattattcgggagcagattatttgagtagattgtctgagcctccaactgttaccatcctactcccccttcccaagctatttcacagctcagtaacccatgaagtaagtagacaagaaaaggaggaatgagacatgatataggccaattgcattgctacttaccagcttttggcaataaatttcattaggaaggataccgagtggtttgggaatgcttcgaattttattttttctactcccaattaatcaggagttgatgatcccatgagcaggaccgcctccatgattggggagcatgcacttgtgactgcagggtaagagtgggaagataggtttgtggagtggcaccgacaggactgtgattgtgtgtgggcctgccccacatttctctgggggatgcttatgtgagagtgggcccagtgaaagagttaccaagccacccacacccctaacactgttctggatgagagatgagagcagaccggcttctccccatcagtgcattgtgcctgttgtacacccctggaggagccctggagccagcccaggtggggtacacaatctttttaaattccatatggttgccagcttatttctttcacttgtttactgtaatatctggcgtgtttttatttatctaattttgtattcagttataaccatggtaggggtagtgaatatatgacaggtgtaatccctggtgctgcagtggaccttcttttcttttggacaagataatactgtgagtttccctccttccttccctctaatttgttttccttttttccccagcctcttgcatccccttcttttctaccctgtcctacaactatcatatgcacagtcttctctctttgtgtgtgactgttacaaaatttcacttttcaaaatcgaaatcaggtgtttgctcaaatgaggggagatttttttttttttttttttttaaatgctgagacctcagcagagtacttttctttttgttgtttcccccacaaacccatcagtctgggagagcattgggagtggaaatcatgttgcctgggatgctggtttctttgtatattatataaaacgtatgtaaatgtctctccatttgggctggggtttgcattctccccttggctatttaaccaaggggagaggccagcgggcaggcggccctcaccctgcctggcacgtgcagagaccccagccactctgtgtgggcagggtgctgtcaagaccagacctcttgggggggtaggggcgggggggtggggggaactcttggaagggaagaagtatcacttctttctcaagtggagtgtttacaccttgctgtaacatttgaactttcacaagagatgtaataattttgataataaaattcttaaccataataatcataaagttgaga

SEQ ID NO: 303150 - DNA, 6900 bp, Homo sapiens
gcggccgccgcccgcctgcgctcatagactcacgcagccccagtcccgccagtccgccaacacagtagtgccggcccccctctttccctggccctgccccccctccccgcctttggctcgctccgcctttctgccccccacccccacctcacgggtacgggccattcccggccaggaaacgccgtggcgccgcgttgggcctaactcgagtcctgccgcctcccgggagtgccgtgcgccgcagcccgggcccaggccccggcagcgcctgggacaaggtcttcagaactactagcagataatttggggggacttcatattcagaagtctatataaaggattcctcatgtccataacatgttggatgaggctctgcagctcacccccactctcagagtggtcagtctccattaattggaccccgtgatttccaatctctgctgtgttggacgtcatgagcattgcaatccctctgggagtcaccacatcagatacatcctactcagatatggctgctggatcagaccctgaatctgtggaggctagtccagcagttaatgagaagagcgtgtattccactcataattatgggaccactcagaggcatgggtgtcgaggactgccttatgctacgatcatccctcgttctgacctgaatggcctgccgtcgcctgtagaggaacgctgtggagacagcccgaactctgaaggagaaactgtacctacctggtgtccttgtggtctttctcaggatggcttccttctcaactgtgacaagtgcaggggaatgagcagggggaaggttattagacttcatcggcggaagcaggacaacatatcaggtggggatagcagtgcaacagaaagctgggatgaggagctttctccttccactgtgttgtatacagcaacacagcacacacctacaagcatcaccttaactgttagaagaaccaaacccaagaagcggaaaaagagtccagaaaagggtcgtgcagcaccaaagacgaagaaaatcaagaattctccctctgaagcacagaatttagatgagaatacaactgagggctgggaaaatcggataagactatggactgaccagtatgaagaagctttcactaatcagtacagtgcagatgtacagaacgcgcttgaacaacacctacattctagcaaggaatttgtgggcaaacctactattttagacactattaataagactgaattggcctgtaataacacagttattggttcccaaatgcagttacagctgggaagagtcactcgtgttcaaaagcaccggaagatcctgagggctgcaagagatttggctttggacactcttataatagagtatcgtgggaaagtcatgttacgacagcaatttgaggtcaatgggcatttcttcaaaaaaccatacccctttgtgctcttctactcaaaattcaatggtgtagagatgtgtgtggatgcccgtactttcggtaatgatgctcggttcatcagaagatcatgtacaccaaatgcagaggtgcgacacatgattgcagatgggatgattcacctgtgcatctatgctgtgtctgccatcaccaaggatgctgaggtcaccatagcatttgattatgagtatagtaactgtaattataaagtggactgtgcctgtcacaagggaaaccggaattgtcctatacaaaaaaggaatcctaatgctacagaactgccactcctaccacctcctccaagcctacccaccattggagcagagactagacgtagaaaagcacgacggaaagagctagagatggagcagcagaatgaggcttcagaggagaataatgaccagcaatcacaagaagttccagaaaaagtaactgtatccagtgatcatgaggaagtagacaatccagaagaaaaaccagaagaagagaaagaagaggttatagatgaccaggagaacctagctcatagcaggaggaccagggaagatagaaaggtagaagccatcatgcatgcttttgaaaacttagagaaaagaaagaagcggcgggatcagcccttggaacagagcaactctgatgtagagattactacaaccacctcagagactcctgttggtgaagagacaaaaactgaagcccctgaatctgaagttagcaactctgtttcaaatgttaccatcccaagcaccccacagagtgttggtgtgaatacccggaggtcttcccaagcaggggatattgctgcagaaaaactagtccccaagccacctccagcaaagccttctaggccccggccgaagagtcgaatttctcggtacaggaccagttcagcccaaagactaaagcgtcagaagcaggccaatgcacagcaggcagaattgtcacaagctgccttggaagagggaggaagtaacagtttagtaactcctactgaagctggaagtctagacagttcaggagaaaacaggccattaacagggtctgacccaactgtggtgtcaattactggatcccatgtcaaccgtgctgcatctaaataccccaaaaccaaaaagtatctagttacagaatggttgaatgacaaagcagagaagcaagagtgccctgttgagtgccctttacgtatcacaacggatccaactgtactggcaacgaccctaaacatgttaccaggtcttatccattccccgttaatttgcaccacccccaaacactacattcgctttggctcaccctttatccctgagagacgtcgaaggccccttctgcctgatggcacattcagctcctgtaagaagcgctggataaaacaagccttagaagaagggatgactcaaacatcatctgtaccccaagagactagaactcagcacctataccaaagcaatgagaatagtagctcttctagtatctgcaaagacaatgcagacttgttgagcccattaaagaaatggaagtctcgctatctgatggagcagaatgtcaccaagttacttcggcctctgtctccagtcacaccaccccctcccaattcaggctcaaagagtccccagctggccacacctggctcatctcacccaggagaagaggagtgtcgaaatggatacagcctcatgttttcaccagtcacatctcttactactgctagtcgctgcaacactcctctacagtttgagaacatatcctcccctgagagttcccctgcgcataggcccgagtccctgtcacccgagctttgtcaccgaaaagacctggatttggcaaaagtaggataccttgactccaacactaacagctgtgctgatagaccttccctactcaactcaggtcattctgacctggctcctcatccctccctcggacccacttctgagactggtttcccaagcagaagtggagatggacatcagaccctcgtgagaaactcagaccaggcatttcggacagagttcaacttgatgtatgcctactcccctttgaatgctatgcctcgagcagatggactgtatcgaggatctcctctagtgggggataggaagcctttacatttggatgggggatattgttcccctgcagaaggattttccagcagatatgaacatggcttaatgaaagacctctctcgtggatccttgtcacctggtggtgaaagggcctgtgaaggagtcccatctgccccccagaacccaccacagaggaaaaaagtatccctgctggagtaccgaaaacggaaacaagaagctaaggaaaattctgctggtgggggaggtgactctgcacagagcaaaagcaagtctgcaggagctgggcaaggcagcagtaactccgtttccgacactggtgcccatggtgtgcagggatcctcagcccgaactccatcttcccctcacaaaaaattctccccatctcattcctctatgtcccatttggaggcggtaagcccatcagattccagaggcacttcttcatctcactgcagacctcaagagaatatcagcagtaggtggatggttcccacatcagtagaacgactccgagaaggagggagcatccccaaggtcctccgaagcagcgtgagggtggcccaaaagggagagccctctcccacatgggagagtaacatcacagagaaagactcagaccctgcagatggagaaggcccagagacattaagctcagcactctctaaaggagcaacagtttacagcccttccagatacagctaccagctcctgcagtgtgatagtcctcggacagaatcacaaagcctccttcagcagagttcctcccccttcagaggacatcctacacagtctccaggatacagttatcgaactactgcactgagacctggaaaccccccctctcacggttcttcagaatcatccctctcttccacgtcctattccagccccgcccaccctgtgtccacagactcgttggccccatttacggggacaccagggtattttagcagccagccacattctggaaacagcactggcagcaatcttccaaggaggagctgcccttctagtgctgctagccctaccctgcagggaccctcagactcgccaacctcagattcagtttctcagtccagcacaggaactctgagttccacctcctttcctcagaactctaggtcgtcattgccatcagacttacggactatcagtctgcccagtgctgggcagtcagctgtctaccaggcctccagggtatctgcggtttccaattcacagcactacccacaccgtgggagtgggggtgtgcaccagtaccgactccagccactgcaagggtcaggagtcaagactcagacgggactttcctagggcttctggatttgggcaaacagaactgaatgagcccatagctgcttccttccagctgcctctggaacctaggccgagcatattgctgaggaacggggggtacaaggtgccagaggattgggtctggtggacaagaaacaagacttgtggtcacaattggcctctggccttggagaaagctgtaaatcttgtctgaagcagagactataaagaagtttctccctgctgtcaagggtacattgttgacaagcaaatggtgtttcggttagtaacggttctaagtgcaatgagttgtgttgaagcctccgtctcccatccttgcctgtagcccgtagtcacttgtgcagtgaggacatctttttaaatttaaaaaaaaaaaaaaaaaagttttcaaaggaaaaaaagttaaaagagccaatctcaaagccccaagccatctgagtactgttagggttttatgcacttaagaaaaaaggtaggtatgtaaatgttcatcctaagacaaccattccaaaagcaggtatctggccaatgtgtgtccaccaagaatactgtttatctttgtcttaagatcaccaagaaataggcaaggatagtaaagcttggaacctgcaccaactggagggtgcctggctctttgaagaaaagctcatggtcagctcttgattattcgggagcagattatttgagtagattgtctgagcctccaactgttaccatcctactcccccttcccaagctatttcacagctcagtaacccatgaagtaagtagacaagaaaaggaggaatgagacatgatataggccaattgcattgctacttaccagcttttggcaataaatttcattaggaaggataccgagtggtttgggaatgcttcgaattttattttttctactcccaattaatcaggagttgatgatcccatgagcaggaccgcctccatgattggggagcatgcacttgtgactgcagggtaagagtgggaagataggtttgtggagtggcaccgacaggactgtgattgtgtgtgggcctgccccacatttctctgggggatgcttatgtgagagtgggcccagtgaaagagttaccaagccacccacacccctaacactgttctggatgagagatgagagcagaccggcttctccccatcagtgcattgtgcctgttgtacacccctggaggagccctggagccagcccaggtggggtacacaatctttttaaattccatatggttgccagcttatttctttcacttgtttactgtaatatctggcgtgtttttatttatctaattttgtattcagttataaccatggtaggggtagtgaatatatgacaggtgtaatccctggtgctgcagtggaccttcttttcttttggacaagataatactgtgagtttccctccttccttccctctaatttgttttccttttttccccagcctcttgcatccccttcttttctaccctgtcctacaactatcatatgcacagtcttctctctttgtgtgtgactgttacaaaatttcacttttcaaaatcgaaatcaggtgtttgctcaaatgaggggagatttttttttttttttttttttaaatgctgagacctcagcagagtacttttctttttgttgtttcccccacaaacccatcagtctgggagagcattgggagtggaaatcatgttgcctgggatgctggtttctttgtatattatataaaacgtatgtaaatgtctctccatttgggctggggtttgcattctccccttggctatttaaccaaggggagaggccagcgggcaggcggccctcaccctgcctggcacgtgcagagaccccagccactctgtgtgggcagggtgctgtcaagaccagacctcttgggggggtaggggcgggggggtggggggaactcttggaagggaagaagtatcacttctttctcaagtggagtgtttacaccttgctgtaacatttgaactttcacaagagatgtaataattttgataataaaattcttaaccataataatcataaagttgaga

SEQ ID NO: 303151 - DNA, 6781 bp, Homo sapiens
gcggccgccgcccgcctgcgctcatagactcacgcagccccagtcccgccagtccgccaacacagtagtgccggcccccctctttccctggccctgccccccctccccgcctttggctcgctccgcctttctgccccccacccccacctcacgggtacgggccattcccggccaggaaacgccgtggcgccgcgttgggcctaactcgagtcctgccgcctcccgggagtgccgtgcgccgcagcccgggcccaggccccggcagcgcctgggacaaggtcttcagaactactagcagataatttggggggacttcatattcagaagtctatataaaggattcctcatgtccataacatgttggatgaggctctgcagctcacccccactctcagagtggtcagtctccattaattggaccccgtgatttccaatctctgctgtgttggacgtcatgagcattgcaatccctctgggagtcaccacatcagatacatcctactcagatatggctgctggatcagaccctgaatctgtggaggctagtccagcagttaatgagaagagcgtgtattccactcataattatgggaccactcagaggcatgggtgtcgaggactgccttatgctacgatcatccctcgttctgacctgaatggcctgccgtcgcctgtagaggaacgctgtggagacagcccgaactctgaaggagaaactgtacctacctggtgtccttgtggtctttctcaggatggcttccttctcaactgtgacaagtgcaggggaatgagcagggggaaggttattagacttcatcggcggaagcaggacaacatatcaggtggggatagcagtgcaacagaaagctgggatgaggagctttctccttccactgtgttgtatacagcaacacagcacacacctacaagcatcaccttaactgttagaagaaccaaacccaagaagcggaaaaagagtccagaaaagggtcgtgcagcaccaaagacgaagaaaatcaagaattctccctctgaagcacagaatttagatgagaatacaactgagggctgggaaaatcggataagactatggactgaccagtatgaagaagctttcactaatcagtacagtgcagatgtacagaacgcgcttgaacaacacctacattctagcaaggaatttgtgggcaaacctactattttagacactattaataagactgaattggcctgtaataacacagttattggttcccaaatgcagttacagctgggaagagtcactcgtgttcaaaagcaccggaagatcctgagggctgcaagagatttggctttggacactcttataatagagtatcgtgggaaagtcatgttacgacagcaatttgaggtcaatgggcatttcttcaaaaaaccatacccctttgtgctcttctactcaaaattcaatggtgtagagatgtgtgtggatgcccgtactttcggtaatgatgctcggttcatcagaagatcatgtacaccaaatgcagaggtgcgacacatgattgcagatgggatgattcacctgtgcatctatgctgtgtctgccatcaccaaggatgctgaggtcaccatagcatttgattatgagtatagtaactgtaattataaagtggactgtgcctgtcacaagggaaaccggaattgtcctatacaaaaaaggaatcctaatgctacagaactgccactcctaccacctcctccaagcctacccaccattggagcagagactagacgtagaaaagcacgacggaaagagctagagatggagcagcagaatgaggcttcagaggagaataatgaccagcaatcacaagaagttccagaaaaagtaactgtatccagtgatcatgaggaagtagacaatccagaagaaaaaccagaagaagagaaagaagaggttatagatgaccaggagaacctagctcatagcaggaggaccagggaagatagaaaggtagaagccatcatgcatgcttttgaaaacttagagaaaagaaagaagcggcgggatcagcccttggaacagagcaactctgatgtagagattactacaaccacctcagagactcctgttggtgaagagacaaaaactgaagcccctgaatctgaagttagcaactctgtttcaaatgttaccatcccaagcaccccacagagtgttggtgtgaatacccggaggtcttcccaagcaggggatattgctgcagaaaaactagtccccaagccacctccagcaaagccttctaggccccggccgaagagtcgaatttctcggtacaggaccagttcagcccaaagactaaagcgtcagaagcaggccaatgcacagcaggcagaattgtcacaagctgccttggaagagggaggaagtaacagtttagtaactcctactgaagctggaagtctagacagttcaggagaaaacaggccattaacagggtctgacccaactgtggtgtcaattactggatcccatgtcaaccgtgctgcatctaaataccccaaaaccaaaaagtatctagttacagaatggttgaatgacaaagcagagaagcaagagtgccctgttgagtgccctttacgtatcacaacggatccaactgtactggcaacgaccctaaacatgttaccaggtcttatccattccccgttaatttgcaccacccccaaacactacattcgctttggctcaccctttatccctgagagacgtcgaaggccccttctgcctgatggcacattcagctcctgtaagaagcgctggataaaacaagccttagaagaagggatgactcaaacatcatctgtaccccaagagactagaactcagcacctataccaaagcaatgagaatagtagctcttctagtatctgcaaagacaatgcagacttgttgagcccattaaagaaatggaagtctcgctatctgatggagcagaatgtcaccaagttacttcggcctctgtctccagtcacaccaccccctcccaattcaggctcaaagagtccccagctggccacacctggctcatctcacccaggagaagaggagtgtcgaaatggatacagcctcatgttttcaccagtcacatctcttactactgctagtcgctgcaacactcctctacagtttgagctgtgctgatagaccttccctactcaactcaggtcattctgacctggctcctcatccctccctcggacccacttctgagactggtttcccaagcagaagtggagatggacatcagaccctcgtgagaaactcagaccaggcatttcggacagagttcaacttgatgtatgcctactcccctttgaatgctatgcctcgagcagatggactgtatcgaggatctcctctagtgggggataggaagcctttacatttggatgggggatattgttcccctgcagaaggattttccagcagatatgaacatggcttaatgaaagacctctctcgtggatccttgtcacctggtggtgaaagggcctgtgaaggagtcccatctgccccccagaacccaccacagaggaaaaaagtatccctgctggagtaccgaaaacggaaacaagaagctaaggaaaattctgctggtgggggaggtgactctgcacagagcaaaagcaagtctgcaggagctgggcaaggcagcagtaactccgtttccgacactggtgcccatggtgtgcagggatcctcagcccgaactccatcttcccctcacaaaaaattctccccatctcattcctctatgtcccatttggaggcggtaagcccatcagattccagaggcacttcttcatctcactgcagacctcaagagaatatcagcagtaggtggatggttcccacatcagtagaacgactccgagaaggagggagcatccccaaggtcctccgaagcagcgtgagggtggcccaaaagggagagccctctcccacatgggagagtaacatcacagagaaagactcagaccctgcagatggagaaggcccagagacattaagctcagcactctctaaaggagcaacagtttacagcccttccagatacagctaccagctcctgcagtgtgatagtcctcggacagaatcacaaagcctccttcagcagagttcctcccccttcagaggacatcctacacagtctccaggatacagttatcgaactactgcactgagacctggaaaccccccctctcacggttcttcagaatcatccctctcttccacgtcctattccagccccgcccaccctgtgtccacagactcgttggccccatttacggggacaccagggtattttagcagccagccacattctggaaacagcactggcagcaatcttccaaggaggagctgcccttctagtgctgctagccctaccctgcagggaccctcagactcgccaacctcagattcagtttctcagtccagcacaggaactctgagttccacctcctttcctcagaactctaggtcgtcattgccatcagacttacggactatcagtctgcccagtgctgggcagtcagctgtctaccaggcctccagggtatctgcggtttccaattcacagcactacccacaccgtgggagtgggggtgtgcaccagtaccgactccagccactgcaagggtcaggagtcaagactcagacgggactttcctagggcttctggatttgggcaaacagaactgaatgagcccatagctgcttccttccagctgcctctggaacctaggccgagcatattgctgaggaacggggggtacaaggtgccagaggattgggtctggtggacaagaaacaagacttgtggtcacaattggcctctggccttggagaaagctgtaaatcttgtctgaagcagagactataaagaagtttctccctgctgtcaagggtacattgttgacaagcaaatggtgtttcggttagtaacggttctaagtgcaatgagttgtgttgaagcctccgtctcccatccttgcctgtagcccgtagtcacttgtgcagtgaggacatctttttaaatttaaaaaaaaaaaaaaaaaagttttcaaaggaaaaaaagttaaaagagccaatctcaaagccccaagccatctgagtactgttagggttttatgcacttaagaaaaaaggtaggtatgtaaatgttcatcctaagacaaccattccaaaagcaggtatctggccaatgtgtgtccaccaagaatactgtttatctttgtcttaagatcaccaagaaataggcaaggatagtaaagcttggaacctgcaccaactggagggtgcctggctctttgaagaaaagctcatggtcagctcttgattattcgggagcagattatttgagtagattgtctgagcctccaactgttaccatcctactcccccttcccaagctatttcacagctcagtaacccatgaagtaagtagacaagaaaaggaggaatgagacatgatataggccaattgcattgctacttaccagcttttggcaataaatttcattaggaaggataccgagtggtttgggaatgcttcgaattttattttttctactcccaattaatcaggagttgatgatcccatgagcaggaccgcctccatgattggggagcatgcacttgtgactgcagggtaagagtgggaagataggtttgtggagtggcaccgacaggactgtgattgtgtgtgggcctgccccacatttctctgggggatgcttatgtgagagtgggcccagtgaaagagttaccaagccacccacacccctaacactgttctggatgagagatgagagcagaccggcttctccccatcagtgcattgtgcctgttgtacacccctggaggagccctggagccagcccaggtggggtacacaatctttttaaattccatatggttgccagcttatttctttcacttgtttactgtaatatctggcgtgtttttatttatctaattttgtattcagttataaccatggtaggggtagtgaatatatgacaggtgtaatccctggtgctgcagtggaccttcttttcttttggacaagataatactgtgagtttccctccttccttccctctaatttgttttccttttttccccagcctcttgcatccccttcttttctaccctgtcctacaactatcatatgcacagtcttctctctttgtgtgtgactgttacaaaatttcacttttcaaaatcgaaatcaggtgtttgctcaaatgaggggagatttttttttttttttttttttaaatgctgagacctcagcagagtacttttctttttgttgtttcccccacaaacccatcagtctgggagagcattgggagtggaaatcatgttgcctgggatgctggtttctttgtatattatataaaacgtatgtaaatgtctctccatttgggctggggtttgcattctccccttggctatttaaccaaggggagaggccagcgggcaggcggccctcaccctgcctggcacgtgcagagaccccagccactctgtgtgggcagggtgctgtcaagaccagacctcttgggggggtaggggcgggggggtggggggaactcttggaagggaagaagtatcacttctttctcaagtggagtgtttacaccttgctgtaacatttgaactttcacaagagatgtaataattttgataataaaattcttaaccataataatcataaagttgaga

SEQ ID NO: 303152 - DNA, 7169 bp, Homo sapiens
gcggccgccgcccgcctgcgctcatagactcacgcagccccagtcccgccagtccgccaacacagtagtgccggcccccctctttccctggccctgccccccctccccgcctttggctcgctccgcctttctgccccccacccccacctcacgggtacgggccattcccggccaggaaacgccgtggcgccgcgttgggcctaactcgagtcctgccgcctcccgggagtgccgtgcgccgcagcccgggcccaggccccggcagcgcctgggacaaggtcttcagaactactagcagataatttggggggacttcatattcagaagtctatataaaggattcctcatgtccataacatgttggatgaggctctgcagctcacccccactctcagagtggtcagtctccattaattggaccccgtgatttccaatctctgctgtgttggacgtcatgagcattgcaatccctctgggagtcaccacatcagatacatcctactcagatatggctgctggatcagaccctgaatctgtggaggctagtccagcagttaatgagaagagcgtgtattccactcataattatgggaccactcagaggcatgggtgtcgaggactgccttatgctacgatcatccctcgttctgacctgaatggcctgccgtcgcctgtagaggaacgctgtggagacagcccgaactctgaaggagaaactgtacctacctggtgtccttgtggtctttctcaggatggcttccttctcaactgtgacaagtgcaggggaatgagcagggggaaggttattagacttcatcggcggaagcaggacaacatatcaggtggggatagcagtgcaacagaaagctgggatgaggagctttctccttccactgtgttgtatacagcaacacagcacacacctacaagcatcaccttaactgttagaagaaccaaacccaagaagcggaaaaagagtccagaaaagggtcgtgcagcaccaaagacgaagaaaatcaagaattctccctctgaagcacagaatttagatgagaatacaactgagggctgggaaaatcggataagactatggactgaccagtatgaagaagctttcactaatcagtacagtgcagatgtacagaacgcgcttgaacaacacctacattctagcaaggaatttgtgggcaaacctactattttagacactattaataagactgaattggcctgtaataacacagttattggttcccaaatgcagttacagctgggaagagtcactcgtgttcaaaagcaccggaagatcctgagggctgcaagagatttggctttggacactcttataatagagtatcgtgggaaagtcatgttacgacagcaatttgaggtcaatgggcatttcttcaaaaaaccatacccctttgtgctcttctactcaaaattcaatggtgtagagatgtgtgtggatgcccgtactttcggtaatgatgctcggttcatcagaagatcatgtacaccaaatgcagaggtgcgacacatgattgcagatgggatgattcacctgtgcatctatgctgtgtctgccatcaccaaggatgctgaggtcaccatagcatttgattatgagtatagtaactgtaattataaagtggactgtgcctgtcacaagggaaaccggaattgtcctatacaaaaaaggaatcctaatgctacagaactgccactcctaccacctcctccaagcctacccaccattggagcagagactagacgtagaaaagcacgacggaaagagctagagatggagcagcagaatgaggcttcagaggagaataatgaccagcaatcacaagaagttccagaaaaagtaactgtatccagtgatcatgaggaagtagacaatccagaagaaaaaccagaagaagagaaagaagaggttatagatgaccaggagaacctagctcatagcaggaggaccagggaagatagaaaggtagaagccatcatgcatgcttttgaaaacttagagaaaagaaagaagcggcgggatcagcccttggaacagagcaactctgatgtagagattactacaaccacctcagagactcctgttggtgaagagacaaaaactgaagcccctgaatctgaagttagcaactctgtttcaaatgttaccatcccaagcaccccacagagtgttggtgtgaatacccggaggtcttcccaagcaggggatattgctgcagaaaaactagtccccaagccacctccagcaaagccttctaggccccggccgaagagtcgaatttctcggtacaggaccagttcagcccaaagactaaagcgtcagaagcaggccaatgcacagcaggcagaattgtcacaagctgccttggaagagggaggaagtaacagtttagtaactcctactgaagctggaagtctagacagttcaggagaaaacaggccattaacagggtctgacccaactgtggtgtcaattactggatcccatgtcaaccgtgctgcatctaaataccccaaaaccaaaaagtatctagttacagaatggttgaatgacaaagcagagaagcaagagtgccctgttgagtgccctttacgtatcacaacggatccaactgtactggcaacgaccctaaacatgttaccaggtcttatccattccccgttaatttgcaccacccccaaacactacattcgctttggctcaccctttatccctgagagacgtcgaaggccccttctgcctgatggcacattcagctcctgtaagaagcgctggataaaacaagccttagaagaagggatgactcaaacatcatctgtaccccaagagactagaactcagcacctataccaaagcaatgagaatagtagctcttctagtatctgcaaagacaatgcagacttgttgagcccattaaagaaatggaagtctcgctatctgatggagcagaatgtcaccaagttacttcggcctctgtctccagtcacaccaccccctcccaattcaggctcaaagagtccccagctggccacacctggctcatctcacccaggagaagaggagtgtcgaaatggatacagcctcatgttttcaccagtcacatctcttactactgctagtcgctgcaacactcctctacagtttgagctttgtcaccgaaaagacctggatttggcaaaagtaggataccttgactccaacactaacagctgtgctgatagaccttccctactcaactcaggtcattctgacctggctcctcatccctccctcggacccacttctgagactggtttcccaagcagaagtggagatggacatcagaccctcgtgagaaactcagaccaggcatttcggacagagttcaacttgatgtatgcctactcccctttgaatgctatgcctcgagcagatggactgtatcgaggatctcctctagtgggggataggaagcctttacatttggatgggggatattgttcccctgcagaaggattttccagcagatatgaacatggcttaatgaaagacctctctcgtggatccttgtcacctggtggtgaaagggcctgtgaaggagtcccatctgccccccagaacccaccacagaggaaaaaagtatccctgctggagtaccgaaaacggaaacaagaagctaaggaaaattctgctggtgggggaggtgactctgcacagagcaaaagcaagtctgcaggagctgggcaaggcagcagtaactccgtttccgacactggtgcccatggtgtgcagggatcctcagcccgaactccatcttcccctcacaaaaaattctccccatctcattcctctatgtcccatttggaggcggtaagcccatcagattccagaggcacttcttcatctcactgcagacctcaagagaatatcagcagtaggtggatggttcccacatcagtagaacgactccgagaaggagggagcatccccaaggtcctccgaagcagcgtgagggtggcccaaaagggagagccctctcccacatgggagagtaacatcacagagaaagactcagaccctgcagatggagaaggcccagagacattaagctcagcactctctaaaggagcaacagtttacagcccttccagatacagctaccaggtgagatgagaaattgctggtctctagccataggagtgtgttctgggtcccaaattgtcctggtcatcctttgccattgagatgctgtctttgcatatagtttcagcagccttggaaataagtcatcatctgcttgtcctcaggtaataaattatgccagaagatgaatacggtgatcaaagacagacattttactgcctttggtttcctaaaaagaatacatggttaaaagatgaagaaaaaagaatgtagggtattataaatgttcaccagccatttaagggacttgttcgcgtccttattcgtttcctcccaactttgtctagctcctgcagtgtgatagtcctcggacagaatcacaaagcctccttcagcagagttcctcccccttcagaggacatcctacacagtctccaggatacagttatcgaactactgcactgagacctggaaaccccccctctcacggttcttcagaatcatccctctcttccacgtcctattccagccccgcccaccctgtgtccacagactcgttggccccatttacggggacaccagggtattttagcagccagccacattctggaaacagcactggcagcaatcttccaaggaggagctgcccttctagtgctgctagccctaccctgcagggaccctcagactcgccaacctcagattcagtttctcagtccagcacaggaactctgagttccacctcctttcctcagaactctaggtcgtcattgccatcagacttacggactatcagtctgcccagtgctgggcagtcagctgtctaccaggcctccagggtatctgcggtttccaattcacagcactacccacaccgtgggagtgggggtgtgcaccagtaccgactccagccactgcaagggtcaggagtcaagactcagacgggactttcctagggcttctggatttgggcaaacagaactgaatgagcccatagctgcttccttccagctgcctctggaacctaggccgagcatattgctgaggaacggggggtacaaggtgccagaggattgggtctggtggacaagaaacaagacttgtggtcacaattggcctctggccttggagaaagctgtaaatcttgtctgaagcagagactataaagaagtttctccctgctgtcaagggtacattgttgacaagcaaatggtgtttcggttagtaacggttctaagtgcaatgagttgtgttgaagcctccgtctcccatccttgcctgtagcccgtagtcacttgtgcagtgaggacatctttttaaatttaaaaaaaaaaaaaaaaaagttttcaaaggaaaaaaagttaaaagagccaatctcaaagccccaagccatctgagtactgttagggttttatgcacttaagaaaaaaggtaggtatgtaaatgttcatcctaagacaaccattccaaaagcaggtatctggccaatgtgtgtccaccaagaatactgtttatctttgtcttaagatcaccaagaaataggcaaggatagtaaagcttggaacctgcaccaactggagggtgcctggctctttgaagaaaagctcatggtcagctcttgattattcgggagcagattatttgagtagattgtctgagcctccaactgttaccatcctactcccccttcccaagctatttcacagctcagtaacccatgaagtaagtagacaagaaaaggaggaatgagacatgatataggccaattgcattgctacttaccagcttttggcaataaatttcattaggaaggataccgagtggtttgggaatgcttcgaattttattttttctactcccaattaatcaggagttgatgatcccatgagcaggaccgcctccatgattggggagcatgcacttgtgactgcagggtaagagtgggaagataggtttgtggagtggcaccgacaggactgtgattgtgtgtgggcctgccccacatttctctgggggatgcttatgtgagagtgggcccagtgaaagagttaccaagccacccacacccctaacactgttctggatgagagatgagagcagaccggcttctccccatcagtgcattgtgcctgttgtacacccctggaggagccctggagccagcccaggtggggtacacaatctttttaaattccatatggttgccagcttatttctttcacttgtttactgtaatatctggcgtgtttttatttatctaattttgtattcagttataaccatggtaggggtagtgaatatatgacaggtgtaatccctggtgctgcagtggaccttcttttcttttggacaagataatactgtgagtttccctccttccttccctctaatttgttttccttttttccccagcctcttgcatccccttcttttctaccctgtcctacaactatcatatgcacagtcttctctctttgtgtgtgactgttacaaaatttcacttttcaaaatcgaaatcaggtgtttgctcaaatgaggggagatttttttttttttttttttttaaatgctgagacctcagcagagtacttttctttttgttgtttcccccacaaacccatcagtctgggagagcattgggagtggaaatcatgttgcctgggatgctggtttctttgtatattatataaaacgtatgtaaatgtctctccatttgggctggggtttgcattctccccttggctatttaaccaaggggagaggccagcgggcaggcggccctcaccctgcctggcacgtgcagagaccccagccactctgtgtgggcagggtgctgtcaagaccagacctcttgggggggtaggggcgggggggtggggggaactcttggaagggaagaagtatcacttctttctcaagtggagtgtttacaccttgctgtaacatttgaactttcacaagagatgtaataattttgataataaaattcttaaccataataatcataaagttgaga

SEQ ID NO: 303153 - DNA, 3104 bp, Homo sapiens
  misc_feature (83)..(83): n is a, c, g, or t
agcacaggaactctgagttccacctcctttcctcagaactctaggtcgtcattgccatcagacttacggactatcagtctgcncagtgccgagcagatacagctaccaggtgagatgagaaattgctggtctctagccataggagtgtgttctgggtcccaaattgtcctggtcatcctttgccattgagatgctgtctttgcatatagtttcagcagccttggaaataagtcatcatctgcttgtcctcaggtaataaattatgccagaagatgaatacggtgatcaaagacagacattttactgcctttggtttcctaaaaagaatacatggttaaaagatgaagaaaaaagaatgtagggtattataaatgttcaccagccatttaagggacttgttcgcgtccttattcgtttcctcccaactttgtctagctcctgcagtgtgatagtcctcggacagaatcacaaagcctccttcagcagagttcctcccccttcagaggacatcctacacagtctccaggatacagttatcgaactactgcactgagacctggaaaccccccctctcacggttcttcagaatcatccctctcttccacgtcctattccagccccgcccaccctgtgtccacagactcgttggccccatttacggggacaccagggtattttagcagccagccacattctggaaacagcactggcagcaatcttccaaggaggagctgcccttctagtgctgctagccctaccctgcagggaccctcagactcgccaacctcagattcagtttctcagtccagcacaggaactctgagttccacctcctttcctcagaactctaggtcgtcattgccatcagacttacggactatcagtctgcccagtgctgggcagtcagctgtctaccaggcctccagggtatctgcggtttccaattcacagcactacccacaccgtgggagtgggggtgtgcaccagtaccgactccagccactgcaagggtcaggagtcaagactcagacgggactttcctagggcttctggatttgggcaaacagaactgaatgagcccatagctgcttccttccagctgcctctggaacctaggccgagcatattgctgaggaacggggggtacaaggtgccagaggattgggtctggtggacaagaaacaagacttgtggtcacaattggcctctggccttggagaaagctgtaaatcttgtctgaagcagagactataaagaagtttctccctgctgtcaagggtacattgttgacaagcaaatggtgtttcggttagtaacggttctaagtgcaatgagttgtgttgaagcctccgtctcccatccttgcctgtagcccgtagtcacttgtgcagtgaggacatctttttaaatttaaaaaaaaaaaaaaaaaagttttcaaaggaaaaaaagttaaaagagccaatctcaaagccccaagccatctgagtactgttagggttttatgcacttaagaaaaaaggtaggtatgtaaatgttcatcctaagacaaccattccaaaagcaggtatctggccaatgtgtgtccaccaagaatactgtttatctttgtcttaagatcaccaagaaataggcaaggatagtaaagcttggaacctgcaccaactggagggtgcctggctctttgaagaaaagctcatggtcagctcttgattattcgggagcagattatttgagtagattgtctgagcctccaactgttaccatcctactcccccttcccaagctatttcacagctcagtaacccatgaagtaagtagacaagaaaaggaggaatgagacatgatataggccaattgcattgctacttaccagcttttggcaataaatttcattaggaaggataccgagtggtttgggaatgcttcgaattttattttttctactcccaattaatcaggagttgatgatcccatgagcaggaccgcctccatgattggggagcatgcacttgtgactgcagggtaagagtgggaagataggtttgtggagtggcaccgacaggactgtgattgtgtgtgggcctgccccacatttctctgggggatgcttatgtgagagtgggcccagtgaaagagttaccaagccacccacacccctaacactgttctggatgagagatgagagcagaccggcttctccccatcagtgcattgtgcctgttgtacacccctggaggagccctggagccagcccaggtggggtacacaatctttttaaattccatatggttgccagcttatttctttcacttgtttactgtaatatctggcgtgtttttatttatctaattttgtattcagttataaccatggtaggggtagtgaatatatgacaggtgtaatccctggtgctgcagtggaccttcttttcttttggacaagataatactgtgagtttccctccttccttccctctaatttgttttccttttttccccagcctcttgcatccccttcttttctaccctgtcctacaactatcatatgcacagtcttctctctttgtgtgtgactgttacaaaatttcacttttcaaaatcgaaatcaggtgtttgctcaaatgaggggagatttttttttttttttttttttaaatgctgagacctcagcagagtacttttctttttgttgtttcccccacaaacccatcagtctgggagagcattgggagtggaaatcatgttgcctgggatgctggtttctttgtatattatataaaacgtatgtaaatgtctctccatttgggctggggtttgcattctccccttggctatttaaccaaggggagaggccagcgggcaggcggccctcaccctgcctggcacgtgcagagaccccagccactctgtgtgggcagggtgctgtcaagaccagacctcttgggggggtaggggcgggggggtggggggaactcttggaagggaagaagtatcacttctttctcaagtggagtgtttacaccttgctgtaacatttgaactttcacaagagatgtaataattttgataataaaattcttaaccataataatcataaagttgaga

SEQ ID NO: 303154 - DNA, 2778 bp, Homo sapiens
  misc_feature (83)..(83): n is a, c, g, or t
agcacaggaactctgagttccacctcctttcctcagaactctaggtcgtcattgccatcagacttacggactatcagtctgcncagtgccgagcagatacagctaccagctcctgcagtgtgatagtcctcggacagaatcacaaagcctccttcagcagagttcctcccccttcagaggacatcctacacagtctccaggatacagttatcgaactactgcactgagacctggaaaccccccctctcacggttcttcagaatcatccctctcttccacgtcctattccagccccgcccaccctgtgtccacagactcgttggccccatttacggggacaccagggtattttagcagccagccacattctggaaacagcactggcagcaatcttccaaggaggagctgcccttctagtgctgctagccctaccctgcagggaccctcagactcgccaacctcagattcagtttctcagtccagcacaggaactctgagttccacctcctttcctcagaactctaggtcgtcattgccatcagacttacggactatcagtctgcccagtgctgggcagtcagctgtctaccaggcctccagggtatctgcggtttccaattcacagcactacccacaccgtgggagtgggggtgtgcaccagtaccgactccagccactgcaagggtcaggagtcaagactcagacgggactttcctagggcttctggatttgggcaaacagaactgaatgagcccatagctgcttccttccagctgcctctggaacctaggccgagcatattgctgaggaacggggggtacaaggtgccagaggattgggtctggtggacaagaaacaagacttgtggtcacaattggcctctggccttggagaaagctgtaaatcttgtctgaagcagagactataaagaagtttctccctgctgtcaagggtacattgttgacaagcaaatggtgtttcggttagtaacggttctaagtgcaatgagttgtgttgaagcctccgtctcccatccttgcctgtagcccgtagtcacttgtgcagtgaggacatctttttaaatttaaaaaaaaaaaaaaaaaagttttcaaaggaaaaaaagttaaaagagccaatctcaaagccccaagccatctgagtactgttagggttttatgcacttaagaaaaaaggtaggtatgtaaatgttcatcctaagacaaccattccaaaagcaggtatctggccaatgtgtgtccaccaagaatactgtttatctttgtcttaagatcaccaagaaataggcaaggatagtaaagcttggaacctgcaccaactggagggtgcctggctctttgaagaaaagctcatggtcagctcttgattattcgggagcagattatttgagtagattgtctgagcctccaactgttaccatcctactcccccttcccaagctatttcacagctcagtaacccatgaagtaagtagacaagaaaaggaggaatgagacatgatataggccaattgcattgctacttaccagcttttggcaataaatttcattaggaaggataccgagtggtttgggaatgcttcgaattttattttttctactcccaattaatcaggagttgatgatcccatgagcaggaccgcctccatgattggggagcatgcacttgtgactgcagggtaagagtgggaagataggtttgtggagtggcaccgacaggactgtgattgtgtgtgggcctgccccacatttctctgggggatgcttatgtgagagtgggcccagtgaaagagttaccaagccacccacacccctaacactgttctggatgagagatgagagcagaccggcttctccccatcagtgcattgtgcctgttgtacacccctggaggagccctggagccagcccaggtggggtacacaatctttttaaattccatatggttgccagcttatttctttcacttgtttactgtaatatctggcgtgtttttatttatctaattttgtattcagttataaccatggtaggggtagtgaatatatgacaggtgtaatccctggtgctgcagtggaccttcttttcttttggacaagataatactgtgagtttccctccttccttccctctaatttgttttccttttttccccagcctcttgcatccccttcttttctaccctgtcctacaactatcatatgcacagtcttctctctttgtgtgtgactgttacaaaatttcacttttcaaaatcgaaatcaggtgtttgctcaaatgaggggagatttttttttttttttttttttaaatgctgagacctcagcagagtacttttctttttgttgtttcccccacaaacccatcagtctgggagagcattgggagtggaaatcatgttgcctgggatgctggtttctttgtatattatataaaacgtatgtaaatgtctctccatttgggctggggtttgcattctccccttggctatttaaccaaggggagaggccagcgggcaggcggccctcaccctgcctggcacgtgcagagaccccagccactctgtgtgggcagggtgctgtcaagaccagacctcttgggggggtaggggcgggggggtggggggaactcttggaagggaagaagtatcacttctttctcaagtggagtgtttacaccttgctgtaacatttgaactttcacaagagatgtaataattttgataataaaattcttaaccataataatcataaagttgaga

SEQ ID NO: 303155 - DNA, 4806 bp, Homo sapiens
gcggccgccgcccgcctgcgctcatagactcacgcagccccagtcccgccagtccgccaacacagtagtgccggcccccctctttccctggccctgccccccctccccgcctttggctcgctccgcctttctgccccccacccccacctcacgggtacgggccattcccggccaggaaacgccgtggcgccgcgttgggcctaactcgagtcctgccgcctcccgggagtgccgtgcgccgcagcccgggcccaggccccggcagcgcctgggacaaggtcttcagaactactagcagataatttggggggacttcatattcagaagtctatataaaggattcctcatgtccataacatgttggatgaggctctgcagctcacccccactctcagagtggtcagtctccattaattggaccccgtgatttccaatctctgctgtgttggacgtcatgagcattgcaatccctctgggagtcaccacatcagatacatcctactcagatatggctgctggatcagaccctgaatctgtggaggctagtccagcagttaatgagaagagcgtgtattccactcataattatgggaccactcagaggcatgggtgtcgaggactgccttatgctacgatcatccctcgttctgacctgaatggcctgccgtcgcctgtagaggaacgctgtggagacagcccgaactctgaaggagaaactgtacctacctggtgtccttgtggtctttctcaggatggcttccttctcaactgtgacaagtgcaggggaatgagcagggggaaggttattagacttcatcggcggaagcaggacaacatatcaggtggggatagcagtgcaacagaaagctgggatgaggagctttctccttccactgtgttgtatacagcaacacagcacacacctacaagcatcaccttaactgttagaagaaccaaacccaagaagcggaaaaagagtccagaaaagggtcgtgcagcaccaaagacgaagaaaatcaagaattctccctctgaagcacagaatttagatgagaatacaactgagggctgggaaaatcggataagactatggactgaccagtatgaagaagctttcactaatcagtacagtgcagatgtacagaacgcgcttgaacaacacctacattctagcaaggaatttgtgggcaaacctactattttagacactattaataagactgaattggcctgtaataacacagttattggttcccaaatgcagttacagctgggaagagtcactcgtgttcaaaagcaccggaagatcctgagggctgcaagagatttggctttggacactcttataatagagtatcgtgggaaagtcatgttacgacagcaatttgaggtcaatgggcatttcttcaaaaaaccatacccctttgtgctcttctactcaaaattcaatggtgtagagatgtgtgtggatgcccgtactttcggtaatgatgctcggttcatcagaagatcatgtacaccaaatgcagaggtgcgacacatgattgcagatgggatgattcacctgtgcatctatgctgtgtctgccatcaccaaggatgctgaggtcaccatagcatttgattatgagtatagtaactgtaattataaagtggactgtgcctgtcacaagggaaaccggaattgtcctatacaaaaaaggaatcctaatgctacagaactgccactcctaccacctcctccaagcctacccaccattggagcagagactagacgtagaaaagcacgacggaaagagctagagatggagcagcagaatgaggcttcagaggagaataatgaccagcaatcacaagaagttccagaaaaagtaactgtatccagtgatcatgaggaagtagacaatccagaagaaaaaccagaagaagagaaagaagaggttatagatgaccaggagaacctagctcatagcaggaggaccagggaagatagaaaggtagaagccatcatgcatgcttttgaaaacttagagaaaagaaagaagcggcgggatcagcccttggaacagagcaactctgatgtagagattactacaaccacctcagagactcctgttggtgaagagacaaaaactgaagcccctgaatctgaagttagcaactctgtttcaaatgttaccatcccaagcaccccacagagtgttggtgtgaatacccggaggtcttcccaagcaggggatattgctgcagaaaaactagtccccaagccacctccagcaaagccttctaggccccggccgaagagtcgaatttctcggtacaggaccagttcagcccaaagactaaagcgtcagaagcaggccaatgcacagcaggcagaattgtcacaagctgccttggaagagggaggaagtaacagtttagtaactcctactgaagctggaagtctagacagttcaggagaaaacaggccattaacagggtctgacccaactgtggtgtcaattactggatcccatgtcaaccgtgctgcatctaaataccccaaaaccaaaaagtatctagttacagaatggttgaatgacaaagcagagaagcaagagtgccctgttgagtgccctttacgtatcacaacggatccaactgtactggcaacgaccctaaacatgttaccaggtcttatccattccccgttaatttgcaccacccccaaacactacattcgctttggctcaccctttatccctgagagacgtcgaaggccccttctgcctgatggagcccatagctgcttccttccagctgcctctggaacctaggccgagcatattgctgaggaacggggggtacaaggtgccagaggattgggtctggtggacaagaaacaagacttgtggtcacaattggcctctggccttggagaaagctgtaaatcttgtctgaagcagagactataaagaagtttctccctgctgtcaagggtacattgttgacaagcaaatggtgtttcggttagtaacggttctaagtgcaatgagttgtgttgaagcctccgtctcccatccttgcctgtagcccgtagtcacttgtgcagtgaggacatctttttaaatttaaaaaaaaaaaaaaaaaagttttcaaaggaaaaaaagttaaaagagccaatctcaaagccccaagccatctgagtactgttagggttttatgcacttaagaaaaaaggtaggtatgtaaatgttcatcctaagacaaccattccaaaagcaggtatctggccaatgtgtgtccaccaagaatactgtttatctttgtcttaagatcaccaagaaataggcaaggatagtaaagcttggaacctgcaccaactggagggtgcctggctctttgaagaaaagctcatggtcagctcttgattattcgggagcagattatttgagtagattgtctgagcctccaactgttaccatcctactcccccttcccaagctatttcacagctcagtaacccatgaagtaagtagacaagaaaaggaggaatgagacatgatataggccaattgcattgctacttaccagcttttggcaataaatttcattaggaaggataccgagtggtttgggaatgcttcgaattttattttttctactcccaattaatcaggagttgatgatcccatgagcaggaccgcctccatgattggggagcatgcacttgtgactgcagggtaagagtgggaagataggtttgtggagtggcaccgacaggactgtgattgtgtgtgggcctgccccacatttctctgggggatgcttatgtgagagtgggcccagtgaaagagttaccaagccacccacacccctaacactgttctggatgagagatgagagcagaccggcttctccccatcagtgcattgtgcctgttgtacacccctggaggagccctggagccagcccaggtggggtacacaatctttttaaattccatatggttgccagcttatttctttcacttgtttactgtaatatctggcgtgtttttatttatctaattttgtattcagttataaccatggtaggggtagtgaatatatgacaggtgtaatccctggtgctgcagtggaccttcttttcttttggacaagataatactgtgagtttccctccttccttccctctaatttgttttccttttttccccagcctcttgcatccccttcttttctaccctgtcctacaactatcatatgcacagtcttctctctttgtgtgtgactgttacaaaatttcacttttcaaaatcgaaatcaggtgtttgctcaaatgaggggagatttttttttttttttttttttaaatgctgagacctcagcagagtacttttctttttgttgtttcccccacaaacccatcagtctgggagagcattgggagtggaaatcatgttgcctgggatgctggtttctttgtatattatataaaacgtatgtaaatgtctctccatttgggctggggtttgcattctccccttggctatttaaccaaggggagaggccagcgggcaggcggccctcaccctgcctggcacgtgcagagaccccagccactctgtgtgggcagggtgctgtcaagaccagacctcttgggggggtaggggcgggggggtggggggaactcttggaagggaagaagtatcacttctttctcaagtggagtgtttacaccttgctgtaacatttgaactttcacaagagatgtaataattttgataataaaattcttaaccataataatcataaagttgaga

SEQ ID NO: 303156 - DNA, 4822 bp, Homo sapiens
gcggccgccgcccgcctgcgctcatagactcacgcagccccagtcccgccagtccgccaacacagtagtgccggcccccctctttccctggccctgccccccctccccgcctttggctcgctccgcctttctgccccccacccccacctcacgggtacgggccattcccggccaggaaacgccgtggcgccgcgttgggcctaactcgagtcctgccgcctcccgggagtgccgtgcgccgcagcccgggcccaggccccggcagcgcctgggacaaggtcttcagaactactagcagataatttggggggacttcatattcagaagtctatataaaggattcctcatgtccataacatgttggatgaggctctgcagctcacccccactctcagagtggtcagtctccattaattggaccccgtgatttccaatctctgctgtgttggacgtcatgagcattgcaatccctctgggagtcaccacatcagatacatcctactcagatatggctgctggatcagaccctgaatctgtggaggctagtccagcagttaatgagaagagcgtgtattccactcataattatgggaccactcagaggcatgggtgtcgaggactgccttatgctacgatcatccctcgttctgacctgaatggcctgccgtcgcctgtagaggaacgctgtggagacagcccgaactctgaaggagaaactgtacctacctggtgtccttgtggtctttctcaggatggcttccttctcaactgtgacaagtgcaggggaatgagcagggggaaggttattagacttcatcggcggaagcaggacaacatatcaggtggggatagcagtgcaacagaaagctgggatgaggagctttctccttccactgtgttgtatacagcaacacagcacacacctacaagcatcaccttaactgttagaagaaccaaacccaagaagcggaaaaagagtccagaaaagggtcgtgcagcaccaaagacgaagaaaatcaagaattctccctctgaagcacagaatttagatgagaatacaactgagggctgggaaaatcggataagactatggactgaccagtatgaagaagctttcactaatcagtacagtgcagatgtacagaacgcgcttgaacaacacctacattctagcaaggaatttgtgggcaaacctactattttagacactattaataagactgaattggcctgtaataacacagttattggttcccaaatgcagttacagctgggaagagtcactcgtgttcaaaagcaccggaagatcctgagggctgcaagagatttggctttggacactcttataatagagtatcgtgggaaagtcatgttacgacagcaatttgaggtcaatgggcatttcttcaaaaaaccatacccctttgtgctcttctactcaaaattcaatggtgtagagatgtgtgtggatgcccgtactttcggtaatgatgctcggttcatcagaagatcatgtacaccaaatgcagaggtgcgacacatgattgcagatgggatgattcacctgtgcatctatgctgtgtctgccatcaccaaggatgctgaggtcaccatagcatttgattatgagtatagtaactgtaattataaagtggactgtgcctgtcacaagggaaaccggaattgtcctatacaaaaaaggaatcctaatgctacagaactgccactcctaccacctcctccaagcctacccaccattggagcagagactagacgtagaaaagcacgacggaaagagctagagatggagcagcagaatgaggcttcagaggagaataatgaccagcaatcacaagaagttccagaaaaagtaactgtatccagtgatcatgaggaagtagacaatccagaagaaaaaccagaagaagagaaagaagaggttatagatgaccaggagaacctagctcatagcaggaggaccagggaagatagaaaggtagaagccatcatgcatgcttttgaaaacttagagaaaagaaagaagcggcgggatcagcccttggaacagagcaactctgatgtagagattactacaaccacctcagagactcctgttggtgaagagacaaaaactgaagcccctgaatctgaagttagcaactctgtttcaaatgttaccatcccaagcaccccacagagtgttggtgtgaatacccggaggtcttcccaagcaggggatattgctgcagaaaaactagtccccaagccacctccagcaaagccttctaggccccggccgaagagtcgaatttctcggtacaggaccagttcagcccaaagactaaagcgtcagaagcaggccaatgcacagcaggcagaattgtcacaagctgccttggaagagggaggaagtaacagtttagtaactcctactgaagctggaagtctagacagttcaggagaaaacaggccattaacagggtctgacccaactgtggtgtcaattactggatcccatgtcaaccgtgctgcatctaaataccccaaaaccaaaaagtatctagttacagaatggttgaatgacaaagcagagaagcaagagtgccctgttgagtgccctttacgtatcacaacggatccaactgtactggcaacgaccctaaacatgttaccaggtcttatccattccccgttaatttgcaccacccccaaacactacattcgctttggctcaccctttatccctgagagacgtcgaaggccccttctgcctgatggcacattcagctcctgtaagaagcgctggataaaacaagccttagaagaagggatgactcaaacatcatctgtaccccaagagactagaactcagcacctataccaaagcaatgagaatagtagctcttctagtatctgcaaagacaatgcagacttgttgagcccattaaagaaatggaagtctcgctatctgatggagcagaatgtcaccaagttacttcggcctctgtctccagtcacaccaccccctcccaattcaggctcaaagagtccccagctggccacacctggctcatctcacccaggagaagaggagtgtcgaaatggatacagcctcatgttttcaccagtcacatctcttactactgctagtcgctgcaacactcctctacagtttgagctttgtcaccgaaaagacctggatttggcaaaagtaggataccttgactccaacactaacagctgtgctgatagaccttccctactcaactcaggtcattctgacctggctcctcatccctccctcggacccacttctgagactggtttcccaagcagaagtggagatggacatcagaccctcgtgagaaactcagaccaggcatttcggacagagttcaacttgatgtatgcctactcccctttgaatgctatgcctcgagcagatggactgtatcgaggatctcctctagtgggggataggaagcctttacatttggatgggggatattgttcccctgcagaaggattttccagcagatatgaacatggcttaatgaaagacctctctcgtggatccttgtcacctggtggtgaaagggcctgtgaaggagtcccatctgccccccagaacccaccacagaggaaaaaagtatccctgctggagtaccgaaaacggaaacaagaagctaaggaaaattctgctggtgggggaggtgactctgcacagagcaaaagcaagtctgcaggagctgggcaaggcagcagtaactccgtttccgacactggtgcccatggtgtgcagggatcctcagcccgaactccatcttcccctcacaaaaaattctccccatctcattcctctatgtcccatttggaggcggtaagcccatcagattccagaggcacttcttcatctcactgcagacctcaagagaatatcagcagtaggtggatggttcccacatcagtagaacgactccgagaaggagggagcatccccaaggtcctccgaagcagcgtgagggtggcccaaaagggagagccctctcccacatgggagagtaacatcacagagaaagactcagaccctgcagatggagaaggcccagagacattaagctcagcactctctaaaggagcaacagtttacagcccttccagatacagctaccagctcctgcagtgtgatagtcctcggacagaatcacaaagcctccttcagcagagttcctcccccttcagaggacatcctacacagtctccaggatacagttatcgaactactgcactgagacctggaaaccccccctctcacggttcttcagaatcatccctctcttccacgtcctattccagccccgcccaccctgtgtccacagactcgttggccccatttacggggacaccagggtattttagcagccagccacattctggaaacagcactggcagcaatcttccaaggaggagctgcccttctagtgctgctagccctaccctgcagggaccctcagactcgccaacctcagattcagtttctcagtccagcacaggaactctgagttccacctcctttcctcagaactctaggtcgtcattgccatcagacttacggactatcagtctgcccagtgctgggcagtcagctgtctaccaggcctccagggtatctgcggtttccaattcacagcactacccacaccgtgggagtgggggtgtgcaccagtaccgactccagccactgcaagggtcaggagtcaagacttacttggtcctttccagtggctttggaaccaggccggcattttggtgggaacggggg

SEQ ID NO: 303157 - DNA, 3265 bp, Homo sapiens
gcggccgccgcccgcctgcgctcatagactcacgcagccccagtcccgccagtccgccaacacagtagtgccggcccccctctttccctggccctgccccccctccccgcctttggctcgctccgcctttctgccccccacccccacctcacgggtacgggccattcccggccaggaaacgccgtggcgccgcgttgggcctaactcgagtcctgccgcctcccgggagtgccgtgcgccgcagcccgggcccaggccccggcagcgcctgggacaaggtcttcagaactactagcagataatttggggggacttcatattcagaagtctatataaaggattcctcatgtccataacatgttggatgaggctctgcagctcacccccactctcagagtggtcagtctccattaattggaccccgtgatttccaatctctgctgtgttggacgtcatgagcattgcaatccctctgggagtcaccacatcagatacatcctactcagatatggctgctggatcagaccctgaatctgtggaggctagtccagcagttaatgagaagagcgtgtattccactcataattatgggaccactcagaggcatgggtgtcgaggactgccttatgctacgatcatccctcgttctgacctgaatggcctgccgtcgcctgtagaggaacgctgtggagacagcccgaactctgaaggagaaactgtacctacctggtgtccttgtggtctttctcaggatggcttccttctcaactgtgacaagtgcaggggaatgagcagggggaaggttattagacttcatcggcggaagcaggacaacatatcaggtggggatagcagtgcaacagaaagctgggatgaggagctttctccttccactgtgttgtatacagcaacacagcacacacctacaagcatcaccttaactgttagaagaaccaaacccaagaagcggaaaaagagtccagaaaagggtcgtgcagcaccaaagacgaagaaaatcaagaattctccctctgaagcacagaatttagatgagaatacaactgagggctgggaaaatcggataagactatggactgaccagtatgaagaagctttcactaatcagtacagtgcagatgtacagaacgcgcttgaacaacacctacattctagcaaggaatttgtgggcaaacctactattttagacactattaataagactgaattggcctgtaataacacagttattggttcccaaatgcagttacagctgggaagagtcactcgtgttcaaaagcaccggaagatcctgagggctgcaagagatttggctttggacactcttataatagagtatcgtgggaaagtcatgttacgacagcaatttgaggtcaatgggcatttcttcaaaaaaccatacccctttgtgctcttctactcaaaattcaatggtgtagagatgtgtgtggatgcccgtactttcggtaatgatgctcggttcatcagaagatcatgtacaccaaatgcagaggtgcgacacatgattgcagatgggatgattcacctgtgcatctatgctgtgtctgccatcaccaaggatgctgaggtcaccatagcatttgattatgagtatagtaactgtaattataaagtggactgtgcctgtcacaagggaaaccggaattgtcctatacaaaaaaggaatcctaatgctacagaactgccactcctaccacctcctccaagcctacccaccattggagcagagactagacgtagaaaagcacgacggaaagagctagagatggagcagcagaatgaggcttcagaggagaataatgaccagcaatcacaagaagttccagaaaaagtaactgtatccagtgatcatgaggaagtagacaatccagaagaaaaaccagaagaagagaaagaagaggttatagatgaccaggagaacctagctcatagcaggaggaccagggaagatagaaaggtagaagccatcatgcatgcttttgaaaacttagagaaaagaaagaagcggcgggatcagcccttggaacagagcaactctgatgtagagattactacaaccacctcagagactcctgttggtgaagagacaaaaactgaagcccctgaatctgaagttagcaactctgtttcaaatgttaccatcccaagcaccccacagagtgttggtgtgaatacccggaggtcttcccaagcaggggatattgctgcagaaaaactagtccccaagccacctccagcaaagccttctaggccccggccgaagagtcgaatttctcggtacaggaccagttcagcccaaagactaaagcgtcagaagcaggccaatgcacagcaggcagaattgtcacaagctgccttggaagagggaggaagtaacagtttagtaactcctactgaagctggaagtctagacagttcaggagaaaacaggccattaacagggtctgacccaactgtggtgtcaattactggatcccatgtcaaccgtgctgcatctaaataccccaaaaccaaaaagtatctagttacagaatggttgaatgacaaagcagagaagcaagagtgccctgttgagtgccctttacgtatcacaacggatccaactgtactggcaacgaccctaaacatgttaccaggtcttatccattccccgttaatttgcaccacccccaaacactacattcgctttggctcaccctttatccctgagagacgtcgaaggccccttctgcctgatggcacattcagctcctgtaagaagcgctggataaaacaagccttagaagaagggatgactcaaacatcatctgtaccccaagagactagaactcagcacctataccaaagcaatgagaatagtagctcttctagtatctgcaaagacaatgcagacttgttgagcccattaaagaaatggaagtctcgctatctgatggagcagaatgtcaccaagttacttcggcctctgtctccagtcacaccaccccctcccaattcaggctcaaagagtccccagctggccacacctggctcatctcacccaggagaagaggagtgtcgaaatggatacagcctcatgttttcaccagtcacatctcttactactgctagtcgctgcaacactcctctacagtttgaggtgatttgggtttggttgctgggagtgctggatatgaaaatcatcatttgtaccttctcatttcaaatataataccattccaaaaaa

SEQ ID NO: 303158 - DNA, 3378 bp, Homo sapiens
gcggccgccgcccgcctgcgctcatagactcacgcagccccagtcccgccagtccgccaacacagtagtgccggcccccctctttccctggccctgccccccctccccgcctttggctcgctccgcctttctgccccccacccccacctcacgggtacgggccattcccggccaggaaacgccgtggcgccgcgttgggcctaactcgagtcctgccgcctcccgggagtgccgtgcgccgcagcccgggcccaggccccggcagcgcctgggacaaggtcttcagaactactagcagataatttggggggacttcatattcagaagtctatataaaggattcctcatgtccataacatgttggatgaggctctgcagctcacccccactctcagagtggtcagtctccattaattggaccccgtgatttccaatctctgctgtgttggacgtcatgagcattgcaatccctctgggagtcaccacatcagatacatcctactcagatatggctgctggatcagaccctgaatctgtggaggctagtccagcagttaatgagaagagcgtgtattccactcataattatgggaccactcagaggcatgggtgtcgaggactgccttatgctacgatcatccctcgttctgacctgaatggcctgccgtcgcctgtagaggaacgctgtggagacagcccgaactctgaaggagaaactgtacctacctggtgtccttgtggtctttctcaggatggcttccttctcaactgtgacaagtgcaggggaatgagcagggggaaggttattagacttcatcggcggaagcaggacaacatatcaggtggggatagcagtgcaacagaaagctgggatgaggagctttctccttccactgtgttgtatacagcaacacagcacacacctacaagcatcaccttaactgttagaagaaccaaacccaagaagcggaaaaagagtccagaaaagggtcgtgcagcaccaaagacgaagaaaatcaagaattctccctctgaagcacagaatttagatgagaatacaactgagggctgggaaaatcggataagactatggactgaccagtatgaagaagctttcactaatcagtacagtgcagatgtacagaacgcgcttgaacaacacctacattctagcaaggaatttgtgggcaaacctactattttagacactattaataagactgaattggcctgtaataacacagttattggttcccaaatgcagttacagctgggaagagtcactcgtgttcaaaagcaccggaagatcctgagggctgcaagagatttggctttggacactcttataatagagtatcgtgggaaagtcatgttacgacagcaatttgaggtcaatgggcatttcttcaaaaaaccatacccctttgtgctcttctactcaaaattcaatggtgtagagatgtgtgtggatgcccgtactttcggtaatgatgctcggttcatcagaagatcatgtacaccaaatgcagaggtgcgacacatgattgcagatgggatgattcacctgtgcatctatgctgtgtctgccatcaccaaggatgctgaggtcaccatagcatttgattatgagtatagtaactgtaattataaagtggactgtgcctgtcacaagggaaaccggaattgtcctatacaaaaaaggaatcctaatgctacagaactgccactcctaccacctcctccaagcctacccaccattggagcagagactagacgtagaaaagcacgacggaaagagctagagatggagcagcagaatgaggcttcagaggagaataatgaccagcaatcacaagaagttccagaaaaagtaactgtatccagtgatcatgaggaagtagacaatccagaagaaaaaccagaagaagagaaagaagaggttatagatgaccaggagaacctagctcatagcaggaggaccagggaagatagaaaggtagaagccatcatgcatgcttttgaaaacttagagaaaagaaagaagcggcgggatcagcccttggaacagagcaactctgatgtagagattactacaaccacctcagagactcctgttggtgaagagacaaaaactgaagcccctgaatctgaagttagcaactctgtttcaaatgttaccatcccaagcaccccacagagtgttggtgtgaatacccggaggtcttcccaagcaggggatattgctgcagaaaaactagtccccaagccacctccagcaaagccttctaggccccggccgaagagtcgaatttctcggtacaggaccagttcagcccaaagactaaagcgtcagaagcaggccaatgcacagcaggcagaattgtcacaagctgccttggaagagggaggaagtaacagtttagtaactcctactgaagctggaagtctagacagttcaggagaaaacaggccattaacagggtctgacccaactgtggtgtcaattactggatcccatgtcaaccgtgctgcatctaaataccccaaaaccaaaaagtatctagttacagaatggttgaatgacaaagcagagaagcaagagtgccctgttgagtgccctttacgtatcacaacggatccaactgtactggcaacgaccctaaacatgttaccaggtcttatccattccccgttaatttgcaccacccccaaacactacattcgctttggctcaccctttatccctgagagacgtcgaaggccccttctgcctgatggcacattcagctcctgtaagaagatctggattcaggctgccttcctcagtgtctgccattgccctcctccactggcatcacgtacatgaggatgctgcatgtagattatttgatgtgatgaagtctccaactccagcgctggataaaacaagccttagaagaagggatgactcaaacatcatctgtaccccaagagactagaactcagcacctataccaaagcaatgagaatagtagctcttctagtatctgcaaagacaatgcagacttgttgagcccattaaagaaatggaagtctcgctatctgatggagcagaatgtcaccaagttacttcggcctctgtctccagtcacaccaccccctcccaattcaggctcaaagagtccccagctggccacacctggctcatctcacccaggagaagaggagtgtcgaaatggatacagcctcatgttttcaccagtcacatctcttactactgctagtcgctgcaacactcctctacagtttgaggtgatttgggtttggttgctgggagtgctggatatgaaaatcatcatttgtaccttctcatttcaaatataataccattccaaaaaa

SEQ ID NO: 303159 - DNA, 1615 bp, Homo sapiens
gcggccgccgcccgcctgcgctcatagactcacgcagccccagtcccgccagtccgccaacacagtagtgccggcccccctctttccctggccctgccccccctccccgcctttggctcgctccgcctttctgccccccacccccacctcacgggtacgggccattcccggccaggaaacgccgtggcgccgcgttgggcctaactcgagtcctgccgcctcccgggagtgccgtgcgccgcagcccgggcccaggccccggcagcgcctgggacaaggtcttcagaactactagcagataatttggggggacttcatattcagaagtctatataaaggattcctcatgtccataacatgttggatgaggctctgcagctcacccccactctcagagtggtcagtctccattaattggaccccgtgatttccaatctctgctgtgttggacgtcatgagcattgcaatccctctgggagtcaccacatcagatacatcctactcagatatggctgctggatcagaccctgaatctgtggaggctagtccagcagttaatgagaagagcgtgtattccactcataattatgggaccactcagaggcatgggtgtcgaggactgccttatgctacgatcatccctcgttctgacctgaatggcctgccgtcgcctgtagaggaacgctgtggagacagcccgaactctgaaggagaaactgtacctacctggtgtccttgtggtctttctcaggatggcttccttctcaactgtgacaagtgcaggggaatgagcagggggaaggttattagacttcatcggcggaagcaggacaacatatcaggtggggatagcagtgcaacagaaagctgggatgaggagctttctccttccactgtgttgtatacagcaacacagcacacacctacaagcatcaccttaactgttagaagaaccaaacccaagaagcggaaaaagagtccagaaaagggtcgtgcagcaccaaagacgaagaaaatcaagaattctccctctgaagcacagaatttagatgagaatacaactgagggctgggaaaatcggataagactatggactgaccagtatgaagaagctttcactaatcagtacagtgcagatgtacagaacgcgcttgaacaacacctacattctagcaaggaatttgtgggcaaacctactattttagacactattaataagactgaattggcctgtaataacacagttattggttcccaaatgcaggtaagcaccaaagggttgaggactctctaagtagctgaaattttaagaacccaggaagagggtaatggattggaattactgttccttccaaatgtacaaggccatggaataacagattagccaggtgttgatcatatgtaaccaaaagtaggttatattaactggaaactacctggatacatatttttaaactacctttattaataaaaaaatagatgaattgaggctgtgtgcagtgcagtggctcactcctataatacaacactttggcaagaagccaaggtggaaggattgcttgaggccagcagttcaagaccagcctgtacaacatagtgagaccctctctttaca

SEQ ID NO: 303160 - DNA, 616 bp, Homo sapiens
ctgatgtctcttctgagaacccttgaggttcctgagtgagagcacacagcagtggatgactgggtagagacggatatgttttgtgtgtgctcttgtgatatgggttaacatgtccatttatgattattgtgtgagattaggccctgggtcctctagaacactgttgcataaatgaaaaaaattaaattgttttgaatcaattcaaccgttattatccactatcatcacttgaaggaaattagaggaaaaatcctattgtaattggcataattcctgttccttgatcaaatgacaagtcggactgtttattccaagagaatacagaatctaccctaaaagactctctttccctctctgtttctgcctctttctcctctttccagttacttactgtttttggatctagtggcagtagcgtttggtggtgtttttggaatgctctttcttaattcccagaagccctgcatattttccaaaggtgtctcttaggaatagatcactccctcagatctatgatgtcgttttccatgtttctagaagtataggacaccctttcatttggtcttcctttgaggtagagtctgttccctggaacacccttttctcttatcctcag

SEQ ID NO: 303161 - DNA, 432 bp, Homo sapiens
tgtgaatacccggaggtcttcccaagcaggggtaagagttgaaaagacttcagcacttagacatcctcacctttgctaatgtcaatacctaacttttggaatttttaaaatcagtgttttcagctttgctccatatcacaataaataaggccattaactgtttaactggaaccatttcattggcctattttataaatgcttattagaaataacgcaaacatttgtcgctagcctctttagctcatttaagtgtatacatttttgtatttaaaaattagattttaaattagtgtttctaatccttatatttttcatcagtagacattctgaatgcttaaagtgaataggaaattagactgtttgctgataaaacatttctggtaagcatctgaccctactattgctacaggatattgctgcagaaaaactagt

SEQ ID NO: 303162 - DNA, 641 bp, Homo sapiens
tgttcagtattttatctgaaatttaataatggatattgtacagcctaaggaattaaaagaaaaaggaccctttgagaaaatggcttgttcttatgtatcttaatatatactgtgttcactttatgttttgtcagacactgaaattgaggaagagagattttggcgttctgttggtttatggagagagttgatcagagattgctccttggctgagttgctgtctgcataggctgttaacaattgtttctctggcagcagatcttgttcatcaggattgcatcatttctgggagaatggccaaggtccacagcctcaatacaaagactgtctgaagcatatgaggcctgttctctttctgaagcggcactcctcttcctgccagtcctcttcacaggattactgaagcagacttgttctgaatttctttcgttggattggttgtttattggacttttgtctgccagctgcttccgcctcacctgtctgatgcaatttcttcttctgaaatctgttggaattgttcataaaacactttttgtttgtcttctctgtgagtgaccagggagatcatacaggtcttgtgctttcagcaagtcatatagagaagagactgtcagaatgatgatacagagactgttggc

SEQ ID NO: 303163 - DNA, 590 bp, Homo sapiens
gcctcaatacaaagactgtctgaagcatatgaggcctgttctctttctgaagcggcactcctcttcctgccagtcctcttcacaggattactgaagcagacttgttctgaatttctttcgttggattggttgtttattggacttttgtctgccagctgcttccgcctcacctgtctgatgcaatttcttcttctgaaatctgttggaattgttcataaaacactttttgtttgtcttctctgtgagtgaccagggagatcatacaggtcttgtgctttcagcaagtcatatagagaagagactgtcagaatgatgatacagagactgttggccatttctgaaaccaattaaaaagatggggtaattaagaaacatttctggcatgttctatttaacatccttttccctagaaactgtatgtaaatggcacctcctaaagagagtactcggtactactggaagatacaggctgtgtctgtttctgaatccaagaacttactagtgttcctgtggattctgatggattgttctggaaatagttaaattaataataaattgaaactgtgatgcattcatttaccccctactgt

SEQ ID NO: 303164 - DNA, 351 bp, Homo sapiens
actaaccctaatcgcccatatgtaccatactttaggggagagaggggccagtgtttggacactgttgatttaaaaaatcttattttcaggatcataattacggagcccctcctcctccgacacctcctgcttctccccctgtccagacgatcatccctcgttctgacctgaatggcctgccgtcgcctgtagaggaacgctgtggagacagcccgaactctgaaggagaaactgtacctacctggtgtccttgtggtctttctcaggatggcttccttctcaactgtgacaagtgcaggtaagatcctgttccatctaaattaagtctgggttgctgggattagggtttct

SEQ ID NO: 303165 - DNA, 556 bp, Homo sapiens
aatggtgacacctcctttccaagccaagcattccttgctttgtgcttgttctttaatcaaaagcagacaaacgtgatgctttcccaagtttaggcgttgcaaaagactgctgctgcttctctcagcatatgcttcatatttggagtcatggggtggccttcttatttgtgttgagaattacaggaattttaattgtatccctagaccatacccctttgtgctcttctactcaaaattcaatggtgtagagatgtgtgtggatgcccgtactttcggtaatgatgctcggttcatcagaagatcatgtacaccaaatgcagaggtaagatatctgtagcaacttccctttgactggaaccatcaaatgacaagcttactgaagaagcagtgtgaaaacttcactcagataaaggtctgtagataatagtcgtgatatttcatcgtgggaggtgaaaaacaaaagtaatggtgcttttatacgacaaaatgggcgcaaggaaagagttttctttagagaaggcagaaatagaaaagagcaagttagcatttgctaagg

SEQ ID NO: 303166 - DNA, 469 bp, Homo sapiens
tcaaatgtttcatgttcattaatctatgaaacctttattaaaccagtactgtgtatcaggcacatgatttcctaaaggagaaattttaacattttaaatgggggttaagggaagttaacatctttaacccactttttccttgatttctttttctttaaaagtggttgttgttgatgtttctcttttgtgcctgacatagttggaggcagaggaaatacgttgttttaaattggttctgaagaaagtaatgtttaagaggatgttttaagaaaatacactgtgcactggttagggcttcatttgttttggttaagtcctgtggcttgaacttgcaccctgttgcctttacaggatggttcccacatcagtagaacgactccgagaaggagggagcatccccaaggtcctccgaagcagcgtgagggtggcccaaaagggagagccctctcccacatgggagagtaacatc

SEQ ID NO: 303167 - DNA, 461 bp, Homo sapiens
tcttattcaacttccccgcccccgaaaaaagttatggctaacatctatgcttgcttttattttttgttttgttttgcttcttgacttcgagtagatgaataataacaagatgcttttccctcctctagaacatatcctcccctgagagttcccctgcgcataggcccgagtccctgtcacccgaggtagttatcacaccatctcaatcacacttggaggctgagagtgagtgttcatgaatgtgttcctgagtgtgtggggagggctggggatctgagtcagtggggtgatgggctggagggcggccactcagtcacagtaagttgaatgagtcttcctgtgtgactgtgactacacaggactgtcaatgtagatggaggaaaatgaaggtaggagcgtgtgtgtttgtgtgtgtgtgtgttgtgtgtgtgtttggtggggttggtttttgccgtttgggg

SEQ ID NO: 303168 - DNA, 405 bp, Homo sapiens
atgtacatttaaaacaggtgcactaaatagttttaggtaattattgataattctctggttcttttcaattatagcgctggataaaacaagccttagaagaagggatgactcaaacatcatctgtaccccaagagactagaactcagcacctataccaaagcaatgagaatagtagctcttctagtatctgcaaagacaatgcaggtacgtatctaaaacctttctgattatatgaccaatgattgtttcaggtctgcataaaaaatttaagtatgagtatttctgatacaaaaagaaatggcgtgttttctaaatagttactttacatctgtctttacagaggaagagagagatctcaagtcagggatcagttttcccaggacgacaaagaaggactagacagtg

SEQ ID NO: 303169 - DNA, 532 bp, Homo sapiens
tgaagagaaagaagacgggaatcacatcaggcatttagaacatagcccataattaaccactcattttgcccttctggcatgctgcactcacccaatttgtcacaaagagagcagtacgggttggtgatggcactggtgatttaaatgaaaaatggctctttcttacttattctaagaagccaagttgatttttttttatatatgttaccttccagaccctgcagatggagaaggcccagagacattaagctcagcactctctaaaggagcaacagtttacagcccttccagatacagctaccaggtgagatgagaaattgctggtctctagccataggagtgtgttctgggtcccaaattgtcctggtcatcctttgccattgagatgctgtctttgcatatagtttcagcagccttggaaataagtcatcatctgcttgtcctcaggtaataaattatgccagaagatgaatacggtgatcaaagacagacattttactgcctttggtttcctaaaaagaatacatggtta

SEQ ID NO: 303170 - DNA, 431 bp, Homo sapiens
ttgagctaatagatcttttaccactaaaagagcattattctcatgtcataatgagaataataatttacatacttggcataataaatgcctaaaagacattttattttctgaatctatttttttcttgctataatggggatattgtaaattatgcatttgtattaatggtatttcttaaagcaatctatgtaactgtaaattaaaccaatctacaaactattgtaggcatctgtaaattctgttgtaggtattataaactttgttgaagtcttaatcagcagattatgttgtgaatatatttgtacattgttaaaatagtttttaagattatttgtttaattgaataagtgtcttattggagtgatagctttgaaggtgcaaaactttatatttgtataaaattctactatttacaaggcatttgacatgtg

SEQ ID NO: 303171 - DNA, 3368 bp, Homo sapiens
tgcgtcatcacgtcgcgcggccgcaggggccagacccggacggctccagagcctccagagcctccgggtctgggcggcgcttcggctcctcccgagccgcctgctagccccgcgccgcactccatccccacaggctggggacgggcccggtgcggctgtgtgggttcgggagcggagttgcagaatccaaggacccattttgttctttctccgcactgctttatgggaggcattatggcccccaaagacataatgacaaatactcatgctaaatccatcctcaattcaatgaactccctcaggaagagcaataccctctgtgatgtgacattgagagtagagcagaaagacttccctgcccatcggattgtgctggctgcctgtagtgattacttctgtgccatgttcactagtgagctctcagagaaggggaaaccttatgttgacatccaaggtttgactgcctctaccatggaaattttattggactttgtgtacacagaaacagtacatgtgacagtggagaatgtacaagaactgcttcctgcagcctgtctgcttcagttgaaaggtgtgaaacaagcctgctgtgagttcttagaaagtcagttggacccttctaattgcctgggtattagggattttgctgaaacccacaattgtgttgacctgatgcaagcagctgaggtttttagccagaagcattttcctgaagtggtacagcatgaagagttcattcttctgagtcaaggagaggtggaaaagctaatcaagtgcgacgaaattcaggtggattctgaagagccagtctttgaggctgtcatcaactgggtgaagcatgccaagaaagagcgggaagaatccttgcctaacctgctacagtatgtgcggatgcccctactaacccccaggtatatcacagatgtaatagatgctgagcctttcatccgctgtagtttacaatgcagggatctggttgatgaagcaaagaagtttcatctgaggcctgaacttcggagtcagatgcagggacccaggacaagggctcgcctaggagccaatgaagtgcttttggtggttgggggctttggaagccagcagtctcccattgatgtggtagagaaatatgaccccaagactcaggagtggagctttttgccaagcatcactcgtaagagacgttatgtggcctcagtgtcccttcatgaccggatctacgtcattggtggctatgatggccgttcccgccttagttcagtggaatgtctagactacacagcagatgaggatggggtctggtattctgtggcccctatgaatgtccgacgaggtcttgctggagccaccaccctgggagatatgatctatgtctctggaggctttgatggaagcaggcgtcacaccagtatggagcgctatgatccaaacattgaccagtggagcatgctgggagatatgcagacagcccgggaaggtgccggactcgtagtggccagtggagtgatctactgtctaggaggatatgacggcttgaatatcttaaattcagttgagaaatacgaccctcatacaggacattggactaatgttacaccaatggccaccaagcgttctggtgcaggagtagccctgctgaatgaccatatttatgtggtggggggatttgatggtacagcccacctttcttccgttgaagcatacaacattcgcactgattcctggacaactgtcaccagtatgaccactccacgatgctatgtaggggccacagtgcttcgggggagactctatgcaattgcaggatatgatggtaattccctgctaagtagcattgaatgttatgaccctatcatcgacagctgggaagtcgtgacatccatgggaacccagcgctgtgatgctggtgtttgtgttctccgcgagaagtgaccattgttggagcaccatccagagctagtgaccagtccagtggacagttagtgggagaatcaaaaatcctttccagaatgtctgtttctcactacgtgcaccgggtgattacaggcaccagtgcagtgatgattgtacttatttgacacatactccccgtcgtcctggttcttgttcctgagaagggtgggtaagatattccaggaaaaagaatgcacattgaatggatgtgagagaccacattgcctctcccactgctttggggagcactttcctgtcatttctaacttaccacatgcttggtgtactatatgtatgttgtgcctcatatgttgcaaagaactaaggtgagtatagcctactagatatgggcaatatccagcctagatgattggaaagataccagtttaagtaaacttggtaaaatccaagtcttttttttttttttcccaggaacaactacattttctcatatacaggtagctaggggcaacacagttccattctagagggaaacaaaagggagagccccacaaaactttggggacaagggagagagagactcatctgacacttcttttggaggtcaggatttgtatatcagaattgaagttagaattaagtgaattaaactgaatttgattgtgagtgaacctagaacagcactgaagtattacataacctggaagactgagaagggtatattatttgaaggatctttttatttccccgaggtctttcgcactggagacagcataaaagagtgaacaaatgttgggatgagagaagatgacatcaatgtgggagttcagtataactggggataaactagaagaacctgtgattttacagtcatcttattacctgccagggctcatctagccatggcaatgtttgccttgaatgggggtgaaagcctttctttgttggatcaaatactactacactattacacttccacactatttatttggggatgggctgggagtgacagtagcctagtagttcagctacctgattactgccccattcttttagaagcacatgtctgccaaggagtggtttgtactgctgtgtttggtacatctagtcttttttctgctataagttttccttacctgtcctttagtgtagattttattcatcacaggacagaataatcaaggacaaccaaaatccttttgttagtttcagtacctcagctatcaacatttctgagctaccattcaatgttcctctgtgtcatggagtgaaattcttgttttgtgggtattaggagtgtgggaatgtgataacctaaacaacctttgctctgaaattccatttttccctctttccctgagttgtattgacctacagagttaatttcctttgtatttttttaagaaaatattaaaaatcaacggtctcaaatgccgagagtttgtggctaaaaaaaa

SEQ ID NO: 303172 - DNA, 2279 bp, Homo sapiens
tccccagtgcctaactctgctgtctgctatatttcagcctttcatccgctgtagtttacaatgcagggatctggttgatgaagcaaagaagtttcatctgaggcctgaacttcggagtcagatgcagggacccaggacaagggctcgcctaggagccaatgaagtgcttttggtggttgggggctttggaagccagcagtctcccattgatgtggtagagaaatatgaccccaagactcaggagtggagctttttgccaagcatcactcgtaagagacgttatgtggcctcagtgtcccttcatgaccggatctacgtcattggtggctatgatggccgttcccgccttagttcagtggaatgtctagactacacagcagatgaggatggggtctggtattctgtggcccctatgaatgtccgacgaggtcttgctggagccaccaccctgggagatatgatctatgtctctggaggctttgatggaagcaggcgtcacaccagtatggagcgctatgatccaaacattgaccagtggagcatgctgggagatatgcagacagcccgggaaggtgccggactcgtagtggccagtggagtgatctactgtctaggaggatatgacggcttgaatatcttaaattcagttgagaaatacgaccctcatacaggacattggactaatgttacaccaatggccaccaagcgttctgatatgatggtaattccctgctaagtagcattgaatgttatgaccctatcatcgacagctgggaagtcgtgacatccatgggaacccagcgctgtgatgctggtgtttgtgttctccgcgagaagtgaccattgttggagcaccatccagagctagtgaccagtccagtggacagttagtgggagaatcaaaaatcctttccagaatgtctgtttctcactacgtgcaccgggtgattacaggcaccagtgcagtgatgattgtacttatttgacacatactccccgtcgtcctggttcttgttcctgagaagggtgggtaagatattccaggaaaaagaatgcacattgaatggatgtgagagaccacattgcctctcccactgctttggggagcactttcctgtcatttctaacttaccacatgcttggtgtactatatgtatgttgtgcctcatatgttgcaaagaactaaggtgagtatagcctactagatatgggcaatatccagcctagatgattggaaagataccagtttaagtaaacttggtaaaatccaagtcttttttttttttttcccaggaacaactacattttctcatatacaggtagctaggggcaacacagttccattctagagggaaacaaaagggagagccccacaaaactttggggacaagggagagagagactcatctgacacttcttttggaggtcaggatttgtatatcagaattgaagttagaattaagtgaattaaactgaatttgattgtgagtgaacctagaacagcactgaagtattacataacctggaagactgagaagggtatattatttgaaggatctttttatttccccgaggtctttcgcactggagacagcataaaagagtgaacaaatgttgggatgagagaagatgacatcaatgtgggagttcagtataactggggataaactagaagaacctgtgattttacagtcatcttattacctgccagggctcatctagccatggcaatgtttgccttgaatgggggtgaaagcctttctttgttggatcaaatactactacactattacacttccacactatttatttggggatgggctgggagtgacagtagcctagtagttcagctacctgattactgccccattcttttagaagcacatgtctgccaaggagtggtttgtactgctgtgtttggtacatctagtcttttttctgctataagttttccttacctgtcctttagtgtagattttattcatcacaggacagaataatcaaggacaaccaaaatccttttgttagtttcagtacctcagctatcaacatttctgagctaccattcaatgttcctctgtgtcatggagtgaaattcttgttttgtgggtattaggagtgtgggaatgtgataacctaaacaacctttgctctgaaattccatttttccctctttccctgagttgtattgacctacagagttaatttcctttgtatttttttaagaaaatattaaaaatcaacggtctcaaatgccgagagtttgtggctaaaaaaaa

SEQ ID NO: 303173 - DNA, 3169 bp, Homo sapiens
tgcgtcatcacgtcgcgcggccgcaggggccagacccggacggctccagagcctccagagcctccgggtctgggcggcgcttcggctcctcccgagccgcctgctagccccgcgccgcactccatccccacaggctggggacgggcccggtgcggctgtgtgggttcgggagcggagttgcagaatccaaggacccattttgttctttctccgcactgctttatgggaggcattatggcccccaaagacataatgacaaatactcatgctaaatccatcctcaattcaatgaactccctcaggaagagcaataccctctgtgatgtgacattgagagtagagcagaaagacttccctgcccatcggattgtgctggctgcctgtagtgattacttctgtgccatgttcactagtgagctctcagagaaggggaaaccttatgttgacatccaaggtttgactgcctctaccatggaaattttattggactttgtgtacacagaaacagtacatgtgacagtggagaatgtacaagaactgcttcctgcagcctgtctgcttcagttgaaaggtgtgaaacaagcctgctgtgagttcttagaaagtcagttggacccttctaattgcctgggtattagggattttgctgaaacccacaattgtgttgacctgatgcaagcagctgaggtttttagccagaagcattttcctgaagtggtacagcatgaagagttcattcttctgagtcaaggagaggtggaaaagctaatcaagtgcgacgaaattcaggtggattctgaagagccagtctttgaggctgtcatcaactgggtgaagcatgccaagaaagagcgggaagaatccttgcctaacctgctacagtatgtgcggatgcccctactaacccccaggtatatcacagatgtaatagatgctgagcctttcatccgctgtagtttacaatgcagggatctggttgatgaagcaaagaagtttcatctgaggcctgaacttcggagtcagatgcagggacccaggacaagggctcgcctaggagccaatgaagtgcttttggtggttgggggctttggaagccagcagtctcccattgatgtggtagagaaatatgaccccaagactcaggagtggagctttttgccaagcatcactcgtaagagacgttatgtggcctcagtgtcccttcatgaccggatctacgtcattggtggctatgatggccgttcccgccttagttcagtggaatgtctagactacacagcagatgaggatggggtctggtattctgtggcccctatgaatgtccgacgaggtcttgctggagccaccaccctgggagatatgatctatgtctctggaggctttgatggaagcaggcgtcacaccagtatggagcgctatgatccaaacattgaccagtggagcatgctgggagatatgcagacagcccgggaaggtgccggactcgtagtggccagtggagtgatctactgtctaggaggatatgacggcttgaatatcttaaattcagttgagaaatacgaccctcatacaggacattggactaatgttacaccaatggccaccaagcgttctggtgcaggagtagccctgctgaatgaccatatttatgtggtggggggatttgatggtacagcccacctttcttccgttgaagcatacaacattcgcactgattcctggacaactgtcaccagtatgaccactccacgatgctatgtaggggccacagtgcttcgggggagactctatgcaattgcaggatatgatggtaattccctgctaagtagcattgaatgttatgaccctatcatcgacagctgggaagtcgtgacatccatgggaacccagcgctgtgatgctggtgtttgtgttctccgcgagaagtgaccattgttggagcaccatccagagctagtgaccagtccagtggacagttagtgggagaatcaaaaatcctttccagaatgtctgtttctcactacgtgcaccgggtgattacaggcaccagtgcagtgatgattgtacttatttgacacatactccccgtcgtcctggttcttgttcctgagaagggtgggtaagatattccaggaaaaagaatgcacattgaatggatgtgagagaccacattgcctctcccactgctttggggagcactttcctgtcatttctaacttaccacatgcttggtgtactatatgtatgttgtgcctcatatgttgcaaagaactaaggtgagtatagcctactagatatgggcaatatccagcctagatgattggaaagataccagtttaagtaaacttggtaaaatccaagtcttttttttttttttcccaggaacaactacattttctcatatacaggtagctaggggcaacacagttccattctagagggaaacaaaagggagagccccacaaaactttggggacaagggagagagagactcatctgacacttcttttggaggtcaggatttgtatatcagaattgaagttagaattaagtgaattaaactgaatttgattgtgagtgaacctagaacagcactgaagtattacataacctggaagactgagaagggtatattatttgaaggatctttttatttccccgaggtctttcgcactggagacagcataaaagagtgaacaaatgttgggatgagagaagatgacatcaatgtgggagttcagtataactggggataaactagaagaacctgtgattttacagtcatcttattacctgccagggctcatctagccatggcaatgtttgccttgaatgggggtgaaagcctttctttgttggatcaaatactactacactattacacttccacactatttatttggggatgggctgggagtgacagtagcctagtagttcagctacctgattactgccccattcttttagaagcacatgtctgccaaggagtggtttgtactgctgtgtttggtacatctagtcttttttctgctataagttttccttacctgtcctttagtgtagattttattcatcacaggacagaataatcaaggacaaccaaaatccttttgttagtttcagtacctcagctatcaacattcttcagcacggggtaccgagctagaag

SEQ ID NO: 303174 - DNA, 3320 bp, Homo sapiens
tgcgtcatcacgtcgcgcggccgcaggggccagacccggacggctccagagcctccagagcctccgggtctgggcggcgcttcggctcctcccgagccgcctgctagccccgcgccgcactccatccccacaggctggggacgggcccggtgcggctgtgtgggttcgggagcggagttgcagaatccaaggacccattttgttctttctccgcactgctttatgggaggcattatggcccccaaagacataatgacaaatactcatgctaaatccatcctcaattcaatgaactccctcaggaagagcaataccctctgtgatgtgacattgagagtagagcagaaagacttccctgcccatcggattgtgctggctgcctgtagtgattacttctgtgccatgttcactagtgagctctcagagaaggggaaaccttatgttgacatccaaggtttgactgcctctaccatggaaattttattggactttgtgtacacagaaacagtacatgtgacagtggagaatgtacaagaactgcttcctgcagcctgtctgcttcagttgaaaggtgtgaaacaagcctgctgtgagttcttagaaagtcagttggacccttctaattgcctgggtattagggattttgctgaaacccacaattgtgttgacctgatgcaagcagctgaggtttttagccagaagcattttcctgaagtggtacagcatgaagagttcattcttctgagtcaaggagaggtggaaaagctaatcaagtgcgacgaaattcaggtggattctgaagagccagtctttgaggctgtcatcaactgggtgaagcatgccaagaaagagcgggaagaatccttgcctaacctgctacagtatgtgcggatgcccctactaacccccaggtatatcacagatgtaatagatgctgagcctttcatccgctgtagtttacaatgcagggatctggttgatgaagcaaagaagtttcatctgaggcctgaacttcggagtcagatgcagggacccaggacaagggctcgcctaggagccaatgaagtgcttttggtggttgggggctttggaagccagcagtctcccattgatgtggtagagaaatatgaccccaagactcaggagtggagctttttgccaagcatcactcgtaagagacgttatgtggcctcagtgtcccttcatgaccggatctacgtcattggtggctatgatggccgttcccgccttagttcagtggaatgtctagactacacagcagatgaggatggggtctggtattctgtggcccctatgaatgtccgacgaggtcttgctggagccaccaccctgggagatatgatctatgtctctggaggctttgatggaagcaggcgtcacaccagtatggagcgctatgatccaaacattgaccagtggagcatgctgggagatatgcagacagcccgggaaggtgccggactcgtagtggccagtggagtgatctactgtctaggaggatatgacggcttgaatatcttaaattcagttgagaaatacgaccctcatacaggacattggactaatgttacaccaatggccaccaagcgttctggtgcaggagtagccctgctgaatgaccatatttatgtggtggggggatttgatggtacagcccacctttcttccgttgaagcatacaacattcgcactgattcctggacaactgtcaccagtatgaccactccacgatgctatgtaggggccacagtgcttcgggggagactctatgcaattgcaggatatgatggtaattccctgctaagtagcattgaatgttatgaccctatcatcgacagctgggaagtcgtgacatccatgggaacccagcgctgtgatgctggtgtttgtgttctccgcgagaagtgaccattgttggagcaccatccagagctagtgaccagtccagtggacagttagtgggagaatcaaaaatcctttccagaatgtctgtttctcactacgtgcaccgggtgattacaggcaccagtgcagtgatgattgtacttatttgacacatactccccgtcgtcctggttcttgttcctgagaagggtgggtaagatattccaggaaaaagaatgcacattgaatggatgtgagagaccacattgcctctcccactgctttggggagcactttcctgtcatttctaacttaccacatgcttggtgtactatatgtatgttgtgcctcatatgttgcaaagaactaaggtgagtatagcctactagatatgggcaatatccagcctagatgattggaaagataccagtttaagtaaacttggtaaaatccaagtcttttttttttttttcccaggaacaactacattttctcatatacaggtagctaggggcaacacagttccattctagagggaaacaaaagggagagccccacaaaactttggggacaagggagagagagactcatctgacacttcttttggaggtcaggatttgtatatcagaattgaagttagaattaagtgaattaaactgaatttgattgtgagtgaacctagaacagcactgaagtattacataacctggaagactgagaagggtatattatttgaaggatctttttatttccccgaggtctttcgcactggagacagcataaaagagtgaacaaatgttgggatgagagaagatgacatcaatgtgggagttcagtataactggggataaactagaagaacctgtgattttacagtcatcttattacctgccagggctcatctagccatggcaatgtttgccttgaatgggggtgaaagcctttctttgttggatcaaatactactacactattacacttccacactatttatttggggatgggctgggagtgacagtagcctagtagttcagctacctgattactgccccattcttttagaagcacatgtctgccaaggagtggtttgtactgctgtgtttggtacatctagtcttttttctgctataagttttccttacctgtcctttagtgtagattttattcatcacaggacagaataatcaaggacaaccaaaatccttttgttagtttcagtacctcagctatcaacatttctgagctaccattcaatgttcctctgtgtcatggagtgaaattcttgttttgtgggtattaggagtgtgggaatgtgataacctaaacaacctttgctctgaaattccatttttccctctttccctgagttgtattgacctacagagttaatacaactcagggaaagaaaaaaaaaa

SEQ ID NO: 303175 - DNA, 3089 bp, Homo sapiens
tgcgtcatcacgtcgcgcggccgcaggggccagacccggacggctccagagcctccagagcctccgggtctgggcggcgcttcggctcctcccgagccgcctgctagccccgcgccgcactccatccccacaggctggggacgggcccggtgcggctgtgtgggttcgggagcggagttgcagaatccaaggacccattttgttctttctccgcactgctttatgggaggcattatggcccccaaagacataatgacaaatactcatgctaaatccatcctcaattcaatgaactccctcaggaagagcaataccctctgtgatgtgacattgagagtagagcagaaagacttccctgcccatcggattgtgctggctgcctgtagtgattacttctgtgccatgttcactagtgagctctcagagaaggggaaaccttatgttgacatccaaggtttgactgcctctaccatggaaattttattggactttgtgtacacagaaacagtacatgtgacagtggagaatgtacaagaactgcttcctgcagcctgtctgcttcagttgaaaggtgtgaaacaagcctgctgtgagttcttagaaagtcagttggacccttctaattgcctgggtattagggattttgctgaaacccacaattgtgttgacctgatgcaagcagctgaggtttttagccagaagcattttcctgaagtggtacagcatgaagagttcattcttctgagtcaaggagaggtggaaaagctaatcaagtgcgacgaaattcaggtggattctgaagagccagtctttgaggctgtcatcaactgggtgaagcatgccaagaaagagcgggaagaatccttgcctaacctgctacagtatgtgcggatgcccctactaacccccaggtatatcacagatgtaatagatgctgagcctttcatccgctgtagtttacaatgcagggatctggttgatgaagcaaagaagtttcatctgaggcctgaacttcggagtcagatgcagggacccaggacaagggctcgcctaggagccaatgaagtgcttttggtggttgggggctttggaagccagcagtctcccattgatgtggtagagaaatatgaccccaagactcaggagtggagctttttgccaagcatcactcgtaagagacgttatgtggcctcagtgtcccttcatgaccggatctacgtcattggtggctatgatggccgttcccgccttagttcagtggaatgtctagactacacagcagatgaggatggggtctggtattctgtggcccctatgaatgtccgacgaggtcttgctggagccaccaccctgggagatatgatctatgtctctggaggctttgatggaagcaggcgtcacaccagtatggagcgctatgatccaaacattgaccagtggagcatgctgggagatatgcagacagcccgggaaggtgccggactcgtagtggccagtggagtgatctactgtctaggaggatatgacggcttgaatatcttaaattcagttgagaaatacgaccctcatacaggacattggactaatgttacaccaatggccaccaagcgttctggtgcaggagtagccctgctgaatgaccatatttatgtggtggggggatttgatggtacagcccacctttcttccgttgaagcatacaacattcgcactgattcctggacaactgtcaccagtatgaccactccacgatgctatgtaggggccacagtgcttcgggggagactctatgcaattgcaggatatgatggtaattccctgctaagtagcattgaatgttatgaccctatcatcgacagctgggaagtcgtgacatccatgggaacccagcgctgtgatgctggtgtttgtgttctccgcgagaagtgaccattgttggagcaccatccagagctagtgaccagtccagtggacagttagtgggagaatcaaaaatcctttccagaatgtctgtttctcactacgtgcaccgggtgattacaggcaccagtgcagtgatgattgtacttatttgacacatactccccgtcgtcctggttcttgttcctgagaagggtgggtaagatattccaggaaaaagaatgcacattgaatggatgtgagagaccacattgcctctcccactgctttggggagcactttcctgtcatttctaacttaccacatgcttggtgtactatatgtatgttgtgcctcatatgttgcaaagaactaaggtgagtatagcctactagatatgggcaatatccagcctagatgattggaaagataccagtttaagtaaacttggtaaaatccaagtcttttttttttttttcccaggaacaactacattttctcatatacaggtagctaggggcaacacagttccattctagagggaaacaaaagggagagccccacaaaactttggggacaagggagagagagactcatctgacacttcttttggaggtcaggatttgtatatcagaattgaagttagaattaagtgaattaaactgaatttgattgtgagtgaacctagaacagcactgaagtattacataacctggaagactgagaagggtatattatttgaaggatctttttatttccccgaggtctttcgcactggagacagcataaaagagtgaacaaatgttgggatgagagaagatgacatcaatgtgggagttcagtataactggggataaactagaagaacctgtgattttacagtcatcttattacctgccagggctcatctagccatggcaatgtttgccttgaatgggggtgaaagcctttctttgttggatcaaatactactacactattacacttccacactatttatttggggatgggctgggagtgacagtagcctagtagttcagctacctgattactgccccattcttttagaagcacatgtctgccaaggagtggtttgtactgctgtgtttggtacatctagtctttttccgccgaaagaaggtcctccctaccctcgcccgttggggtatattctttctcctcgcgcggac

SEQ ID NO: 303176 - DNA, 3065 bp, Homo sapiens
tgcgtcatcacgtcgcgcggccgcaggggccagacccggacggctccagagcctccagagcctccgggtctgggcggcgcttcggctcctcccgagccgcctgctagccccgcgccgcactccatccccacaggctggggacgggcccggtgcggctgtgtgggttcgggagcggagttgcagaatccaaggacccattttgttctttctccgcactgctttatgggaggcattatggcccccaaagacataatgacaaatactcatgctaaatccatcctcaattcaatgaactccctcaggaagagcaataccctctgtgatgtgacattgagagtagagcagaaagacttccctgcccatcggattgtgctggctgcctgtagtgattacttctgtgccatgttcactagtgagctctcagagaaggggaaaccttatgttgacatccaaggtttgactgcctctaccatggaaattttattggactttgtgtacacagaaacagtacatgtgacagtggagaatgtacaagaactgcttcctgcagcctgtctgcttcagttgaaaggtgtgaaacaagcctgctgtgagttcttagaaagtcagttggacccttctaattgcctgggtattagggattttgctgaaacccacaattgtgttgacctgatgcaagcagctgaggtttttagccagaagcattttcctgaagtggtacagcatgaagagttcattcttctgagtcaaggagaggtggaaaagctaatcaagtgcgacgaaattcaggtggattctgaagagccagtctttgaggctgtcatcaactgggtgaagcatgccaagaaagagcgggaagaatccttgcctaacctgctacagtatgtgcggatgcccctactaacccccaggtatatcacagatgtaatagatgctgagcctttcatccgctgtagtttacaatgcagggatctggttgatgaagcaaagaagtttcatctgaggcctgaacttcggagtcagatgcagggacccaggacaagggctcgcctagatatgatctatgtctctggaggctttgatggaagcaggcgtcacaccagtatggagcgctatgatccaaacattgaccagtggagcatgctgggagatatgcagacagcccgggaaggtgccggactcgtagtggccagtggagtgatctactgtctaggaggatatgacggcttgaatatcttaaattcagttgagaaatacgaccctcatacaggacattggactaatgttacaccaatggccaccaagcgttctggtgcaggagtagccctgctgaatgaccatatttatgtggtggggggatttgatggtacagcccacctttcttccgttgaagcatacaacattcgcactgattcctggacaactgtcaccagtatgaccactccacgatgctatgtaggggccacagtgcttcgggggagactctatgcaattgcaggatatgatggtaattccctgctaagtagcattgaatgttatgaccctatcatcgacagctgggaagtcgtgacatccatgggaacccagcgctgtgatgctggtgtttgtgttctccgcgagaagtgaccattgttggagcaccatccagagctagtgaccagtccagtggacagttagtgggagaatcaaaaatcctttccagaatgtctgtttctcactacgtgcaccgggtgattacaggcaccagtgcagtgatgattgtacttatttgacacatactccccgtcgtcctggttcttgttcctgagaagggtgggtaagatattccaggaaaaagaatgcacattgaatggatgtgagagaccacattgcctctcccactgctttggggagcactttcctgtcatttctaacttaccacatgcttggtgtactatatgtatgttgtgcctcatatgttgcaaagaactaaggtgagtatagcctactagatatgggcaatatccagcctagatgattggaaagataccagtttaagtaaacttggtaaaatccaagtcttttttttttttttcccaggaacaactacattttctcatatacaggtagctaggggcaacacagttccattctagagggaaacaaaagggagagccccacaaaactttggggacaagggagagagagactcatctgacacttcttttggaggtcaggatttgtatatcagaattgaagttagaattaagtgaattaaactgaatttgattgtgagtgaacctagaacagcactgaagtattacataacctggaagactgagaagggtatattatttgaaggatctttttatttccccgaggtctttcgcactggagacagcataaaagagtgaacaaatgttgggatgagagaagatgacatcaatgtgggagttcagtataactggggataaactagaagaacctgtgattttacagtcatcttattacctgccagggctcatctagccatggcaatgtttgccttgaatgggggtgaaagcctttctttgttggatcaaatactactacactattacacttccacactatttatttggggatgggctgggagtgacagtagcctagtagttcagctacctgattactgccccattcttttagaagcacatgtctgccaaggagtggtttgtactgctgtgtttggtacatctagtcttttttctgctataagttttccttacctgtcctttagtgtagattttattcatcacaggacagaataatcaaggacaaccaaaatccttttgttagtttcagtacctcagctatcaacatttctgagctaccattcaatgttcctctgtgtcatggagtgaaattcttgttttgtgggtattaggagtgtgggaatgtgataacctaaacaacctttgctctgaaattccatttttccctctttccctgagttgtattgacctacagagttaatttcctttgtatttttttaagaaaatattaaaaatcaacggtctcaaatgccgagagtttgtggctaaaaaaaa

SEQ ID NO: 303177 - DNA, 3400 bp, Homo sapiens
atgcagagtatatactgaggtctgtggatcctaaggctcagaggattctcgccgcagcgttgttcggcccgaaaaggccattgtggacaatggacgtgaataaatttgaggcctctgtgggttttctcgatgtcaaaaagttcctcagtacctggaagaaacggggttttgccgtgatccccaggcgggtctggaactccggagctcagttgcagaatccaaggacccattttgttctttctccgcactgctttatgggaggcattatggcccccaaagacataatgacaaatactcatgctaaatccatcctcaattcaatgaactccctcaggaagagcaataccctctgtgatgtgacattgagagtagagcagaaagacttccctgcccatcggattgtgctggctgcctgtagtgattacttctgtgccatgttcactagtgagctctcagagaaggggaaaccttatgttgacatccaaggtttgactgcctctaccatggaaattttattggactttgtgtacacagaaacagtacatgtgacagtggagaatgtacaagaactgcttcctgcagcctgtctgcttcagttgaaaggtgtgaaacaagcctgctgtgagttcttagaaagtcagttggacccttctaattgcctgggtattagggattttgctgaaacccacaattgtgttgacctgatgcaagcagctgaggtttttagccagaagcattttcctgaagtggtacagcatgaagagttcattcttctgagtcaaggagaggtggaaaagctaatcaagtgcgacgaaattcaggtggattctgaagagccagtctttgaggctgtcatcaactgggtgaagcatgccaagaaagagcgggaagaatccttgcctaacctgctacagtatgtgcggatgcccctactaacccccaggtatatcacagatgtaatagatgctgagcctttcatccgctgtagtttacaatgcagggatctggttgatgaagcaaagaagtttcatctgaggcctgaacttcggagtcagatgcagggacccaggacaagggctcgcctaggagccaatgaagtgcttttggtggttgggggctttggaagccagcagtctcccattgatgtggtagagaaatatgaccccaagactcaggagtggagctttttgccaagcatcactcgtaagagacgttatgtggcctcagtgtcccttcatgaccggatctacgtcattggtggctatgatggccgttcccgccttagttcagtggaatgtctagactacacagcagatgaggatggggtctggtattctgtggcccctatgaatgtccgacgaggtcttgctggagccaccaccctgggagatatgatctatgtctctggaggctttgatggaagcaggcgtcacaccagtatggagcgctatgatccaaacattgaccagtggagcatgctgggagatatgcagacagcccgggaaggtgccggactcgtagtggccagtggagtgatctactgtctaggaggatatgacggcttgaatatcttaaattcagttgagaaatacgaccctcatacaggacattggactaatgttacaccaatggccaccaagcgttctggtgcaggagtagccctgctgaatgaccatatttatgtggtggggggatttgatggtacagcccacctttcttccgttgaagcatacaacattcgcactgattcctggacaactgtcaccagtatgaccactccacgatgctatgtaggggccacagtgcttcgggggagactctatgcaattgcaggatatgatggtaattccctgctaagtagcattgaatgttatgaccctatcatcgacagctgggaagtcgtgacatccatgggaacccagcgctgtgatgctggtgtttgtgttctccgcgagaagtgaccattgttggagcaccatccagagctagtgaccagtccagtggacagttagtgggagaatcaaaaatcctttccagaatgtctgtttctcactacgtgcaccgggtgattacaggcaccagtgcagtgatgattgtacttatttgacacatactccccgtcgtcctggttcttgttcctgagaagggtgggtaagatattccaggaaaaagaatgcacattgaatggatgtgagagaccacattgcctctcccactgctttggggagcactttcctgtcatttctaacttaccacatgcttggtgtactatatgtatgttgtgcctcatatgttgcaaagaactaaggtgagtatagcctactagatatgggcaatatccagcctagatgattggaaagataccagtttaagtaaacttggtaaaatccaagtcttttttttttttttcccaggaacaactacattttctcatatacaggtagctaggggcaacacagttccattctagagggaaacaaaagggagagccccacaaaactttggggacaagggagagagagactcatctgacacttcttttggaggtcaggatttgtatatcagaattgaagttagaattaagtgaattaaactgaatttgattgtgagtgaacctagaacagcactgaagtattacataacctggaagactgagaagggtatattatttgaaggatctttttatttccccgaggtctttcgcactggagacagcataaaagagtgaacaaatgttgggatgagagaagatgacatcaatgtgggagttcagtataactggggataaactagaagaacctgtgattttacagtcatcttattacctgccagggctcatctagccatggcaatgtttgccttgaatgggggtgaaagcctttctttgttggatcaaatactactacactattacacttccacactatttatttggggatgggctgggagtgacagtagcctagtagttcagctacctgattactgccccattcttttagaagcacatgtctgccaaggagtggtttgtactgctgtgtttggtacatctagtcttttttctgctataagttttccttacctgtcctttagtgtagattttattcatcacaggacagaataatcaaggacaaccaaaatccttttgttagtttcagtacctcagctatcaacatttctgagctaccattcaatgttcctctgtgtcatggagtgaaattcttgttttgtgggtattaggagtgtgggaatgtgataacctaaacaacctttgctctgaaattccatttttccctctttccctgagttgtattgacctacagagttaatttcctttgtatttttttaagaaaatattaaaaatcaacggtctcaaatgccgagagtttgtggctaaaaaaaa

SEQ ID NO: 303178 - DNA, 2536 bp, Homo sapiens
tgcgtcatcacgtcgcgcggccgcaggggccagacccggacggctccagagcctccagagcctccgggtctgggcggcgcttcggctcctcccgagccgcctgctagccccgcgccgcactccatccccacaggctggggacgggcccggtgcggctgtgtgggttcgggagcggagttgcagaatccaaggacccattttgttctttctccgcactgctttatgggaggcattatggcccccaaagacataatgacaaatactcatgctaaatccatcctcaattcaatgaactccctcaggaagagcaataccctctgtgatgtgacattgagagtagagcagaaagacttccctgcccatcggattgtgctggctgcctgtagtgattacttctgtgccatgttcactagtgagctctcagagaaggggaaaccttatgttgacatccaaggtttgactgcctctaccatggaaattttattggactttgtgtacacagaaacagtacatgtgacagtggagaatgtacaagaactgcttcctgcagcctgtctgcttcagttgaaaggtgtgaaacaagcctgctgtgagttcttagaaagtcagttggacccttctaattgcctgggtattagggattttgctgaaacccacaattgtgttgacctgatgcaagcagctgaggtttttagccagaagcattttcctgaagtggtacagcatgaagagttcattcttctgagtcaaggagaggtggaaaagctaatcaagtgcgacgaaattcaggtggattctgaagagccagtctttgaggctgtcatcaactgggtgaagcatgccaagaaagagcgggaagaatccttgcctaacctgctacagtatgtgcggatgcccctactaacccccaggtatatcacagatgtaatagatgctgagtgcttcgggggagactctatgcaattgcaggatatgatggtaattccctgctaagtagcattgaatgttatgaccctatcatcgacagctgggaagtcgtgacatccatgggaacccagcgctgtgatgctggtgtttgtgttctccgcgagaagtgaccattgttggagcaccatccagagctagtgaccagtccagtggacagttagtgggagaatcaaaaatcctttccagaatgtctgtttctcactacgtgcaccgggtgattacaggcaccagtgcagtgatgattgtacttatttgacacatactccccgtcgtcctggttcttgttcctgagaagggtgggtaagatattccaggaaaaagaatgcacattgaatggatgtgagagaccacattgcctctcccactgctttggggagcactttcctgtcatttctaacttaccacatgcttggtgtactatatgtatgttgtgcctcatatgttgcaaagaactaaggtgagtatagcctactagatatgggcaatatccagcctagatgattggaaagataccagtttaagtaaacttggtaaaatccaagtcttttttttttttttcccaggaacaactacattttctcatatacaggtagctaggggcaacacagttccattctagagggaaacaaaagggagagccccacaaaactttggggacaagggagagagagactcatctgacacttcttttggaggtcaggatttgtatatcagaattgaagttagaattaagtgaattaaactgaatttgattgtgagtgaacctagaacagcactgaagtattacataacctggaagactgagaagggtatattatttgaaggatctttttatttccccgaggtctttcgcactggagacagcataaaagagtgaacaaatgttgggatgagagaagatgacatcaatgtgggagttcagtataactggggataaactagaagaacctgtgattttacagtcatcttattacctgccagggctcatctagccatggcaatgtttgccttgaatgggggtgaaagcctttctttgttggatcaaatactactacactattacacttccacactatttatttggggatgggctgggagtgacagtagcctagtagttcagctacctgattactgccccattcttttagaagcacatgtctgccaaggagtggtttgtactgctgtgtttggtacatctagtcttttttctgctataagttttccttacctgtcctttagtgtagattttattcatcacaggacagaataatcaaggacaaccaaaatccttttgttagtttcagtacctcagctatcaacatttctgagctaccattcaatgttcctctgtgtcatggagtgaaattcttgttttgtgggtattaggagtgtgggaatgtgataacctaaacaacctttgctctgaaattccatttttccctctttccctgagttgtattgacctacagagttaatttcctttgtatttttttaagaaaatattaaaaatcaacggtctcaaatgccgagagtttgtggctaaaaaaaa

SEQ ID NO: 303179 - DNA, 966 bp, Homo sapiens
tgcgtcatcacgtcgcgcggccgcaggggccagacccggacggctccagagcctccagagcctccgggtctgggcggcgcttcggctcctcccgagccgcctgctagccccgcgccgcactccatccccacaggctggggacgggcccggtgcggctgtgtgggttcgggagcggagttgcagaatccaaggacccattttgttctttctccgcactgctttatgggaggcattatggcccccaaagacataatgacaaatactcatgctaaatccatcctcaattcaatgaactccctcaggaagagcaataccctctgtgatgtgacattgagagtagagcagaaagacttccctgcccatcggattgtgctggctgcctgtagtgattacttctgtgccatgttcactagtgagctctcagagaaggggaaaccttatgttgacatccaaggtttgactgcctctaccatggaaattttattggactttgtgtacacagaaacagtacatgtgacagtggagaatgtacaagaactgcttcctgcagcctgtctgcttcagttgaaaggtgtgaaacaagcctgctgtgagttcttagaaagtcagttggacccttctaattgcctgggtattagggattttgctgaaacccacaattgtgttgacctgatgcaagcagctgaggtttttagccagaagcattttcctgaagtggtacagcatgaagagttcattcttctgagtcaaggagaggtggaaaagctaatcaagtgcgacgaaattcaggatctggcactgtggttcctgcatgaagacagtggctgcggtgcctggacgtacaataccacttccgctgtcacggtaaagtccgccatcagaagactgaaggagttgaaagaccagtagacgctcctctactctttgagacatcactggcctataataaatgggttaatttatgta

SEQ ID NO: 303180 - DNA, 318 bp, Homo sapiens
catggttactaccagcaatactcctggaatcacagggctttgcaaactggttttctgtagtcagaagttaattatttgcatgtgctctttgtactcttatagtattacaggtatccccagtgcctaactctgctgtctgctatatttcagcctttcatccgctgtagtttacaatgcagggatctggttgatgaagcaaagaagtttcatctgaggcctgaacttcggagtcagatgcagggacccaggacaagggctcgcctaggtaagctggtatctcggcagaatgaggggatgcttttcaactacttcttgcag

SEQ ID NO: 303181 - DNA, 2384 bp, Homo sapiens
ccccgcccctggagccggcggcgcagggcgcagcttcccgccgccagagcgggccagcctgctgcgtgcgtgcgtgtgtacgactctgcgtgcgtgcgtgcgtgcgtgcgtgccgtcagctcgccgggcaccgcggcctcgccctcgccctccgcccctgcgcctgcaccgcgtagaccgacccccccccagcgcgcccacccggtagaggacccccgcccgtgccccgaccggtccccgcctttttgtaaaacttaaagcgggcgcagcattaacgcttcccgccccggtgacctctcaggggtctccccgccaaaggtgctccgccgctaaggaacatggcgaaggtggagcaggtcctgagcctcgagccgcagcacgagctcaaattccgaggtcccttcaccgatgttgtcaccaccaacctaaagcttggcaacccgacagaccgaaatgtgtgttttaaggtgaagactacagcaccacgtaggtactgtgtgaggcccaacagcggaatcatcgatgcaggggcctcaattaatgtatctgtgatgttacagcctttcgattatgatcccaatgagaaaagtaaacacaagtttatggttcagtctatgtttgctccaactgacacttcagatatggaagcagtatggaaggaggcaaaaccggaagaccttatggattcaaaacttagatgtgtgtttgaattgccagcagagaatgataaaccacatgatgtagaaataaataaaattatatccacaactgcatcaaagacagaaacaccaatagtgtctaagtctctgagttcttctttggatgacaccgaagttaagaaggttatggaagaatgtaagaggctgcaaggtgaagttcagaggctacgggaggagaacaagcagttcaaggaagaagatggactgcggatgaggaagacagtgcagagcaacagccccatttcagcattagccccaactgggaaggaagaaggccttagcacccggctcttggctctggtggttttgttctttatcgttggtgtaattattgggaagattgccttgtagaggtagcatgcacaggatggtaaattggattggtggatccaccatatcatgggatttaaatttatcataaccatgtgtaaaaagaaattaatgtatgatgacatctcacaggtcttgcctttaaattacccctccctgcacacacatacacagatacacacacacaaatataatgtaacgatcttttagaaagttaaaaatgtatagtaactgattgagggggaaaagaatgatctttattaatgacaagggaaaccatgagtaatgccacaatggcatattgtaaatgtcattttaaacattggtaggccttggtacatgatgctggattacctctcttaaaatgacacccttcctcgcctgttggtgctggcccttggggagctggagcccagcatgctggggagtgcggtcagctccacacagtagtccccacgtggcccactcccggcccaggctgctttccgtgtcttcagttctgtccaagccatcagctccttgggactgatgaacagagtcagaagcccaaaggaattgcactgtggcagcatcagacgtactcgtcataagtgagaggcgtgtgttgactgattgacccagcgctttggaaataaatggcagtgctttgttcacttaaagggaccaagctaaatttgtattggttcatgtagtgaagtcaaactgttattcagagatgtttaatgcatatttaacttatttaatgtatttcatctcatgttttcttattgtcacaagagtacagttaatgctgcgtgctgctgaactctgttgggtgaactggtattgctgctggagggctgtgggctcctctgtctctggagagtctggtcatgtggaggtggggtttattgggatgctggagaagagctgccaggaagtgttttttctgggtcagtaaataacaactgtcatagggagggaaattctcagtagtgacagtcaactctaggttaccttttttaatgaagagtagtcagtcttctagattgttcttataccacctctcaaccattactcacacttccagcgcccaggtccaagtctgagcctgacctccccttggggacctagcctggagtcaggacaaatggatcgggctgcagagggttagaagcgagggcaccagcagttgtgggtggggagcaagggaagagagaaactcttcagcgaatccttctagtactagttgagagtttgactgtgaattaattttatgccataaaagaccaacccagttctgtttgactatgtagcatcttgaaaagaaaaattataataaagccccaaaattaa

SEQ ID NO: 303182 - DNA, 2342 bp, Homo sapiens
ccccgcccctggagccggcggcgcagggcgcagcttcccgccgccagagcgggccagcctgctgcgtgcgtgcgtgtgtacgactctgcgtgcgtgcgtgcgtgcgtgcgtgccgtcagctcgccgggcaccgcggcctcgccctcgccctccgcccacccggtagaggacccccgcccgtgccccgaccggtccccgcctttttgtaaaacttaaagcgggcgcagcattaacgcttcccgccccggtgacctctcaggggtctccccgccaaaggtgctccgccgctaaggaacatggcgaaggtggagcaggtcctgagcctcgagccgcagcacgagctcaaattccgaggtcccttcaccgatgttgtcaccaccaacctaaagcttggcaacccgacagaccgaaatgtgtgttttaaggtgaagactacagcaccacgtaggtactgtgtgaggcccaacagcggaatcatcgatgcaggggcctcaattaatgtatctgtgatgttacagcctttcgattatgatcccaatgagaaaagtaaacacaagtttatggttcagtctatgtttgctccaactgacacttcagatatggaagcagtatggaaggaggcaaaaccggaagaccttatggattcaaaacttagatgtgtgtttgaattgccagcagagaatgataaaccacatgatgtagaaataaataaaattatatccacaactgcatcaaagacagaaacaccaatagtgtctaagtctctgagttcttctttggatgacaccgaagttaagaaggttatggaagaatgtaagaggctgcaaggtgaagttcagaggctacgggaggagaacaagcagttcaaggaagaagatggactgcggatgaggaagacagtgcagagcaacagccccatttcagcattagccccaactgggaaggaagaaggccttagcacccggctcttggctctggtggttttgttctttatcgttggtgtaattattgggaagattgccttgtagaggtagcatgcacaggatggtaaattggattggtggatccaccatatcatgggatttaaatttatcataaccatgtgtaaaaagaaattaatgtatgatgacatctcacaggtcttgcctttaaattacccctccctgcacacacatacacagatacacacacacaaatataatgtaacgatcttttagaaagttaaaaatgtatagtaactgattgagggggaaaagaatgatctttattaatgacaagggaaaccatgagtaatgccacaatggcatattgtaaatgtcattttaaacattggtaggccttggtacatgatgctggattacctctcttaaaatgacacccttcctcgcctgttggtgctggcccttggggagctggagcccagcatgctggggagtgcggtcagctccacacagtagtccccacgtggcccactcccggcccaggctgctttccgtgtcttcagttctgtccaagccatcagctccttgggactgatgaacagagtcagaagcccaaaggaattgcactgtggcagcatcagacgtactcgtcataagtgagaggcgtgtgttgactgattgacccagcgctttggaaataaatggcagtgctttgttcacttaaagggaccaagctaaatttgtattggttcatgtagtgaagtcaaactgttattcagagatgtttaatgcatatttaacttatttaatgtatttcatctcatgttttcttattgtcacaagagtacagttaatgctgcgtgctgctgaactctgttgggtgaactggtattgctgctggagggctgtgggctcctctgtctctggagagtctggtcatgtggaggtggggtttattgggatgctggagaagagctgccaggaagtgttttttctgggtcagtaaataacaactgtcatagggagggaaattctcagtagtgacagtcaactctaggttaccttttttaatgaagagtagtcagtcttctagattgttcttataccacctctcaaccattactcacacttccagcgcccaggtccaagtctgagcctgacctccccttggggacctagcctggagtcaggacaaatggatcgggctgcagagggttagaagcgagggcaccagcagttgtgggtggggagcaagggaagagagaaactcttcagcgaatccttctagtactagttgagagtttgactgtgaattaattttatgccataaaagaccaacccagttctgtttgactatgtagcatcttgaaaagaaaaattataataaagccccaaaattaa

SEQ ID NO: 303183 - DNA, 360 bp, Homo sapiens
cagagtagcaacatggggagcattggttgactttgaggagtcaggcagcaagacttcagggtttatgaagtgtaatattttgagaaagtgagtgtatttaatcttgtcatgttacaaatattgaaatctcagcagacttcagttctttatttgatatacatcagggctttctcattaagagtatttttctgaaattgtcagttataggaagaaagttattcttccagcaggtttataatatcttgattattaaatttaaattgttttagtggaaggaggcaaaaccggaagaccttatggattcagtaagtatatttatagttaacaataattgaatgttgtaagctgatacttatttgc

SEQ ID NO: 303184 - DNA, 4602 bp, Homo sapiens
  misc_feature (4506)..(4506): n is a, c, g, or t
  misc_feature (4600)..(4600): n is a, c, g, or t
ccccgcccctggagccggcggcgcagggcgcagcttcccgccgccagagcgggccagcctgctgcgtgcgtgcgtgtgtacgactctgcgtgcgtgcgtgcgtgcgtgcgtgccgtcagctcgccgggcaccgcggcctcgccctcgccctccgcccctgcgcctgcaccgcgtagaccgacccccccccagcgcgcccacccggtagaggacccccgcccgtgccccgaccggtccccgcctttttgtaaaacttaaagcgggcgcagcattaacgcttcccgccccggtgacctctcaggggtctccccgccaaaggtgctccgccgctaaggaacatggcgaaggtggagcaggtcctgagcctcgagccgcagcacgagctcaaattccgaggtcccttcaccgatgttgtcaccaccaacctaaagcttggcaacccgacagaccgaaatgtgtgttttaaggtgaagactacagcaccacgtaggtactgtgtgaggcccaacagcggaatcatcgatgcaggggcctcaattaatgtatctgtgatgttacagcctttcgattatgatcccaatgagaaaagtaaacacaagtttatggttcagtctatgtttgctccaactgacacttcagatatggaagcagtatggaaggaggcaaaaccggaagaccttatggattcaaaacttagatgtgtgtttgaattgccagcagagaatgataaaccacatgatgtagaaataaataaaattatatccacaactgcatcaaagacagaaacaccaatagtgtctaagtctctgagttcttctttggatgacaccgaagttaagaaggttatggaagaatgtaagaggctgcaaggtgaagttcagaggctacgggaggagaacaagcagttcaaggaagaagatggactgcggatgaggaagacagtgcagagcaacagccccatttcagcattagccccaactgggaaggaagaaggccttagcacccggctcttggctctggtggttttgttctttatcgttggtgtaattattgggaagattgccttgtagaggtagcatgcacaggatggtaaattggattggtggatccaccatatcatgggatttaaatttatcataaccatgtgtaaaaagaaattaatgtatgatgacatctcacaggtcttgcctttaaattacccctccctgcacacacatacacagatacacacacacaaatataatgtaacgatcttttagaaagttaaaaatgtatagtaactgattgagggggaaaagaatgatctttattaatgacaagggaaaccatgagtaatgccacaatggcatattgtaaatgtcattttaaacattggtaggccttggtacatgatgctggattacctctcttaaaatgacacccttcctcgcctgttggtgctggcccttggggagctggagcccagcatgctggggagtgcggtcagctccacacagtagtccccacgtggcccactcccggcccaggctgctttccgtgtcttcagttctgtccaagccatcagctccttgggactgatgaacagagtcagaagcccaaaggaattgcactgtggcagcatcagacgtactcgtcataagtgagaggcgtgtgttgactgattgacccagcgctttggaaataaatggcagtgctttgttcacttaaagggaccaagctaaatttgtattggttcatgtagtgaagtcaaactgttattcagagatgtttaatgcatatttaacttatttaatgtatttcatctcatgttttcttattgtcacaagagtacagttaatgctgcgtgctgctgaactctgttgggtgaactggtattgctgctggagggctgtgggctcctctgtctctggagagtctggtcatgtggaggtggggtttattgggatgctggagaagagctgccaggaagtgttttttctgggtcagtaaataacaactgtcatagggagggaaattctcagtagtgacagtcaactctaggttaccttttttaatgaagagtagtcagtcttctagattgttcttataccacctctcaaccattactcacacttccagcgcccaggtccaagtctgagcctgacctccccttggggacctagcctggagtcaggacaaatggatcgggctgcagagggttagaagcgagggcaccagcagttgtgggtggggagcaagggaagagagaaactcttcagcgaatccttctagtactagttgagagtttgactgtgaattaattttatgccataaaagaccaacccagttctgtttgactatgtagcatcttgaaaagaaaaattataataaagccccaaaattaagaattcttttgtcattttgtcacatttgctctatggggggaattattattttatcatttttattattttgccattggaaggttaactttaaaatgagccctatcactgagaaatacgtgtttcatgatttaactctgtgtgtgtgtgtgtgtgtgtgtgtgtgtgtgtgtgtattttttttttggttgtcttcagctgacagtatgaaaaatgaaactgctgaaaaagctgagcacctggtcacccttggccttccattgctttggccttcagtaaaaagcagcctcccttctaggtcagggaaccatgccattgagactagtaacgggcgttctgggcacagtcccactgtgcacaggtttgagaggacaagttcatcagaaggaaggcagtccttagaagtcacatacgttgagccacgttgctcctaagcctggctctgtcaagctgggtcaggggccttgaaactggagaagtggaagtctatggttggtctgagtaagtaacttcctgtcttcatgaaaaaagttgactttgaatcccaggtactcacagaaatggtgaacagacttagttgttacccaggcacccatggattgtgttgagtgtgcagacagggaggccaccccaataggaattcgtctccaggatttttcccatgtgtcccccagtacttataaaagggagtgaaaagaccgagctgtaaggcatgtgccttctgccacctgactttccgtgaggggactaaaatttactaattgtagttgctgcagccagttaagtcctgtagcttccaggccctcatgtctttgataggagagtgcttaggtggtccccaacagtgcctaggggtacagtacagtcccattacactagagcagggctctatttatttttaaaggatatggccgtgtgttttgataaaactttattcacaaaaacagccgggtcatgggatttggcttgtgagtctgtaacagttcttaaaaagaatatctgagaaactactctgttttagacctttgaaggtgatttagagttttgtgtacatctaggagaaggtgttcagcttctcagaggatgtggacattttggttgcagctaaaaatcagtctctgaagtctctctcccttctagaggttaggacttggtgaacatgtttgtgggccttttgactgagtggcagaaggaaactgctcaggaagagaaacaggtgactgatgggaaggttgattattttctcagtcatcctggcagccaaaaatgtgccaggaaaagaaagaatgtggagcacgcgtggctcctggaggacttggagatgcatgcacatttagggtgttttccctagaattacataatgaaaaaaagaataaggcaaagaggaggtgaatatggggcctgtcacaacggcctgccctgccccaagagggttaagagtcagataatcgggacgaaactggcatggaaagagcgagcctagggaggatgccgctgggcagtgtgcatgggggagctgctgccaggctgccctccagtctgctcctgtggttactggctccacagcacctcagagagggcggccctggcttcagaaatgccagccatagtgctcacaaatgcagaagagatggaagcggtgacagaatcctgaaagtttttattgattgaagttttaaattggtaacttaagcttccttggcacgatacaaaatacctcttaaagacagcaggcttttttatttgtaggtgtgaggaactggctttaacttttttctcctcctagtttgcatgttttccttctctcgtcttctgaactgctggcaccagcagtaatacatactgataaaatcaaaattgatttttaccagtggccagtttatggctagagagacgacttatacctccataacacagaagggggaaaaatgaagaacctccagtgatccgtgaaaacctaaacgctttcaaacaaatcccaggaacagaattgctatcgaaagatatcattgcccagtttgcaggctatgttgagtcagatagaactgaatgtagtgagagctcagagctacagagcctttcagatgaatttgaaaacagactctgtgtgtgtgtgcatatgccnaggggaaggaaataacattgcactttataaacactgtattgtaagtggaaaatgcaatgtcttaaataaaactatttaaaattggcaccataanaa

SEQ ID NO: 303185 - DNA, 4303 bp, Homo sapiens
  misc_feature (4207)..(4207): n is a, c, g, or t
  misc_feature (4301)..(4301): n is a, c, g, or t
cgacgccacccgcccgcgccgtcgccccgacggaggaacatggcgaaggtggagcaggtcctgagcctcgagccgcagcacgagctcaaattccgaggtcccttcaccgatgttgtcaccaccaacctaaagcttggcaacccgacagaccgaaatgtgtgttttaaggtgaagactacagcaccacgtaggtactgtgtgaggcccaacagcggaatcatcgatgcaggggcctcaattaatgtatctgtgatgttacagcctttcgattatgatcccaatgagaaaagtaaacacaagtttatggttcagtctatgtttgctccaactgacacttcagatatggaagcagtatggaaggaggcaaaaccggaagaccttatggattcaaaacttagatgtgtgtttgaattgccagcagagaatgataaaccacatgatgtagaaataaataaaattatatccacaactgcatcaaagacagaaacaccaatagtgtctaagtctctgagttcttctttggatgacaccgaagttaagaaggttatggaagaatgtaagaggctgcaaggtgaagttcagaggctacgggaggagaacaagcagttcaaggaagaagatggactgcggatgaggaagacagtgcagagcaacagccccatttcagcattagccccaactgggaaggaagaaggccttagcacccggctcttggctctggtggttttgttctttatcgttggtgtaattattgggaagattgccttgtagaggtagcatgcacaggatggtaaattggattggtggatccaccatatcatgggatttaaatttatcataaccatgtgtaaaaagaaattaatgtatgatgacatctcacaggtcttgcctttaaattacccctccctgcacacacatacacagatacacacacacaaatataatgtaacgatcttttagaaagttaaaaatgtatagtaactgattgagggggaaaagaatgatctttattaatgacaagggaaaccatgagtaatgccacaatggcatattgtaaatgtcattttaaacattggtaggccttggtacatgatgctggattacctctcttaaaatgacacccttcctcgcctgttggtgctggcccttggggagctggagcccagcatgctggggagtgcggtcagctccacacagtagtccccacgtggcccactcccggcccaggctgctttccgtgtcttcagttctgtccaagccatcagctccttgggactgatgaacagagtcagaagcccaaaggaattgcactgtggcagcatcagacgtactcgtcataagtgagaggcgtgtgttgactgattgacccagcgctttggaaataaatggcagtgctttgttcacttaaagggaccaagctaaatttgtattggttcatgtagtgaagtcaaactgttattcagagatgtttaatgcatatttaacttatttaatgtatttcatctcatgttttcttattgtcacaagagtacagttaatgctgcgtgctgctgaactctgttgggtgaactggtattgctgctggagggctgtgggctcctctgtctctggagagtctggtcatgtggaggtggggtttattgggatgctggagaagagctgccaggaagtgttttttctgggtcagtaaataacaactgtcatagggagggaaattctcagtagtgacagtcaactctaggttaccttttttaatgaagagtagtcagtcttctagattgttcttataccacctctcaaccattactcacacttccagcgcccaggtccaagtctgagcctgacctccccttggggacctagcctggagtcaggacaaatggatcgggctgcagagggttagaagcgagggcaccagcagttgtgggtggggagcaagggaagagagaaactcttcagcgaatccttctagtactagttgagagtttgactgtgaattaattttatgccataaaagaccaacccagttctgtttgactatgtagcatcttgaaaagaaaaattataataaagccccaaaattaagaattcttttgtcattttgtcacatttgctctatggggggaattattattttatcatttttattattttgccattggaaggttaactttaaaatgagccctatcactgagaaatacgtgtttcatgatttaactctgtgtgtgtgtgtgtgtgtgtgtgtgtgtgtgtgtgtattttttttttggttgtcttcagctgacagtatgaaaaatgaaactgctgaaaaagctgagcacctggtcacccttggccttccattgctttggccttcagtaaaaagcagcctcccttctaggtcagggaaccatgccattgagactagtaacgggcgttctgggcacagtcccactgtgcacaggtttgagaggacaagttcatcagaaggaaggcagtccttagaagtcacatacgttgagccacgttgctcctaagcctggctctgtcaagctgggtcaggggccttgaaactggagaagtggaagtctatggttggtctgagtaagtaacttcctgtcttcatgaaaaaagttgactttgaatcccaggtactcacagaaatggtgaacagacttagttgttacccaggcacccatggattgtgttgagtgtgcagacagggaggccaccccaataggaattcgtctccaggatttttcccatgtgtcccccagtacttataaaagggagtgaaaagaccgagctgtaaggcatgtgccttctgccacctgactttccgtgaggggactaaaatttactaattgtagttgctgcagccagttaagtcctgtagcttccaggccctcatgtctttgataggagagtgcttaggtggtccccaacagtgcctaggggtacagtacagtcccattacactagagcagggctctatttatttttaaaggatatggccgtgtgttttgataaaactttattcacaaaaacagccgggtcatgggatttggcttgtgagtctgtaacagttcttaaaaagaatatctgagaaactactctgttttagacctttgaaggtgatttagagttttgtgtacatctaggagaaggtgttcagcttctcagaggatgtggacattttggttgcagctaaaaatcagtctctgaagtctctctcccttctagaggttaggacttggtgaacatgtttgtgggccttttgactgagtggcagaaggaaactgctcaggaagagaaacaggtgactgatgggaaggttgattattttctcagtcatcctggcagccaaaaatgtgccaggaaaagaaagaatgtggagcacgcgtggctcctggaggacttggagatgcatgcacatttagggtgttttccctagaattacataatgaaaaaaagaataaggcaaagaggaggtgaatatggggcctgtcacaacggcctgccctgccccaagagggttaagagtcagataatcgggacgaaactggcatggaaagagcgagcctagggaggatgccgctgggcagtgtgcatgggggagctgctgccaggctgccctccagtctgctcctgtggttactggctccacagcacctcagagagggcggccctggcttcagaaatgccagccatagtgctcacaaatgcagaagagatggaagcggtgacagaatcctgaaagtttttattgattgaagttttaaattggtaacttaagcttccttggcacgatacaaaatacctcttaaagacagcaggcttttttatttgtaggtgtgaggaactggctttaacttttttctcctcctagtttgcatgttttccttctctcgtcttctgaactgctggcaccagcagtaatacatactgataaaatcaaaattgatttttaccagtggccagtttatggctagagagacgacttatacctccataacacagaagggggaaaaatgaagaacctccagtgatccgtgaaaacctaaacgctttcaaacaaatcccaggaacagaattgctatcgaaagatatcattgcccagtttgcaggctatgttgagtcagatagaactgaatgtagtgagagctcagagctacagagcctttcagatgaatttgaaaacagactctgtgtgtgtgtgcatatgccnaggggaaggaaataacattgcactttataaacactgtattgtaagtggaaaatgcaatgtcttaaataaaactatttaaaattggcaccataanaa

SEQ ID NO: 303186 - DNA, 4560 bp, Homo sapiens
  misc_feature (4464)..(4464): n is a, c, g, or t
  misc_feature (4558)..(4558): n is a, c, g, or t
ccccgcccctggagccggcggcgcagggcgcagcttcccgccgccagagcgggccagcctgctgcgtgcgtgcgtgtgtacgactctgcgtgcgtgcgtgcgtgcgtgcgtgccgtcagctcgccgggcaccgcggcctcgccctcgccctccgcccacccggtagaggacccccgcccgtgccccgaccggtccccgcctttttgtaaaacttaaagcgggcgcagcattaacgcttcccgccccggtgacctctcaggggtctccccgccaaaggtgctccgccgctaaggaacatggcgaaggtggagcaggtcctgagcctcgagccgcagcacgagctcaaattccgaggtcccttcaccgatgttgtcaccaccaacctaaagcttggcaacccgacagaccgaaatgtgtgttttaaggtgaagactacagcaccacgtaggtactgtgtgaggcccaacagcggaatcatcgatgcaggggcctcaattaatgtatctgtgatgttacagcctttcgattatgatcccaatgagaaaagtaaacacaagtttatggttcagtctatgtttgctccaactgacacttcagatatggaagcagtatggaaggaggcaaaaccggaagaccttatggattcaaaacttagatgtgtgtttgaattgccagcagagaatgataaaccacatgatgtagaaataaataaaattatatccacaactgcatcaaagacagaaacaccaatagtgtctaagtctctgagttcttctttggatgacaccgaagttaagaaggttatggaagaatgtaagaggctgcaaggtgaagttcagaggctacgggaggagaacaagcagttcaaggaagaagatggactgcggatgaggaagacagtgcagagcaacagccccatttcagcattagccccaactgggaaggaagaaggccttagcacccggctcttggctctggtggttttgttctttatcgttggtgtaattattgggaagattgccttgtagaggtagcatgcacaggatggtaaattggattggtggatccaccatatcatgggatttaaatttatcataaccatgtgtaaaaagaaattaatgtatgatgacatctcacaggtcttgcctttaaattacccctccctgcacacacatacacagatacacacacacaaatataatgtaacgatcttttagaaagttaaaaatgtatagtaactgattgagggggaaaagaatgatctttattaatgacaagggaaaccatgagtaatgccacaatggcatattgtaaatgtcattttaaacattggtaggccttggtacatgatgctggattacctctcttaaaatgacacccttcctcgcctgttggtgctggcccttggggagctggagcccagcatgctggggagtgcggtcagctccacacagtagtccccacgtggcccactcccggcccaggctgctttccgtgtcttcagttctgtccaagccatcagctccttgggactgatgaacagagtcagaagcccaaaggaattgcactgtggcagcatcagacgtactcgtcataagtgagaggcgtgtgttgactgattgacccagcgctttggaaataaatggcagtgctttgttcacttaaagggaccaagctaaatttgtattggttcatgtagtgaagtcaaactgttattcagagatgtttaatgcatatttaacttatttaatgtatttcatctcatgttttcttattgtcacaagagtacagttaatgctgcgtgctgctgaactctgttgggtgaactggtattgctgctggagggctgtgggctcctctgtctctggagagtctggtcatgtggaggtggggtttattgggatgctggagaagagctgccaggaagtgttttttctgggtcagtaaataacaactgtcatagggagggaaattctcagtagtgacagtcaactctaggttaccttttttaatgaagagtagtcagtcttctagattgttcttataccacctctcaaccattactcacacttccagcgcccaggtccaagtctgagcctgacctccccttggggacctagcctggagtcaggacaaatggatcgggctgcagagggttagaagcgagggcaccagcagttgtgggtggggagcaagggaagagagaaactcttcagcgaatccttctagtactagttgagagtttgactgtgaattaattttatgccataaaagaccaacccagttctgtttgactatgtagcatcttgaaaagaaaaattataataaagccccaaaattaagaattcttttgtcattttgtcacatttgctctatggggggaattattattttatcatttttattattttgccattggaaggttaactttaaaatgagccctatcactgagaaatacgtgtttcatgatttaactctgtgtgtgtgtgtgtgtgtgtgtgtgtgtgtgtgtgtattttttttttggttgtcttcagctgacagtatgaaaaatgaaactgctgaaaaagctgagcacctggtcacccttggccttccattgctttggccttcagtaaaaagcagcctcccttctaggtcagggaaccatgccattgagactagtaacgggcgttctgggcacagtcccactgtgcacaggtttgagaggacaagttcatcagaaggaaggcagtccttagaagtcacatacgttgagccacgttgctcctaagcctggctctgtcaagctgggtcaggggccttgaaactggagaagtggaagtctatggttggtctgagtaagtaacttcctgtcttcatgaaaaaagttgactttgaatcccaggtactcacagaaatggtgaacagacttagttgttacccaggcacccatggattgtgttgagtgtgcagacagggaggccaccccaataggaattcgtctccaggatttttcccatgtgtcccccagtacttataaaagggagtgaaaagaccgagctgtaaggcatgtgccttctgccacctgactttccgtgaggggactaaaatttactaattgtagttgctgcagccagttaagtcctgtagcttccaggccctcatgtctttgataggagagtgcttaggtggtccccaacagtgcctaggggtacagtacagtcccattacactagagcagggctctatttatttttaaaggatatggccgtgtgttttgataaaactttattcacaaaaacagccgggtcatgggatttggcttgtgagtctgtaacagttcttaaaaagaatatctgagaaactactctgttttagacctttgaaggtgatttagagttttgtgtacatctaggagaaggtgttcagcttctcagaggatgtggacattttggttgcagctaaaaatcagtctctgaagtctctctcccttctagaggttaggacttggtgaacatgtttgtgggccttttgactgagtggcagaaggaaactgctcaggaagagaaacaggtgactgatgggaaggttgattattttctcagtcatcctggcagccaaaaatgtgccaggaaaagaaagaatgtggagcacgcgtggctcctggaggacttggagatgcatgcacatttagggtgttttccctagaattacataatgaaaaaaagaataaggcaaagaggaggtgaatatggggcctgtcacaacggcctgccctgccccaagagggttaagagtcagataatcgggacgaaactggcatggaaagagcgagcctagggaggatgccgctgggcagtgtgcatgggggagctgctgccaggctgccctccagtctgctcctgtggttactggctccacagcacctcagagagggcggccctggcttcagaaatgccagccatagtgctcacaaatgcagaagagatggaagcggtgacagaatcctgaaagtttttattgattgaagttttaaattggtaacttaagcttccttggcacgatacaaaatacctcttaaagacagcaggcttttttatttgtaggtgtgaggaactggctttaacttttttctcctcctagtttgcatgttttccttctctcgtcttctgaactgctggcaccagcagtaatacatactgataaaatcaaaattgatttttaccagtggccagtttatggctagagagacgacttatacctccataacacagaagggggaaaaatgaagaacctccagtgatccgtgaaaacctaaacgctttcaaacaaatcccaggaacagaattgctatcgaaagatatcattgcccagtttgcaggctatgttgagtcagatagaactgaatgtagtgagagctcagagctacagagcctttcagatgaatttgaaaacagactctgtgtgtgtgtgcatatgccnaggggaaggaaataacattgcactttataaacactgtattgtaagtggaaaatgcaatgtcttaaataaaactatttaaaattggcaccataanaa

SEQ ID NO: 303187 - DNA, 4240 bp, Homo sapiens
  misc_feature (4144)..(4144): n is a, c, g, or t
  misc_feature (4238)..(4238): n is a, c, g, or t
ccccgcccctggagccggcggcgcagggcgcagcttcccgccgccagagcgggccagcctgctgcgtgcgtgcgtgtgtacgactctgcgtgcgtgcgtgcgtgcgtgcgtgccgtcagctcgccgggcaccgcggcctcgccctcgccctccgcccctgcgcctgcaccgcgtagaccgacccccccccagcgcgcccacccggtagaggacccccgcccgtgccccgaccggtccccgcctttttgtaaaacttaaagcgggcgcagcattaacgcttcccgccccggtgacctctcaggggtctccccgccaaaggtgctccgccgctaaggaacatggcgaaggtggagcaggtcctgagcctcgagccgcagcacgagctcaaattccgaggtcccttcaccgatgttgtcaccaccaacctaaagcttggcaacccgacagaccgaaatgtgtgttttaaggtgaagactacagcaccacgtaggtactgtgtgaggcccaacagcggaatcatcgatgcaggggcctcaattaatgtatctggaagaagatggactgcggatgaggaagacagtgcagagcaacagccccatttcagcattagccccaactgggaaggaagaaggccttagcacccggctcttggctctggtggttttgttctttatcgttggtgtaattattgggaagattgccttgtagaggtagcatgcacaggatggtaaattggattggtggatccaccatatcatgggatttaaatttatcataaccatgtgtaaaaagaaattaatgtatgatgacatctcacaggtcttgcctttaaattacccctccctgcacacacatacacagatacacacacacaaatataatgtaacgatcttttagaaagttaaaaatgtatagtaactgattgagggggaaaagaatgatctttattaatgacaagggaaaccatgagtaatgccacaatggcatattgtaaatgtcattttaaacattggtaggccttggtacatgatgctggattacctctcttaaaatgacacccttcctcgcctgttggtgctggcccttggggagctggagcccagcatgctggggagtgcggtcagctccacacagtagtccccacgtggcccactcccggcccaggctgctttccgtgtcttcagttctgtccaagccatcagctccttgggactgatgaacagagtcagaagcccaaaggaattgcactgtggcagcatcagacgtactcgtcataagtgagaggcgtgtgttgactgattgacccagcgctttggaaataaatggcagtgctttgttcacttaaagggaccaagctaaatttgtattggttcatgtagtgaagtcaaactgttattcagagatgtttaatgcatatttaacttatttaatgtatttcatctcatgttttcttattgtcacaagagtacagttaatgctgcgtgctgctgaactctgttgggtgaactggtattgctgctggagggctgtgggctcctctgtctctggagagtctggtcatgtggaggtggggtttattgggatgctggagaagagctgccaggaagtgttttttctgggtcagtaaataacaactgtcatagggagggaaattctcagtagtgacagtcaactctaggttaccttttttaatgaagagtagtcagtcttctagattgttcttataccacctctcaaccattactcacacttccagcgcccaggtccaagtctgagcctgacctccccttggggacctagcctggagtcaggacaaatggatcgggctgcagagggttagaagcgagggcaccagcagttgtgggtggggagcaagggaagagagaaactcttcagcgaatccttctagtactagttgagagtttgactgtgaattaattttatgccataaaagaccaacccagttctgtttgactatgtagcatcttgaaaagaaaaattataataaagccccaaaattaagaattcttttgtcattttgtcacatttgctctatggggggaattattattttatcatttttattattttgccattggaaggttaactttaaaatgagccctatcactgagaaatacgtgtttcatgatttaactctgtgtgtgtgtgtgtgtgtgtgtgtgtgtgtgtgtgtattttttttttggttgtcttcagctgacagtatgaaaaatgaaactgctgaaaaagctgagcacctggtcacccttggccttccattgctttggccttcagtaaaaagcagcctcccttctaggtcagggaaccatgccattgagactagtaacgggcgttctgggcacagtcccactgtgcacaggtttgagaggacaagttcatcagaaggaaggcagtccttagaagtcacatacgttgagccacgttgctcctaagcctggctctgtcaagctgggtcaggggccttgaaactggagaagtggaagtctatggttggtctgagtaagtaacttcctgtcttcatgaaaaaagttgactttgaatcccaggtactcacagaaatggtgaacagacttagttgttacccaggcacccatggattgtgttgagtgtgcagacagggaggccaccccaataggaattcgtctccaggatttttcccatgtgtcccccagtacttataaaagggagtgaaaagaccgagctgtaaggcatgtgccttctgccacctgactttccgtgaggggactaaaatttactaattgtagttgctgcagccagttaagtcctgtagcttccaggccctcatgtctttgataggagagtgcttaggtggtccccaacagtgcctaggggtacagtacagtcccattacactagagcagggctctatttatttttaaaggatatggccgtgtgttttgataaaactttattcacaaaaacagccgggtcatgggatttggcttgtgagtctgtaacagttcttaaaaagaatatctgagaaactactctgttttagacctttgaaggtgatttagagttttgtgtacatctaggagaaggtgttcagcttctcagaggatgtggacattttggttgcagctaaaaatcagtctctgaagtctctctcccttctagaggttaggacttggtgaacatgtttgtgggccttttgactgagtggcagaaggaaactgctcaggaagagaaacaggtgactgatgggaaggttgattattttctcagtcatcctggcagccaaaaatgtgccaggaaaagaaagaatgtggagcacgcgtggctcctggaggacttggagatgcatgcacatttagggtgttttccctagaattacataatgaaaaaaagaataaggcaaagaggaggtgaatatggggcctgtcacaacggcctgccctgccccaagagggttaagagtcagataatcgggacgaaactggcatggaaagagcgagcctagggaggatgccgctgggcagtgtgcatgggggagctgctgccaggctgccctccagtctgctcctgtggttactggctccacagcacctcagagagggcggccctggcttcagaaatgccagccatagtgctcacaaatgcagaagagatggaagcggtgacagaatcctgaaagtttttattgattgaagttttaaattggtaacttaagcttccttggcacgatacaaaatacctcttaaagacagcaggcttttttatttgtaggtgtgaggaactggctttaacttttttctcctcctagtttgcatgttttccttctctcgtcttctgaactgctggcaccagcagtaatacatactgataaaatcaaaattgatttttaccagtggccagtttatggctagagagacgacttatacctccataacacagaagggggaaaaatgaagaacctccagtgatccgtgaaaacctaaacgctttcaaacaaatcccaggaacagaattgctatcgaaagatatcattgcccagtttgcaggctatgttgagtcagatagaactgaatgtagtgagagctcagagctacagagcctttcagatgaatttgaaaacagactctgtgtgtgtgtgcatatgccnaggggaaggaaataacattgcactttataaacactgtattgtaagtggaaaatgcaatgtcttaaataaaactatttaaaattggcaccataanaa

SEQ ID NO: 303188 - DNA, 4148 bp, Homo sapiens
  misc_feature (394)..(394): n is a, c, g, or t
  misc_feature (4052)..(4052): n is a, c, g, or t
  misc_feature (4146)..(4146): n is a, c, g, or t
ccgatgaggaaaatggtgacttgtgatggcactcaaagcagtatggcccggtaccctaggcaggctgcccaggccgatactcaccctccaggagcatattgaggccattcctagcgacagggccgagaaggcctggtgccagcatggatgactactaaagagaagatgtggtcccagcatgcccaatgaaatcctctcaacagccatcgctcatccatcattcagtcacaacactaactatccccagctcgggcttccacgcacatcaacattcagatgtccctcggtactcacctccaatcatatgctcactcttctcaggttctgtaacatacgagattgttcatcacggcgaatgtacgcgccagtcaaatgctcccgagcgcctcgccanatggtcgatactgttgaggtccgggcatggccacgcgaggcatcagtgatcgaccgcatgccatgcatcgtcgatgcgcccaaaatcgacgatggtgcccactgcactcccatcgggttcacctccccaactgggaaggaagaaggccttagcacccggctcttggctctggtggttttgttctttatcgttggtgtaattattgggaagattgccttgtagaggtagcatgcacaggatggtaaattggattggtggatccaccatatcatgggatttaaatttatcataaccatgtgtaaaaagaaattaatgtatgatgacatctcacaggtcttgcctttaaattacccctccctgcacacacatacacagatacacacacacaaatataatgtaacgatcttttagaaagttaaaaatgtatagtaactgattgagggggaaaagaatgatctttattaatgacaagggaaaccatgagtaatgccacaatggcatattgtaaatgtcattttaaacattggtaggccttggtacatgatgctggattacctctcttaaaatgacacccttcctcgcctgttggtgctggcccttggggagctggagcccagcatgctggggagtgcggtcagctccacacagtagtccccacgtggcccactcccggcccaggctgctttccgtgtcttcagttctgtccaagccatcagctccttgggactgatgaacagagtcagaagcccaaaggaattgcactgtggcagcatcagacgtactcgtcataagtgagaggcgtgtgttgactgattgacccagcgctttggaaataaatggcagtgctttgttcacttaaagggaccaagctaaatttgtattggttcatgtagtgaagtcaaactgttattcagagatgtttaatgcatatttaacttatttaatgtatttcatctcatgttttcttattgtcacaagagtacagttaatgctgcgtgctgctgaactctgttgggtgaactggtattgctgctggagggctgtgggctcctctgtctctggagagtctggtcatgtggaggtggggtttattgggatgctggagaagagctgccaggaagtgttttttctgggtcagtaaataacaactgtcatagggagggaaattctcagtagtgacagtcaactctaggttaccttttttaatgaagagtagtcagtcttctagattgttcttataccacctctcaaccattactcacacttccagcgcccaggtccaagtctgagcctgacctccccttggggacctagcctggagtcaggacaaatggatcgggctgcagagggttagaagcgagggcaccagcagttgtgggtggggagcaagggaagagagaaactcttcagcgaatccttctagtactagttgagagtttgactgtgaattaattttatgccataaaagaccaacccagttctgtttgactatgtagcatcttgaaaagaaaaattataataaagccccaaaattaagaattcttttgtcattttgtcacatttgctctatggggggaattattattttatcatttttattattttgccattggaaggttaactttaaaatgagccctatcactgagaaatacgtgtttcatgatttaactctgtgtgtgtgtgtgtgtgtgtgtgtgtgtgtgtgtgtattttttttttggttgtcttcagctgacagtatgaaaaatgaaactgctgaaaaagctgagcacctggtcacccttggccttccattgctttggccttcagtaaaaagcagcctcccttctaggtcagggaaccatgccattgagactagtaacgggcgttctgggcacagtcccactgtgcacaggtttgagaggacaagttcatcagaaggaaggcagtccttagaagtcacatacgttgagccacgttgctcctaagcctggctctgtcaagctgggtcaggggccttgaaactggagaagtggaagtctatggttggtctgagtaagtaacttcctgtcttcatgaaaaaagttgactttgaatcccaggtactcacagaaatggtgaacagacttagttgttacccaggcacccatggattgtgttgagtgtgcagacagggaggccaccccaataggaattcgtctccaggatttttcccatgtgtcccccagtacttataaaagggagtgaaaagaccgagctgtaaggcatgtgccttctgccacctgactttccgtgaggggactaaaatttactaattgtagttgctgcagccagttaagtcctgtagcttccaggccctcatgtctttgataggagagtgcttaggtggtccccaacagtgcctaggggtacagtacagtcccattacactagagcagggctctatttatttttaaaggatatggccgtgtgttttgataaaactttattcacaaaaacagccgggtcatgggatttggcttgtgagtctgtaacagttcttaaaaagaatatctgagaaactactctgttttagacctttgaaggtgatttagagttttgtgtacatctaggagaaggtgttcagcttctcagaggatgtggacattttggttgcagctaaaaatcagtctctgaagtctctctcccttctagaggttaggacttggtgaacatgtttgtgggccttttgactgagtggcagaaggaaactgctcaggaagagaaacaggtgactgatgggaaggttgattattttctcagtcatcctggcagccaaaaatgtgccaggaaaagaaagaatgtggagcacgcgtggctcctggaggacttggagatgcatgcacatttagggtgttttccctagaattacataatgaaaaaaagaataaggcaaagaggaggtgaatatggggcctgtcacaacggcctgccctgccccaagagggttaagagtcagataatcgggacgaaactggcatggaaagagcgagcctagggaggatgccgctgggcagtgtgcatgggggagctgctgccaggctgccctccagtctgctcctgtggttactggctccacagcacctcagagagggcggccctggcttcagaaatgccagccatagtgctcacaaatgcagaagagatggaagcggtgacagaatcctgaaagtttttattgattgaagttttaaattggtaacttaagcttccttggcacgatacaaaatacctcttaaagacagcaggcttttttatttgtaggtgtgaggaactggctttaacttttttctcctcctagtttgcatgttttccttctctcgtcttctgaactgctggcaccagcagtaatacatactgataaaatcaaaattgatttttaccagtggccagtttatggctagagagacgacttatacctccataacacagaagggggaaaaatgaagaacctccagtgatccgtgaaaacctaaacgctttcaaacaaatcccaggaacagaattgctatcgaaagatatcattgcccagtttgcaggctatgttgagtcagatagaactgaatgtagtgagagctcagagctacagagcctttcagatgaatttgaaaacagactctgtgtgtgtgtgcatatgccnaggggaaggaaataacattgcactttataaacactgtattgtaagtggaaaatgcaatgtcttaaataaaactatttaaaattggcaccataanaa

SEQ ID NO: 303189 - DNA, 2696 bp, Homo sapiens
cgacgccacccgcccgcgccgtcgccccgacggaggaacatggcgaaggtggagcaggtcctgagcctcgagccgcagcacgagctcaaattccgaggtcccttcaccgatgttgtcaccaccaacctaaagcttggcaacccgacagaccgaaatgtgtgttttaaggtgaagactacagcaccacgtaggtactgtgtgaggcccaacagcggaatcatcgatgcaggggcctcaattaatgtatctgtgatgttacagcctttcgattatgatcccaatgagaaaagtaaacacaagtttatggttcagtctatgtttgctccaactgacacttcagatatggaagcagtatggaaggaggcaaaaccggaagaccttatggattcaaaacttagatgtgtgtttgaattgccagcagagaatgataaaccacatgatgtagaaataaataaaattatatccacaactgcatcaaagacagaaacaccaatagtgtctaagtctctgagttcttctttggatgacaccgaagttaagaaggttatggaagaatgtaagaggctgcaaggtgaagttcagaggctacgggaggagaacaagcagttcaaggaagaagatggactgcggatgaggaagacagtgcagagcaacagccccatttcagcattagccccaactgggaaggaagaaggccttagcacccggctcttggctctggtggttttgttctttatcgttggtgtaattattgggaagattgccttgtagaggtagcatgcacaggatggtaaattggattggtggatccaccatatcatgggatttaaatttatcataaccatgtgtaaaaagaaattaatgtatgatgacatctcacaggtcttgcctttaaattacccctccctgcacacacatacacagatacacacacacaaatataatgtaacgatcttttagaaagttaaaaatgtatagtaactgattgagggggaaaagaatgatctttattaatgacaagggaaaccatgagtaatgccacaatggcatattgtaaatgtcattttaaacattggtaggccttggtacatgatgctggattacctctcttaaaatgacacccttcctcgcctgttggtgctggcccttggggagctggagcccagcatgctggggagtgcggtcagctccacacagtagtccccacgtggcccactcccggcccaggctgctttccgtgtcttcagttctgtccaagccatcagctccttgggactgatgaacagagtcagaagcccaaaggaattgcactgtggcagcatcagacgtactcgtcataagtgagaggcgtgtgttgactgattgacccagcgctttggaaataaatggcagtgctttgttcacttaaagggaccaagctaaatttgtattggttcatgtagtgaagtcaaactgttattcagagatgtttaatgcatatttaacttatttaatgtatttcatctcatgttttcttattgtcacaagagtacagttaatgctgcgtgctgctgaactctgttgggtgaactggtattgctgctggagggctgtgggctcctctgtctctggagagtctggtcatgtggaggtggggtttattgggatgctggagaagagctgccaggaagtgttttttctgggtcagtaaataacaactgtcatagggagggaaattctcagtagtgacagtcaactctaggttaccttttttaatgaagagtagtcagtcttctagattgttcttataccacctctcaaccattactcacacttccagcgcccaggtccaagtctgagcctgacctccccttggggacctagcctggagtcaggacaaatggatcgggctgcagagggttagaagcgagggcaccagcagttgtgggtggggagcaagggaagagagaaactcttcagcgaatccttctagtactagttgagagtttgactgtgaattaattttatgccataaaagaccaacccagttctgtttgactatgtagcatcttgaaaagaaaaattataataaagccccaaaattaaaaaaaaaaaaaaaaaaaaaaaaaaaaaaaaaaaaaaaaaaaaaaaaaaaaaaaagaaaaaaaaaaaaaaaaaaaaagagaaaaagaaaagacacgaagcgcacaagccaagcgagcgaaaaaaagaaacaaatccgagaaaagcaagcgaacatgcaagcaaagagtagcaagcacagcacggacaaaaaaacggacacgcacacgacggccaggggcgctacaaagacacaaagccggggaacgaagaaaaaaacaagagaaaaagagcagagagaagaagcacaccaagtgacgaggaacaaagaacacagggacacaggaaacacaagggagcagaagccaagaggaccaaaggataactgcgaacaacgacgcgcacgcgggagcagactggagggcagcgagccgcaacacagcgcgaggacgacagagacaacataaggggcgggaaggatagagacaacaaacaggctggagcggggagggcagcgggaagaaaaaaaacgcggaggagagaggagggggcgcggagcaagagccgcgcgaagggggagggagtgggaacagaagacgcggcgaggagcgcccgaccgagcgaacgtaaaggga

SEQ ID NO: 303190 - DNA, 2022 bp, Homo sapiens
ccccgcccctggagccggcggcgcagggcgcagcttcccgccgccagagcgggccagcctgctgcgtgcgtgcgtgtgtacgactctgcgtgcgtgcgtgcgtgcgtgcgtgccgtcagctcgccgggcaccgcggcctcgccctcgccctccgcccctgcgcctgcaccgcgtagaccgacccccccccagcgcgcccacccggtagaggacccccgcccgtgccccgaccggtccccgcctttttgtaaaacttaaagcgggcgcagcattaacgcttcccgccccggtgacctctcaggggtctccccgccaaaggtgctccgccgctaaggaacatggcgaaggtggagcaggtcctgagcctcgagccgcagcacgagctcaaattccgaggtcccttcaccgatgttgtcaccaccaacctaaagcttggcaacccgacagaccgaaatgtgtgttttaaggtgaagactacagcaccacgtaggtactgtgtgaggcccaacagcggaatcatcgatgcaggggcctcaattaatgtatctggaagaagatggactgcggatgaggaagacagtgcagagcaacagccccatttcagcattagccccaactgggaaggaagaaggccttagcacccggctcttggctctggtggttttgttctttatcgttggtgtaattattgggaagattgccttgtagaggtagcatgcacaggatggtaaattggattggtggatccaccatatcatgggatttaaatttatcataaccatgtgtaaaaagaaattaatgtatgatgacatctcacaggtcttgcctttaaattacccctccctgcacacacatacacagatacacacacacaaatataatgtaacgatcttttagaaagttaaaaatgtatagtaactgattgagggggaaaagaatgatctttattaatgacaagggaaaccatgagtaatgccacaatggcatattgtaaatgtcattttaaacattggtaggccttggtacatgatgctggattacctctcttaaaatgacacccttcctcgcctgttggtgctggcccttggggagctggagcccagcatgctggggagtgcggtcagctccacacagtagtccccacgtggcccactcccggcccaggctgctttccgtgtcttcagttctgtccaagccatcagctccttgggactgatgaacagagtcagaagcccaaaggaattgcactgtggcagcatcagacgtactcgtcataagtgagaggcgtgtgttgactgattgacccagcgctttggaaataaatggcagtgctttgttcacttaaagggaccaagctaaatttgtattggttcatgtagtgaagtcaaactgttattcagagatgtttaatgcatatttaacttatttaatgtatttcatctcatgttttcttattgtcacaagagtacagttaatgctgcgtgctgctgaactctgttgggtgaactggtattgctgctggagggctgtgggctcctctgtctctggagagtctggtcatgtggaggtggggtttattgggatgctggagaagagctgccaggaagtgttttttctgggtcagtaaataacaactgtcatagggagggaaattctcagtagtgacagtcaactctaggttaccttttttaatgaagagtagtcagtcttctagattgttcttataccacctctcaaccattactcacacttccagcgcccaggtccaagtctgagcctgacctccccttggggacctagcctggagtcaggacaaatggatcgggctgcagagggttagaagcgagggcaccagcagttgtgggtggggagcaagggaagagagaaactcttcagcgaatccttctagtactagttgagagtttgactgtgaattaattttatgccataaaagaccaacccagttctgtttgactatgtagcatcttgaaaagaaaaattataataaagccccaaaattaa

SEQ ID NO: 303191 - DNA, 3447 bp, Homo sapiens
  misc_feature (47)..(47): n is a, c, g, or t
  misc_feature (57)..(57): n is a, c, g, or t
  misc_feature (70)..(70): n is a, c, g, or t
  misc_feature (72)..(72): n is a, c, g, or t
  misc_feature (3351)..(3351): n is a, c, g, or t
  misc_feature (3445)..(3445): n is a, c, g, or t
gttcaatggacagggaaggcaaaaggacaagagaaaaaatgaatcanatagccacanccagacacaatantnaacaacacaaatataatgtaacgatcttttagaaagttaaaaatgtatagtaactgattgagggggaaaagaatgatctttattaatgacaagggaaaccatgagtaatgccacaatggcatattgtaaatgtcattttaaacattggtaggccttggtacatgatgctggattacctctcttaaaatgacacccttcctcgcctgttggtgctggcccttggggagctggagcccagcatgctggggagtgcggtcagctccacacagtagtccccacgtggcccactcccggcccaggctgctttccgtgtcttcagttctgtccaagccatcagctccttgggactgatgaacagagtcagaagcccaaaggaattgcactgtggcagcatcagacgtactcgtcataagtgagaggcgtgtgttgactgattgacccagcgctttggaaataaatggcagtgctttgttcacttaaagggaccaagctaaatttgtattggttcatgtagtgaagtcaaactgttattcagagatgtttaatgcatatttaacttatttaatgtatttcatctcatgttttcttattgtcacaagagtacagttaatgctgcgtgctgctgaactctgttgggtgaactggtattgctgctggagggctgtgggctcctctgtctctggagagtctggtcatgtggaggtggggtttattgggatgctggagaagagctgccaggaagtgttttttctgggtcagtaaataacaactgtcatagggagggaaattctcagtagtgacagtcaactctaggttaccttttttaatgaagagtagtcagtcttctagattgttcttataccacctctcaaccattactcacacttccagcgcccaggtccaagtctgagcctgacctccccttggggacctagcctggagtcaggacaaatggatcgggctgcagagggttagaagcgagggcaccagcagttgtgggtggggagcaagggaagagagaaactcttcagcgaatccttctagtactagttgagagtttgactgtgaattaattttatgccataaaagaccaacccagttctgtttgactatgtagcatcttgaaaagaaaaattataataaagccccaaaattaagaattcttttgtcattttgtcacatttgctctatggggggaattattattttatcatttttattattttgccattggaaggttaactttaaaatgagccctatcactgagaaatacgtgtttcatgatttaactctgtgtgtgtgtgtgtgtgtgtgtgtgtgtgtgtgtgtattttttttttggttgtcttcagctgacagtatgaaaaatgaaactgctgaaaaagctgagcacctggtcacccttggccttccattgctttggccttcagtaaaaagcagcctcccttctaggtcagggaaccatgccattgagactagtaacgggcgttctgggcacagtcccactgtgcacaggtttgagaggacaagttcatcagaaggaaggcagtccttagaagtcacatacgttgagccacgttgctcctaagcctggctctgtcaagctgggtcaggggccttgaaactggagaagtggaagtctatggttggtctgagtaagtaacttcctgtcttcatgaaaaaagttgactttgaatcccaggtactcacagaaatggtgaacagacttagttgttacccaggcacccatggattgtgttgagtgtgcagacagggaggccaccccaataggaattcgtctccaggatttttcccatgtgtcccccagtacttataaaagggagtgaaaagaccgagctgtaaggcatgtgccttctgccacctgactttccgtgaggggactaaaatttactaattgtagttgctgcagccagttaagtcctgtagcttccaggccctcatgtctttgataggagagtgcttaggtggtccccaacagtgcctaggggtacagtacagtcccattacactagagcagggctctatttatttttaaaggatatggccgtgtgttttgataaaactttattcacaaaaacagccgggtcatgggatttggcttgtgagtctgtaacagttcttaaaaagaatatctgagaaactactctgttttagacctttgaaggtgatttagagttttgtgtacatctaggagaaggtgttcagcttctcagaggatgtggacattttggttgcagctaaaaatcagtctctgaagtctctctcccttctagaggttaggacttggtgaacatgtttgtgggccttttgactgagtggcagaaggaaactgctcaggaagagaaacaggtgactgatgggaaggttgattattttctcagtcatcctggcagccaaaaatgtgccaggaaaagaaagaatgtggagcacgcgtggctcctggaggacttggagatgcatgcacatttagggtgttttccctagaattacataatgaaaaaaagaataaggcaaagaggaggtgaatatggggcctgtcacaacggcctgccctgccccaagagggttaagagtcagataatcgggacgaaactggcatggaaagagcgagcctagggaggatgccgctgggcagtgtgcatgggggagctgctgccaggctgccctccagtctgctcctgtggttactggctccacagcacctcagagagggcggccctggcttcagaaatgccagccatagtgctcacaaatgcagaagagatggaagcggtgacagaatcctgaaagtttttattgattgaagttttaaattggtaacttaagcttccttggcacgatacaaaatacctcttaaagacagcaggcttttttatttgtaggtgtgaggaactggctttaacttttttctcctcctagtttgcatgttttccttctctcgtcttctgaactgctggcaccagcagtaatacatactgataaaatcaaaattgatttttaccagtggccagtttatggctagagagacgacttatacctccataacacagaagggggaaaaatgaagaacctccagtgatccgtgaaaacctaaacgctttcaaacaaatcccaggaacagaattgctatcgaaagatatcattgcccagtttgcaggctatgttgagtcagatagaactgaatgtagtgagagctcagagctacagagcctttcagatgaatttgaaaacagactctgtgtgtgtgtgcatatgccnaggggaaggaaataacattgcactttataaacactgtattgtaagtggaaaatgcaatgtcttaaataaaactatttaaaattggcaccataanaa

SEQ ID NO: 303192 - DNA, 2793 bp, Homo sapiens
  misc_feature (2697)..(2697): n is a, c, g, or t
  misc_feature (2791)..(2791): n is a, c, g, or t
ccgcatcatcaacacggagcagtacatgcactcacttcgtgggcagcgctgcccacgaagtggtattgctgctggagggctgtgggctcctctgtctctggagagtctggtcatgtggaggtggggtttattgggatgctggagaagagctgccaggaagtgttttttctgggtcagtaaataacaactgtcatagggagggaaattctcagtagtgacagtcaactctaggttaccttttttaatgaagagtagtcagtcttctagattgttcttataccacctctcaaccattactcacacttccagcgcccaggtccaagtctgagcctgacctccccttggggacctagcctggagtcaggacaaatggatcgggctgcagagggttagaagcgagggcaccagcagttgtgggtggggagcaagggaagagagaaactcttcagcgaatccttctagtactagttgagagtttgactgtgaattaattttatgccataaaagaccaacccagttctgtttgactatgtagcatcttgaaaagaaaaattataataaagccccaaaattaagaattcttttgtcattttgtcacatttgctctatggggggaattattattttatcatttttattattttgccattggaaggttaactttaaaatgagccctatcactgagaaatacgtgtttcatgatttaactctgtgtgtgtgtgtgtgtgtgtgtgtgtgtgtgtgtgtattttttttttggttgtcttcagctgacagtatgaaaaatgaaactgctgaaaaagctgagcacctggtcacccttggccttccattgctttggccttcagtaaaaagcagcctcccttctaggtcagggaaccatgccattgagactagtaacgggcgttctgggcacagtcccactgtgcacaggtttgagaggacaagttcatcagaaggaaggcagtccttagaagtcacatacgttgagccacgttgctcctaagcctggctctgtcaagctgggtcaggggccttgaaactggagaagtggaagtctatggttggtctgagtaagtaacttcctgtcttcatgaaaaaagttgactttgaatcccaggtactcacagaaatggtgaacagacttagttgttacccaggcacccatggattgtgttgagtgtgcagacagggaggccaccccaataggaattcgtctccaggatttttcccatgtgtcccccagtacttataaaagggagtgaaaagaccgagctgtaaggcatgtgccttctgccacctgactttccgtgaggggactaaaatttactaattgtagttgctgcagccagttaagtcctgtagcttccaggccctcatgtctttgataggagagtgcttaggtggtccccaacagtgcctaggggtacagtacagtcccattacactagagcagggctctatttatttttaaaggatatggccgtgtgttttgataaaactttattcacaaaaacagccgggtcatgggatttggcttgtgagtctgtaacagttcttaaaaagaatatctgagaaactactctgttttagacctttgaaggtgatttagagttttgtgtacatctaggagaaggtgttcagcttctcagaggatgtggacattttggttgcagctaaaaatcagtctctgaagtctctctcccttctagaggttaggacttggtgaacatgtttgtgggccttttgactgagtggcagaaggaaactgctcaggaagagaaacaggtgactgatgggaaggttgattattttctcagtcatcctggcagccaaaaatgtgccaggaaaagaaagaatgtggagcacgcgtggctcctggaggacttggagatgcatgcacatttagggtgttttccctagaattacataatgaaaaaaagaataaggcaaagaggaggtgaatatggggcctgtcacaacggcctgccctgccccaagagggttaagagtcagataatcgggacgaaactggcatggaaagagcgagcctagggaggatgccgctgggcagtgtgcatgggggagctgctgccaggctgccctccagtctgctcctgtggttactggctccacagcacctcagagagggcggccctggcttcagaaatgccagccatagtgctcacaaatgcagaagagatggaagcggtgacagaatcctgaaagtttttattgattgaagttttaaattggtaacttaagcttccttggcacgatacaaaatacctcttaaagacagcaggcttttttatttgtaggtgtgaggaactggctttaacttttttctcctcctagtttgcatgttttccttctctcgtcttctgaactgctggcaccagcagtaatacatactgataaaatcaaaattgatttttaccagtggccagtttatggctagagagacgacttatacctccataacacagaagggggaaaaatgaagaacctccagtgatccgtgaaaacctaaacgctttcaaacaaatcccaggaacagaattgctatcgaaagatatcattgcccagtttgcaggctatgttgagtcagatagaactgaatgtagtgagagctcagagctacagagcctttcagatgaatttgaaaacagactctgtgtgtgtgtgcatatgccnaggggaaggaaataacattgcactttataaacactgtattgtaagtggaaaatgcaatgtcttaaataaaactatttaaaattggcaccataanaa

SEQ ID NO: 303193 - DNA, 1503 bp, Homo sapiens
ccccgcccctggagccggcggcgcagggcgcagcttcccgccgccagagcgggccagcctgctgcgtgcgtgcgtgtgtacgactctgcgtgcgtgcgtgcgtgcgtgcgtgccgtcagctcgccgggcaccgcggcctcgccctcgccctccgcccctgcgcctgcaccgcgtagaccgacccccccccagcgcgcccacccggtagaggacccccgcccgtgccccgaccggtccccgcctttttgtaaaacttaaagcgggcgcagcattaacgcttcccgccccggtgacctctcaggggtctccccgccaaaggtgctccgccgctaaggaacatggcgaaggtggagcaggtcctgagcctcgagccgcagcacgagctcaaattccgaggtcccttcaccgatgttgtcaccaccaacctaaagcttggcaacccgacagaccgaaatgtgtgttttaaggtgaagactacagcaccacgtaggtactgtgtgaggcccaacagcggaatcatcgatgcaggggcctcaattaatgtatctgtgatgttacagcctttcgattatgatcccaatgagaaaagtaaacacaagtttatggttcagtctatgtttgctccaactgacacttcagatatggaagcagtatggaaggaggcaaaaccggaagaccttatggattcaaaacttagatgtgtgtttgaattgccagcagagaatgataaaccacatgatgtagaaataaataaaattatatccacaactgcatcaaagacagaaacaccaatagtgtctaagtctctgagttcttctttggatgacaccgaagttaagaaggttatggaagaatgtaagaggctgcaaggtgaagttcagaggctacgggaggagaacaagcagttcaaggaagaagatggactgcggatgaggaagacagtgcagagcaacagccccatttcagcattagccccaactgggaaggaagaaggccttagcacccggctcttggctctggtggttttgttctttatcgttggtgtaattattgggaagattgccttgtagaggtagcatgcacaggatggtaaattggattggtggatccaccatatcatgggatttaaatttatcataaccatgtgtaaaaagaaattaatgtatgatgacatctcacaggtcttgcctttaaattacccctccctgcacacacatacacagatacacacttccagcgcccaggtccaagtctgagcctgacctccccttggggacctagcctggagtcaggacaaatggatcgggctgcagagggttagaagcgagggcaccagcagttgtgggtggggagcaagggaagagagaaactcttcagcgaatccttctagtactagttgagagtttgactgtgaattaattttatgccataaaagaccaacccagttctgtttgactatgtagcatcttgaaaagaaaaattataataaagccccaaaattaa

SEQ ID NO: 303194 - DNA, 1503 bp, Homo sapiens
ccccgcccctggagccggcggcgcagggcgcagcttcccgccgccagagcgggccagcctgctgcgtgcgtgcgtgtgtacgactctgcgtgcgtgcgtgcgtgcgtgcgtgccgtcagctcgccgggcaccgcggcctcgccctcgccctccgcccctgcgcctgcaccgcgtagaccgacccccccccagcgcgcccacccggtagaggacccccgcccgtgccccgaccggtccccgcctttttgtaaaacttaaagcgggcgcagcattaacgcttcccgccccggtgacctctcaggggtctccccgccaaaggtgctccgccgctaaggaacatggcgaaggtggagcaggtcctgagcctcgagccgcagcacgagctcaaattccgaggtcccttcaccgatgttgtcaccaccaacctaaagcttggcaacccgacagaccgaaatgtgtgttttaaggtgaagactacagcaccacgtaggtactgtgtgaggcccaacagcggaatcatcgatgcaggggcctcaattaatgtatctgtgatgttacagcctttcgattatgatcccaatgagaaaagtaaacacaagtttatggttcagtctatgtttgctccaactgacacttcagatatggaagcagtatggaaggaggcaaaaccggaagaccttatggattcaaaacttagatgtgtgtttgaattgccagcagagaatgataaaccaactagtgaccgggcggggggtggaggaagaggcctcgcgcagaggagggagcaattgaatttcaaacacaaacaactgcacgagcgcgcacccaccgcgccggagccttgccccgatccgcgcccgccccgtccgtgcggcgcgcgggcggagacgccgtggccgcgccggagctcgggccgggggccaccatcgaggcgggggccgcgcgagggccggagcggagcggcgccgcaccgccgacgcgcaaacttgggctcgcgcttcccggcccggcgcggagcccggggcgcccggagccccgccatgtcgcgatccaaccgggcagaaggagtacaaatgcggggacctggtgttcgccaagatgaagggctacccacactggccggccggattgacgagatgcctgaggctgcgtgaaatcaacagccaagaaatacaagtcttgttgtcgggaccacgagacggcatccctgggcccagagaactcttcccttacggggatccaggagaagtgggaagccacaagagaaggttcagcgagggtgtggacatcgagaaaactcctgaagagtcggcataagctccgaaagatggtgacacctgacaaacgaagtgcaggagcgaaacaggacgaaggcaagagagaagcagggcagaggcgcgaaaacacaggcacgaaggaacggagcaatcaaggaactgaagaggacacgacgcaggaacacgtacacagaacgagaaggcacacaagcaggggaacagtaaa

SEQ ID NO: 303195 - DNA, 2465 bp, Homo sapiens
actttcctttcccctttcataaaagcacagacctaacagcaccctgggtggaaacctcttcagcatttgcttggaatcagtaagctaaaaacaaaatcaaccgggaccccagcttttcagaactgcagggaaacagccatcatgagtgaggtcaccaagaattccctggagaaaatccttccacagctgaaatgccatttcacctggaacttattcaaggaagacagtgtctcaagggatctagaagatagagtgtgtaaccagattgaatttttaaacactgagttcaaagctacaatgtacaacttgttggcctacataaaacacctagatggtaacaacgaggcagccctggaatgcttacggcaagctgaagagttaatccagcaagaacatgctgaccaagcagaaatcagaagtctagtcacttggggaaactacgcctgggtctactatcacttgggcagactctcagatgctcagatttatgtagataaggtgaaacaaacctgcaagaaattttcaaatccatacagtattgagtattctgaacttgactgtgaggaagggtggacacaactgaagtgtggaagaaatgaaagggcgaaggtgtgttttgagaaggctctggaagaaaagcccaacaacccagaattctcctctggactggcaattgcgatgtaccatctggataatcacccagagaaacagttctctactgatgttttgaagcaggccattgagctgagtcctgataaccaatacgtcaaggttctcttgggcctgaaactgcagaagatgaataaagaagctgaaggagagcagtttgttgaagaagccttggaaaagtctccttgccaaacagatgtcctccgcagtgcagccaaattttacagaagaaaaggtgacctagacaaagctattgaactgtttcaacgggtgttggaatccacaccaaacaatggctacctctatcaccagattgggtgctgctacaaggcaaaagtaagacaaatgcagaatacaggagaatctgaagctagtggaaataaagagatgattgaagcactaaagcaatatgctatggactattcgaataaagctcttgagaagggactgaatcctctgaatgcatactccgatctcgctgagttcctggagacggaatgttatcagacaccattcaataaggaagtccctgatgctgaaaagcaacaatcccatcagcgctactgcaaccttcagaaatataatgggaagtctgaagacactgctgtgcaacatggtttagagggtttgtccataagcaaaaaatcaactgacaaggaagagatcaaagaccaaccacagaatgtatctgaaaatctgcttccacaaaatgcaccaaattattggtatcttcaaggattaattcataagcagaatggagatctgctgcaagcagccaaatgttatgagaaggaactgggccgcctgctaagggatgccccttcaggcataggcagtattttcctgtcagcatctgagcttgaggatggtagtgaggaaatgggccagggcgcagtcagctccagtcccagagagctcctctctaactcagagcaactgaactgagacagaggaggaaaacagagcatcagaagcctgcagtggtggttgtgacgggtaggaggataggaagacagggggccccaacctgggattgctgagcagggaagctttgcatgttgctctaaggtacatttttaaagagttgttttttggccgggcgcagtggctcatgcctgtaatcccagcactttgggaggccgaggtgggcggatcacgaggtctggagtttgagaccatcctggctaacacagtgaaatcccgtctctactaaaaatacaaaaaattagccaggcgtggtggctggcacctgtagtcccagctacttgggaggctgaggcaggagaatggcgtgaacctggaaggaagaggttgcagtgagccaagattgcgcccctgcactccagcctgggcaacagagcaagactccatctcaaaaaaaaaaaaaaaaaaaaaaaagagttgttttctcatgttcattatagttcattacagttacatagtccgaaggtcttacaactaatcactggtagcaataaatgcttcaggcccacatgatgctgattagttctcagttttcattcagttcacaatataaccaccattcctgccctccctgccaagggtcataaatggtgactgcctaacaacaaaatttgcagtctcatctcattttcatccagacttctggaactcaaagattaacttttgactaaccctggaatatctcttatctcacttatagcttcaggcatgtatttatatgtattcttgatagcaataccataatcaatgtgtattcctgatagtaatgctacaataaatccaaacatttcaactctgttaaaaaaaaaaat

SEQ ID NO: 303196 - DNA, 2504 bp, Homo sapiens
cttccttcccctaaaagcaattactcaaaaacggagaaaacatcagctgatgcgtgccctactctcccacccctttatatagttccttcagtatttacttgaggcagacaggaagacttctgaagaacaaatcagcctggtcaccagcttttcggaacagcagagacacagagggcagtcatgagtgaggtcaccaagaattccctggagaaaatccttccacagctgaaatgccatttcacctggaacttattcaaggaagacagtgtctcaagggatctagaagatagagtgtgtaaccagattgaatttttaaacactgagttcaaagctacaatgtacaacttgttggcctacataaaacacctagatggtaacaacgaggcagccctggaatgcttacggcaagctgaagagttaatccagcaagaacatgctgaccaagcagaaatcagaagtctagtcacttggggaaactacgcctgggtctactatcacttgggcagactctcagatgctcagatttatgtagataaggtgaaacaaacctgcaagaaattttcaaatccatacagtattgagtattctgaacttgactgtgaggaagggtggacacaactgaagtgtggaagaaatgaaagggcgaaggtgtgttttgagaaggctctggaagaaaagcccaacaacccagaattctcctctggactggcaattgcgatgtaccatctggataatcacccagagaaacagttctctactgatgttttgaagcaggccattgagctgagtcctgataaccaatacgtcaaggttctcttgggcctgaaactgcagaagatgaataaagaagctgaaggagagcagtttgttgaagaagccttggaaaagtctccttgccaaacagatgtcctccgcagtgcagccaaattttacagaagaaaaggtgacctagacaaagctattgaactgtttcaacgggtgttggaatccacaccaaacaatggctacctctatcaccagattgggtgctgctacaaggcaaaagtaagacaaatgcagaatacaggagaatctgaagctagtggaaataaagagatgattgaagcactaaagcaatatgctatggactattcgaataaagctcttgagaagggactgaatcctctgaatgcatactccgatctcgctgagttcctggagacggaatgttatcagacaccattcaataaggaagtccctgatgctgaaaagcaacaatcccatcagcgctactgcaaccttcagaaatataatgggaagtctgaagacactgctgtgcaacatggtttagagggtttgtccataagcaaaaaatcaactgacaaggaagagatcaaagaccaaccacagaatgtatctgaaaatctgcttccacaaaatgcaccaaattattggtatcttcaaggattaattcataagcagaatggagatctgctgcaagcagccaaatgttatgagaaggaactgggccgcctgctaagggatgccccttcaggcataggcagtattttcctgtcagcatctgagcttgaggatggtagtgaggaaatgggccagggcgcagtcagctccagtcccagagagctcctctctaactcagagcaactgaactgagacagaggaggaaaacagagcatcagaagcctgcagtggtggttgtgacgggtaggaggataggaagacagggggccccaacctgggattgctgagcagggaagctttgcatgttgctctaaggtacatttttaaagagttgttttttggccgggcgcagtggctcatgcctgtaatcccagcactttgggaggccgaggtgggcggatcacgaggtctggagtttgagaccatcctggctaacacagtgaaatcccgtctctactaaaaatacaaaaaattagccaggcgtggtggctggcacctgtagtcccagctacttgggaggctgaggcaggagaatggcgtgaacctggaaggaagaggttgcagtgagccaagattgcgcccctgcactccagcctgggcaacagagcaagactccatctcaaaaaaaaaaaaaaaaaaaaaaaagagttgttttctcatgttcattatagttcattacagttacatagtccgaaggtcttacaactaatcactggtagcaataaatgcttcaggcccacatgatgctgattagttctcagttttcattcagttcacaatataaccaccattcctgccctccctgccaagggtcataaatggtgactgcctaacaacaaaatttgcagtctcatctcattttcatccagacttctggaactcaaagattaacttttgactaaccctggaatatctcttatctcacttatagcttcaggcatgtatttatatgtattcttgatagcaataccataatcaatgtgtattcctgatagtaatgctacaataaatccaaacatttcaactctgttaaaaaaaaaaat

SEQ ID NO: 303197 - DNA, 2622 bp, Homo sapiens
cttccttcccctaaaagcaattactcaaaaacggagaaaacatcagctgatgcgtgccctactctcccacccctttatatagttccttcagtatttacttgaggcagacaggaagacttctgaagaacaaatcagcctggtcaccagcttttcggaacagcagagacacagagggcagtcatgagggtcccactctatcaccctggctggagtgtaatggtgtgatctcagctcactacaacttttgcctcctgggctcaagtgatcctcctgtctcagcctcccgaatggcgaggactacagtgaggtcaccaagaattccctggagaaaatccttccacagctgaaatgccatttcacctggaacttattcaaggaagacagtgtctcaagggatctagaagatagagtgtgtaaccagattgaatttttaaacactgagttcaaagctacaatgtacaacttgttggcctacataaaacacctagatggtaacaacgaggcagccctggaatgcttacggcaagctgaagagttaatccagcaagaacatgctgaccaagcagaaatcagaagtctagtcacttggggaaactacgcctgggtctactatcacttgggcagactctcagatgctcagatttatgtagataaggtgaaacaaacctgcaagaaattttcaaatccatacagtattgagtattctgaacttgactgtgaggaagggtggacacaactgaagtgtggaagaaatgaaagggcgaaggtgtgttttgagaaggctctggaagaaaagcccaacaacccagaattctcctctggactggcaattgcgatgtaccatctggataatcacccagagaaacagttctctactgatgttttgaagcaggccattgagctgagtcctgataaccaatacgtcaaggttctcttgggcctgaaactgcagaagatgaataaagaagctgaaggagagcagtttgttgaagaagccttggaaaagtctccttgccaaacagatgtcctccgcagtgcagccaaattttacagaagaaaaggtgacctagacaaagctattgaactgtttcaacgggtgttggaatccacaccaaacaatggctacctctatcaccagattgggtgctgctacaaggcaaaagtaagacaaatgcagaatacaggagaatctgaagctagtggaaataaagagatgattgaagcactaaagcaatatgctatggactattcgaataaagctcttgagaagggactgaatcctctgaatgcatactccgatctcgctgagttcctggagacggaatgttatcagacaccattcaataaggaagtccctgatgctgaaaagcaacaatcccatcagcgctactgcaaccttcagaaatataatgggaagtctgaagacactgctgtgcaacatggtttagagggtttgtccataagcaaaaaatcaactgacaaggaagagatcaaagaccaaccacagaatgtatctgaaaatctgcttccacaaaatgcaccaaattattggtatcttcaaggattaattcataagcagaatggagatctgctgcaagcagccaaatgttatgagaaggaactgggccgcctgctaagggatgccccttcaggcataggcagtattttcctgtcagcatctgagcttgaggatggtagtgaggaaatgggccagggcgcagtcagctccagtcccagagagctcctctctaactcagagcaactgaactgagacagaggaggaaaacagagcatcagaagcctgcagtggtggttgtgacgggtaggaggataggaagacagggggccccaacctgggattgctgagcagggaagctttgcatgttgctctaaggtacatttttaaagagttgttttttggccgggcgcagtggctcatgcctgtaatcccagcactttgggaggccgaggtgggcggatcacgaggtctggagtttgagaccatcctggctaacacagtgaaatcccgtctctactaaaaatacaaaaaattagccaggcgtggtggctggcacctgtagtcccagctacttgggaggctgaggcaggagaatggcgtgaacctggaaggaagaggttgcagtgagccaagattgcgcccctgcactccagcctgggcaacagagcaagactccatctcaaaaaaaaaaaaaaaaaaaaaaaagagttgttttctcatgttcattatagttcattacagttacatagtccgaaggtcttacaactaatcactggtagcaataaatgcttcaggcccacatgatgctgattagttctcagttttcattcagttcacaatataaccaccattcctgccctccctgccaagggtcataaatggtgactgcctaacaacaaaatttgcagtctcatctcattttcatccagacttctggaactcaaagattaacttttgactaaccctggaatatctcttatctcacttatagcttcaggcatgtatttatatgtattcttgatagcaataccataatcaatgtgtattcctgatagtaatgctacaataaatccaaacatttcaactctgttaaaaaaaaaaat

SEQ ID NO: 303198 - DNA, 2205 bp, Homo sapiens
actttcctttcccctttcataaaagcacagacctaacagcaccctgggtggaaacctcttcagcatttgcttggaatcaaacgaggcagccctggaatgcttacggcaagctgaagagttaatccagcaagaacatgctgaccaagcagaaatcagaagtctagtcacttggggaaactacgcctgggtctactatcacttgggcagactctcagatgctcagatttatgtagataaggtgaaacaaacctgcaagaaattttcaaatccatacagtattgagtattctgaacttgactgtgaggaagggtggacacaactgaagtgtggaagaaatgaaagggcgaaggtgtgttttgagaaggctctggaagaaaagcccaacaacccagaattctcctctggactggcaattgcgatgtaccatctggataatcacccagagaaacagttctctactgatgttttgaagcaggccattgagctgagtcctgataaccaatacgtcaaggttctcttgggcctgaaactgcagaagatgaataaagaagctgaaggagagcagtttgttgaagaagccttggaaaagtctccttgccaaacagatgtcctccgcagtgcagccaaattttacagaagaaaaggtgacctagacaaagctattgaactgtttcaacgggtgttggaatccacaccaaacaatggctacctctatcaccagattgggtgctgctacaaggcaaaagtaagacaaatgcagaatacaggagaatctgaagctagtggaaataaagagatgattgaagcactaaagcaatatgctatggactattcgaataaagctcttgagaagggactgaatcctctgaatgcatactccgatctcgctgagttcctggagacggaatgttatcagacaccattcaataaggaagtccctgatgctgaaaagcaacaatcccatcagcgctactgcaaccttcagaaatataatgggaagtctgaagacactgctgtgcaacatggtttagagggtttgtccataagcaaaaaatcaactgacaaggaagagatcaaagaccaaccacagaatgtatctgaaaatctgcttccacaaaatgcaccaaattattggtatcttcaaggattaattcataagcagaatggagatctgctgcaagcagccaaatgttatgagaaggaactgggccgcctgctaagggatgccccttcaggcataggcagtattttcctgtcagcatctgagcttgaggatggtagtgaggaaatgggccagggcgcagtcagctccagtcccagagagctcctctctaactcagagcaactgaactgagacagaggaggaaaacagagcatcagaagcctgcagtggtggttgtgacgggtaggaggataggaagacagggggccccaacctgggattgctgagcagggaagctttgcatgttgctctaaggtacatttttaaagagttgttttttggccgggcgcagtggctcatgcctgtaatcccagcactttgggaggccgaggtgggcggatcacgaggtctggagtttgagaccatcctggctaacacagtgaaatcccgtctctactaaaaatacaaaaaattagccaggcgtggtggctggcacctgtagtcccagctacttgggaggctgaggcaggagaatggcgtgaacctggaaggaagaggttgcagtgagccaagattgcgcccctgcactccagcctgggcaacagagcaagactccatctcaaaaaaaaaaaaaaaaaaaaaaaagagttgttttctcatgttcattatagttcattacagttacatagtccgaaggtcttacaactaatcactggtagcaataaatgcttcaggcccacatgatgctgattagttctcagttttcattcagttcacaatataaccaccattcctgccctccctgccaagggtcataaatggtgactgcctaacaacaaaatttgcagtctcatctcattttcatccagacttctggaactcaaagattaacttttgactaaccctggaatatctcttatctcacttatagcttcaggcatgtatttatatgtattcttgatagcaataccataatcaatgtgtattcctgatagtaatgctacaataaatccaaacatttcaactctgttaaaaaaaaaaat

SEQ ID NO: 303199 - DNA, 2434 bp, Homo sapiens
actttcctttcccctttcataaaagcacagacctaacagcaccctgggtggaaacctcttcagcatttgcttggaatcagtaagctaaaaacaaaatcaaccgggaccccagcttttcagaactgcagggaaacagccatcatgagtgaggtcaccaagaattccctggagaaaatccttccacagctgaaatgccatttcacctggaacttattcaaggaagacagtgtctcaagggatctagaagatagagtgtgtaaccagattgaatttttaaacactgagttcaaagctacaatgtacaacttgttggcctacataaaacacctagatggtaacaacgaggcagccctggaatgcttacggcaagctgaagagttaatccagcaagaacatgctgaccaagcagaaatcagaagtctagtcacttggggaaactacgcctgggtctactatcacttgggcagactctcagatgctcagatttatgtagataaggtgaaacaaacctgcaagaaattttcaaatccatacagtattgagtattctgaacttgactgtgaggaagggtggacacaactgaagtgtggaagaaatgaaagggcgaaggtgtgttttgagaaggctcttctggactggcaattgcgatgtaccatctggataatcacccagagaaacagttctctactgatgttttgaagcaggccattgagctgagtcctgataaccaatacgtcaaggttctcttgggcctgaaactgcagaagatgaataaagaagctgaaggagagcagtttgttgaagaagccttggaaaagtctccttgccaaacagatgtcctccgcagtgcagccaaattttacagaagaaaaggtgacctagacaaagctattgaactgtttcaacgggtgttggaatccacaccaaacaatggctacctctatcaccagattgggtgctgctacaaggcaaaagtaagacaaatgcagaatacaggagaatctgaagctagtggaaataaagagatgattgaagcactaaagcaatatgctatggactattcgaataaagctcttgagaagggactgaatcctctgaatgcatactccgatctcgctgagttcctggagacggaatgttatcagacaccattcaataaggaagtccctgatgctgaaaagcaacaatcccatcagcgctactgcaaccttcagaaatataatgggaagtctgaagacactgctgtgcaacatggtttagagggtttgtccataagcaaaaaatcaactgacaaggaagagatcaaagaccaaccacagaatgtatctgaaaatctgcttccacaaaatgcaccaaattattggtatcttcaaggattaattcataagcagaatggagatctgctgcaagcagccaaatgttatgagaaggaactgggccgcctgctaagggatgccccttcaggcataggcagtattttcctgtcagcatctgagcttgaggatggtagtgaggaaatgggccagggcgcagtcagctccagtcccagagagctcctctctaactcagagcaactgaactgagacagaggaggaaaacagagcatcagaagcctgcagtggtggttgtgacgggtaggaggataggaagacagggggccccaacctgggattgctgagcagggaagctttgcatgttgctctaaggtacatttttaaagagttgttttttggccgggcgcagtggctcatgcctgtaatcccagcactttgggaggccgaggtgggcggatcacgaggtctggagtttgagaccatcctggctaacacagtgaaatcccgtctctactaaaaatacaaaaaattagccaggcgtggtggctggcacctgtagtcccagctacttgggaggctgaggcaggagaatggcgtgaacctggaaggaagaggttgcagtgagccaagattgcgcccctgcactccagcctgggcaacagagcaagactccatctcaaaaaaaaaaaaaaaaaaaaaaaagagttgttttctcatgttcattatagttcattacagttacatagtccgaaggtcttacaactaatcactggtagcaataaatgcttcaggcccacatgatgctgattagttctcagttttcattcagttcacaatataaccaccattcctgccctccctgccaagggtcataaatggtgactgcctaacaacaaaatttgcagtctcatctcattttcatccagacttctggaactcaaagattaacttttgactaaccctggaatatctcttatctcacttatagcttcaggcatgtatttatatgtattcttgatagcaataccataatcaatgtgtattcctgatagtaatgctacaataaatccaaacatttcaactctgttaaaaaaaaaaat

SEQ ID NO: 303200 - DNA, 2437 bp, Homo sapiens
cttccttcccctaaaagcaattactcaaaaacggagaaaacatcagctgatgcgtgccctactctcccacccctttatatagttccttcagtatttacttgaggcagacaggaagacttctgaagaacaaatcagcctggtcaccagcttttcggaacagcagagacacagagggcagtcatgagtgaggtcaccaagaattccctggagaaaatccttccacagctgaaatgccatttcacctggaacttattcaaggaagacagtgtctcaagggatctagaagatagagtgtgtaaccagattgaatttttaaacactgagttcaaagctacaatgtacaacttgttggcctacataaaacacctagatggtaacaacgaggcagccctggaatgcttacggcaagctgaagagttaatccagcaagaacatgctgaccaagcagaaatcagaagtctagtcacttggggaaactacgcctgggtctactatcacttgggcagactctcagatgctcagatttatgtagataaggtgaaacaaacctgcaagaaattttcaaatccatacagtattgagtattctgaacttgactgtgaggaagggtggacacaactgaagtgtggaagaaatgaaagggcgaaggtgtgttttgagaaggctctcacccagagaaacagttctctactgatgttttgaagcaggccattgagctgagtcctgataaccaatacgtcaaggttctcttgggcctgaaactgcagaagatgaataaagaagctgaaggagagcagtttgttgaagaagccttggaaaagtctccttgccaaacagatgtcctccgcagtgcagccaaattttacagaagaaaaggtgacctagacaaagctattgaactgtttcaacgggtgttggaatccacaccaaacaatggctacctctatcaccagattgggtgctgctacaaggcaaaagtaagacaaatgcagaatacaggagaatctgaagctagtggaaataaagagatgattgaagcactaaagcaatatgctatggactattcgaataaagctcttgagaagggactgaatcctctgaatgcatactccgatctcgctgagttcctggagacggaatgttatcagacaccattcaataaggaagtccctgatgctgaaaagcaacaatcccatcagcgctactgcaaccttcagaaatataatgggaagtctgaagacactgctgtgcaacatggtttagagggtttgtccataagcaaaaaatcaactgacaaggaagagatcaaagaccaaccacagaatgtatctgaaaatctgcttccacaaaatgcaccaaattattggtatcttcaaggattaattcataagcagaatggagatctgctgcaagcagccaaatgttatgagaaggaactgggccgcctgctaagggatgccccttcaggcataggcagtattttcctgtcagcatctgagcttgaggatggtagtgaggaaatgggccagggcgcagtcagctccagtcccagagagctcctctctaactcagagcaactgaactgagacagaggaggaaaacagagcatcagaagcctgcagtggtggttgtgacgggtaggaggataggaagacagggggccccaacctgggattgctgagcagggaagctttgcatgttgctctaaggtacatttttaaagagttgttttttggccgggcgcagtggctcatgcctgtaatcccagcactttgggaggccgaggtgggcggatcacgaggtctggagtttgagaccatcctggctaacacagtgaaatcccgtctctactaaaaatacaaaaaattagccaggcgtggtggctggcacctgtagtcccagctacttgggaggctgaggcaggagaatggcgtgaacctggaaggaagaggttgcagtgagccaagattgcgcccctgcactccagcctgggcaacagagcaagactccatctcaaaaaaaaaaaaaaaaaaaaaaaagagttgttttctcatgttcattatagttcattacagttacatagtccgaaggtcttacaactaatcactggtagcaataaatgcttcaggcccacatgatgctgattagttctcagttttcattcagttcacaatataaccaccattcctgccctccctgccaagggtcataaatggtgactgcctaacaacaaaatttgcagtctcatctcattttcatccagacttctggaactcaaagattaacttttgactaaccctggaatatctcttatctcacttatagcttcaggcatgtatttatatgtattcttgatagcaataccataatcaatgtgtattcctgatagtaatgctacaataaatccaaacatttcaactctgttaaaaaaaaaaat

SEQ ID NO: 303201 - DNA, 1948 bp, Homo sapiens
actttcctttcccctttcataaaagcacagacctaacagcaccctgggtggaaacctcttcagcatttgcttggaatcagtaagctaaaaacaaaatcaaccgggaccccagcttttcagaactgcagggaaacagccatcatgagtgaggtcaccaagaattccctggagaaaatccttccacagctgaaatgccatttcacctggaacttattcaaggaagacagtgtctcaagggatctagaagatagagtgtgtaaccagattgaatttttaaacactgagttcaaagctacaatgtacaacttgttggcctacataaaacacctagatggtaacaacgaggcagccctggaatgcttacggcaagctgaagagttaatccagcaagaacatgctgaccaagcagaaatcagaagtctagtcacttggggaaactacgcctgggtctactatcacttgggcagactctcagatgctcagatttatgtagataaggtgaaacaaacctgcaagaaattttcaaatccatacagtattgagtattctgaacttgactgtgaggaagggtggacacaactgaagtgtggaagaaatgaaagggcgaaggtgtgttttgagaaggctctggaagaaaagcccaacaacccagaattctcctctggactggcaattgcgatgtaccatctggataatcacccagagaaacagttctctactgatgttttgaagcaggccattgagctgagtcctgataaccaatacgtcaaggttctcttgggcctgaaactgcagaagatgaataaagaagctgaaggagagcagtttgttgaagaagccttggaaaagtctccttgccaaacagatgtcctccgcagtgcagccaaattttacagaagaaaaggtgacctagacaaagctattgaactgtttcaacgggtgttggaatccacaccaaacaatggctacctctatcaccagattgggtgctgctacaaggcaaaagtaagacaaatgcagaatacaggagaatctgaagctagtggaaataaagagatgattgaagcactaaagcaatatgctatggactattcgaataaagctcttgagaagggactgaatcctctgaatgcatactccgatctcgctgagttcctggagacggaatgttatcagacaccattcaataaggaagtccctgatgctgaaaagcaacaatcccatcagcgctactgcaaccttcagaaatataatgggaagtctgaagacactgctgtgcaacatggtttagagggtttgtccataagcaaaaaatcaactgacaaggaagagatcaaagaccaaccacagaatgtatctgaaaatctgcttccacaaaatgcaccaaattattggtatcttcaaggattaattcataagcagaatggagatctgctgcaagcagccaaatgttatgagaaggaactgggccgcctgctaagggatgccccttcaggcataggcagtattttcctgtcagcatctgagcttgaggatggtagtgaggaaatgggccagggcgcagtcagctccagtcccagagagctcctctctaactcagagcaactgaactgagacagaggaggaaaacagagcatcagaagcctgcagtggtggttgtgacgggtaggaggataggaagacagggggccccaacctgggattgctgagcagggaagctttgcatgttgctctaaggtacatttttaaagagttgttttttggccgggcgcagtggctcatgcctgtaatcccagcactttgggaggccgaggtgggcggatcacgaggtctggagtttgagaccatcctggctaacacagtgaaatcccgtctctactaaaaatacaaaaaaaaaaaactttcgaactatggttctacccagctagggacatccactttcatgtgc

SEQ ID NO: 303202 - DNA, 1291 bp, Homo sapiens
  misc_feature (1)..(1): n is a, c, g, or t
nagaatgggtaggccttgtaaaattgacagagaggggaaaccccgtaaagtggtatagtggtggtatagcctgataccatgggaagtctgaagacactgctgtgcaacatggtttagagggtttgtccataagcaaaaaatcaactgacaaggaagagatcaaagaccaaccacagaatgtatctgaaaatctgcttccacaaaatgcaccaaattattggtatcttcaaggattaattcataagcagaatggagatctgctgcaagcagccaaatgttatgagaaggaactgggccgcctgctaagggatgccccttcaggcataggcagtattttcctgtcagcatctgagcttgaggatggtagtgaggaaatgggccagggcgcagtcagctccagtcccagagagctcctctctaactcagagcaactgaactgagacagaggaggaaaacagagcatcagaagcctgcagtggtggttgtgacgggtaggaggataggaagacagggggccccaacctgggattgctgagcagggaagctttgcatgttgctctaaggtacatttttaaagagttgttttttggccgggcgcagtggctcatgcctgtaatcccagcactttgggaggccgaggtgggcggatcacgaggtctggagtttgagaccatcctggctaacacagtgaaatcccgtctctactaaaaatacaaaaaattagccaggcgtggtggctggcacctgtagtcccagctacttgggaggctgaggcaggagaatggcgtgaacctggaaggaagaggttgcagtgagccaagattgcgcccctgcactccagcctgggcaacagagcaagactccatctcaaaaaaaaaaaaaaaaaaaaaaaagagttgttttctcatgttcattatagttcattacagttacatagtccgaaggtcttacaactaatcactggtagcaataaatgcttcaggcccacatgatgctgattagttctcagttttcattcagttcacaatataaccaccattcctgccctccctgccaagggtcataaatggtgactgcctaacaacaaaatttgcagtctcatctcattttcatccagacttctggaactcaaagattaacttttgactaaccctggaatatctcttatctcacttatagcttcaggcatgtatttatatgtattcttgatagcaataccataatcaatgtgtattcctgatagtaatgctacaataaatccaaacatttcaactctgttaaaaaaaaaaat

SEQ ID NO: 303203 - DNA, 1317 bp, Homo sapiens
tagggcagggagaccagttagggacctgctgcggtggaccaggtgagatgatgctggtctgggcgagaatgtcaggaatggaggtgaggagaagaggtcctattatgggaagtctgaagacactgctgtgcaacatggtttagagggtttgtccataagcaaaaaatcaactgacaaggaagagatcaaagaccaaccacagaatgtatctgaaaatctgcttccacaaaatgcaccaaattattggtatcttcaaggattaattcataagcagaatggagatctgctgcaagcagccaaatgttatgagaaggaactgggccgcctgctaagggatgccccttcaggcataggcagtattttcctgtcagcatctgagcttgaggatggtagtgaggaaatgggccagggcgcagtcagctccagtcccagagagctcctctctaactcagagcaactgaactgagacagaggaggaaaacagagcatcagaagcctgcagtggtggttgtgacgggtaggaggataggaagacagggggccccaacctgggattgctgagcagggaagctttgcatgttgctctaaggtacatttttaaagagttgttttttggccgggcgcagtggctcatgcctgtaatcccagcactttgggaggccgaggtgggcggatcacgaggtctggagtttgagaccatcctggctaacacagtgaaatcccgtctctactaaaaatacaaaaaattagccaggcgtggtggctggcacctgtagtcccagctacttgggaggctgaggcaggagaatggcgtgaacctggaaggaagaggttgcagtgagccaagattgcgcccctgcactccagcctgggcaacagagcaagactccatctcaaaaaaaaaaaaaaaaaaaaaaaagagttgttttctcatgttcattatagttcattacagttacatagtccgaaggtcttacaactaatcactggtagcaataaatgcttcaggcccacatgatgctgattagttctcagttttcattcagttcacaatataaccaccattcctgccctccctgccaagggtcataaatggtgactgcctaacaacaaaatttgcagtctcatctcattttcatccagacttctggaactcaaagattaacttttgactaaccctggaatatctcttatctcacttatagcttcaggcatgtatttatatgtattcttgatagcaataccataatcaatgtgtattcctgatagtaatgctacaataaatccaaacatttcaactctgttaaaaaaaaaaat

SEQ ID NO: 303204 - DNA, 530 bp, Homo sapiens
cccccctttgaaactttagccaaaaaaaagcgtttacctttaaaaaaaaaggttgcaaaaaaccaaaattggccccctccccccaaacttggggacaaaagaaaaatcaaaaaaaaaaaaaaaaaaaaaaaagagttgttttctcatgttcattatagttcattacagttacatagtccgaaggtcttacaactaatcactggtagcaataaatgcttcaggcccacatgatgctgattagttctcagttttcattcagttcacaatataaccaccattcctgccctccctgccaagggtcataaatggtgactgcctaacaacaaaatttgcagtctcatctcattttcatccagacttctggaactcaaagattaacttttgactaaccctggaatatctcttatctcacttatagcttcaggcatgtatttatatgtattcttgatagcaataccataatcaatgtgtattcctgatagtaatgctacaataaatccaaacatttcaactctgttaaaaaaaaaaat

SEQ ID NO: 303205 - DNA, 3108 bp, Homo sapiens
ttcctcgaggtaacctttggtggcgggaagagttcggaagttttcgcgccggggtggagtcatcctgggaacctccacgcgactttggtggaggtagttctttggcagcgggcatggcgggtaccgtggtgctggacgatgtggagctgcgggaggctcagagagattacctggacttcctggacgacgaggaagaccagggaatttatcagagcaaagttcgggagctgatcagtgacaaccaataccggctgattgtcaatgtgaatgacctgcgcaggaaaaacgagaagagggctaaccggcttctgaacaatgcctttgaggagctggttgccttccagcgggccttaaaggattttgtggcctccattgatgctacctatgccaagcagtatgaggagttctacgtaggactggaaggcagctttggctccaagcacgtctccccgcggactcttacctcctgcttcctcagctgtgtggtctgtgtggagggcattgtcactaaatgttctctagttcgtcccaaagtcgtccgcagtgtccactactgtcctgctactaagaagaccatagagcgacgttattctgatctcaccaccctggtggcctttccctccagctctgtctatcctaccaaggatgaggagaacaatccccttgagacagaatatggcctttctgtctacaaggatcaccagaccatcaccatccaggagatgccggagaaggccccagccggccagctcccccgctctgtggacgtcattctggatgatgacttggtggataaagcgaagcctggtgaccgggttcaggtggtgggaacctaccgttgccttcctggaaagaagggaggctacacctctgggaccttcaggactgtcctgattgcctgtaatgttaagcagatgagcaaggatgctcagccctctttctctgctgaggatatagccaagatcaagaagttcagtaaaacccgatccaaggatatctttgaccagctggccaagtcattggccccaagtatccatgggcatgactatgtcaagaaagcaatcctctgcttgctcttgggaggggtggaacgagacctagaaaatggcagccacatccgtggggacatcaatattcttctaataggagacccatccgttgccaagtctcagcttctgcggtatgtgctttgcactgcaccccgagctatccccaccactggccggggctcctctggagtgggtctgacggctgctgtcaccacagaccaggaaacaggagagcgccgtctggaagcaggggccatggtcctggctgaccgaggcgtggtttgcattgatgaatttgacaaaatgtctgacatggatcgcacagccatccatgaagtgatggagcagggtcgagtgaccattgccaaggctggcatccatgctcggctgaatgcccgctgcagtgttttggcagctgccaaccctgtctacggcaggtatgaccagtataagactccaatggagaacattgggctacaggactcactgctgtcacgatttgacttgctcttcatcatgctggatcagatggatcctgagcaggatcgggagatctcagaccatgtccttcggatgcaccgttacagagcacctggggagcaggatggcgatgctatgcccttgggtagtgctgtggatatcctggccacagatgatcccaactttagccaggaagatcagcaggacacccagatttatgagaagcatgacaaccttctacatgggaccaagaagaaaaaggagaagatggtgagtgcagcattcatgaagaagtacatccatgtggccaaaatcatcaagcctgtcctgacacaggagtcggccacctacattgcagaagagtattcacgcctgcgcagccaggatagcatgagctcagacaccgccaggacatctccagttacagcccgaacactggaaactctgattcgactggccacagcccatgcgaaggcccgcatgagcaagactgtggacctgcaggatgcagaggaagctgtggagttggtccagtatgcttactttaagaaggttctggagaaggagaagaaacgtaagaagcgaagtgaggatgaatcagagacagaagatgaagaggagaaaagccaagaggaccaggagcagaagaggaagagaaggaagactcgccagccagatgccaaagatggggattcatacgacccctatgacttcagtgacacagaggaggaaatgcctcaagtacacactccaaagacggcagactcacaggagaccaaggaatcccagaaagtggagttgagtgaatccaggttgaaggcattcaaggtggccctcttggatgtgttccgggaagctcatgcgcagtcaatcggcatgaatcgcctcacagaatccatcaaccgggacagcgaagagcccttctcttcagttgagatccaggctgctctgagcaagatgcaggatgacaatcaggtcatggtgtctgagggcatcatcttcctcatctgaggaggcctcgtctctgaacttgggttgtgccgagagagtttgttctgtgtttcccaccctctccctgacccaagtctttgcctctactcccttaacagtgttgaattcaactgaaggcgaggaatgttggtgatgaagctgagttcaggactcggtggaccctttgggaatgggtcatgaaagctgccatggggtgaggaaagaggagacagtgggagaggacaatgactattgcatcttcattgcaaaagcactggctcatccgccctacttcccatcccacacaaacccaattgtaaataacatatgacttctgagtacttttgggggcacaactgttttctgtttgctgtttttttgttttgttttttttctccagagcactttggtctagactaggctttgggtggttccaattggtggagagaagctctgaggcacgtcatgcaggtcaagaaagctttctttgcagtagcaccagttaaggtgaatatgtattgtatcacaaaacaaacccaatatccagatgaatatccgagatgttgaataaacttagccatttcgtaca

SEQ ID NO: 303206 - DNA, 906 bp, Homo sapiens
gcagagtggttacatgggtgtaagcacaggtaaaaattcactgagctgtacacttaagatttgtgcattttactgtatatacattatatctcaaaataaaactagaaatataagaaaaagccaaccacgacggactgaaaacaaacatacaaatttggacgtgcgatgatcttttagtcattatggtttcagatttgctgttagttactgattgatatttaatcaaagtgacgtgaaacactttttcccctcttgagctgatcgttcagtaagctaagttacttaaaaggatcttgtgatctttttataagaccagaaagcctttaatttacctgttattaagtaagatggagtagtaacggtttccaaaatttgtataacacacgatgaagtctctagggggcagggtaaacacagattttttttttcacttcatccttctctgcggcgatgtctttatggagttcgtcaggcaacggtatcagatagcaaatgggtttttaactaatctttccctaaggtactgtagttctatattctatcctatagattctcaaaatccacttttacactaggatgccactggagggcagttctgatttggatatatcttaaaaatgatttgcttttatgttttcatctccctgcgttataaagcaccatcctctgaatttggtcgttgcatcgggtcaaaagttctgcagcttgaaaaaccctgcaaaaacatccggaaaggagggagaacactacaactcccagaacgcaatgctttccctctcgccagcctgtcccctccagctgctcaatgaccagcctctgtgagcctcctctcagccctattggtcagtttgctcgtcagtgagtgaggcggagggaggggaggaacagagaatcccggatggtacg

SEQ ID NO: 303207 - DNA, 3130 bp, Homo sapiens
ttcctcgaggtaacctttggtggcgggaagagttcggaagttttcgcgccggggtggagtcatcctgggaacctccacgcgactttggtggaggtagttctttggcagcgggcatggcgggtaccgtggtgctggacgatgtggagctgcgggaggctcagagagattacctggacttcctggacgacgaggaagaccagggaatttatcagagcaaagttcgggagctgatcagtgacaaccaataccggctgattgtcaatgtgaatgacctgcgcaggaaaaacgagaagagggctaaccggcttctgaacaatgcctttgaggagctggttgccttccagcgggccttaaaggattttgtggcctccattgatgctacctatgccaagcagtatgaggagttctacgtaggactggaaggcagctttggctccaagcacgtctccccgcggactcttacctcctgcttcctcagctgtgtggtctgtgtggagggcattgtcactaaatgttctctagttcgtcccaaagtcgtccgcagtgtccactactgtcctgctactaagaagaccatagagcgacgttattctgatctcaccaccctggtggcctttccctccagctctgtctatcctaccaaggatgaggagaacaatccccttgagacagaatatggcctttctgtctacaaggatcaccagaccatcaccatccaggagatgccggagaaggccccagccggccagctcccccgctctgtggacgtcattctggatgatgacttggtggataaagcgaagcctggtgaccgggttcaggtggtgggaacctaccgttgccttcctggaaagaagggaggctacacctctgggaccttcaggactgtcctgattgcctgtaatgttaagcagatgagcaaggatgctcagccctctttctctgctgaggatatagccaagatcaagaagttcagtaaaacccgatccaaggatatctttgaccagctggccaagtcattggccccaagtatccatgggcatgactatgtcaagaaagcaatcctctgcttgctcttgggaggggtggaacgagacctagaaaatggcagccacatccgtggggacatcaatattcttctaataggagacccatccgttgccaagtctcagcttctgcggtatgtgctttgcactgcaccccgagctatccccaccactggccggggctcctctggagtgggtctgacggctgctgtcaccacagaccaggaaacaggagagcgccgtctggaagcaggggccatggtcctggctgaccgaggcgtggtttgcattgatgaatttgacaaaatgtctgacatggatcgcacagccatccatgaagtgatggagcagggtcgagtgaccattgccaaggctggcatccatgctcggctgaatgcccgctgcagtgttttggcagctgccaaccctgtctacggcaggtatgaccagtataagactccaatggagaacattgggctacaggactcactgctgtcacgatttgacttgctcttcatcatgctggatcagatggatcctgagcaggatcgggagatctcagaccatgtccttcggatgcaccgttacagagcacctggggagcaggatggcgatgctatgcccttgggtagtgctgtggatatcctggccacagatgatcccaactttagccaggaagatcagcaggacacccagatttatgagaagcatgacaaccttctacatgggaccaagaagaaaaaggagaagatggtgagtgcagcattcatgaagaagtacatccatgtggccaaaatcatcaagcctgtcctgacacaggagtcggccacctacattgcagaagagtattcacgcctgcgcagccaggatagcatgagctcagacaccgccaggacatctccagttacagcccgaacactggaaactctgattcgactggccacagcccatgcgaaggcccgcatgagcaagactgtggacctgcaggatgcagaggaagctgtggagttggtccagtatgcttactttaagaaggttctggagaaggagaagaaacgtaagaagcgaagtgaggatgaatcagagacagaagatgaagaggagaaaagccaagaggaccaggagcagaagaggaagagaaggaagactcgccagccagatgccaaagatggggattcatacgacccctatgacttcagtgacacagaggaggaaatgcctcaagtacacactccaaagacggcagactcacaggagaccaaggaatcccagaaagtggagttgagtgaatccaggttgaaggcattcaaggtggccctcttggatgtgttccgggaagctcatgcgcagtcaatcggcatgaatcgcctcacagaatccatcaaccgggacagcgaagagcccttctcttcagttgagatccaggctgctctgagcaagatgcaggatgacaatcaggtcatggtgtctgagggcatcatcttcctcatctgaggaggcctcgtctctgaacttgggttgtgccgagagagtttgttctgtgtttcccaccctctccctgacccaagtctttgcctctactcccttaacagtgttgaattcaactgaaggcgaggaatgttggtgatgaagctgagttcaggactcggtggaccctttgggaatgggtcatgaaagctgccatggggtgaggaaagaggagacagtgggagaggacaatgactattgcatcttcattgcaaaagcactggctcatccgccctacttcccatcccacacaaacccaattgtaaataacatatgacttctgagtacttttgggggcacaactgttttctgtttgctgtttttttgttttgttttttttctccagagcactttggtctagactaggctttgggtggttccaattggtggagagaagctctgaggcacgtcatgcaggtcaagaaagctttctttgcagtagcaccagttaaggtgaatatgtattgtatcacaaaacaaacccaatatccagatgaatatccgagatgttgaataaacttagccatttcgtacaaaaaaaggggggcccggtaaac

SEQ ID NO: 303208 - DNA, 3259 bp, Homo sapiens
ttcctcgaggtaacctttggtggcgggaagagttcggaagttttcgcgccggggtggagtcatcctgggaacctccacgcgactttggtggaggtagttctttggcagcgggcatggcgggtaccgtggtgctggacgatgtggagctgcgggaggctcagagagattacctggacttcctggacgacgaggaagaccagggaatttatcagagcaaagttcgggagctgatcagtgacaaccaataccggctgattgtcaatgtgaatgacctgcgcaggaaaaacgagaagagggctaaccggcttctgaacaatgcctttgaggagctggttgccttccagcgggccttaaaggattttgtggcctccattgatgctacctatgccaagcagtatgaggagttctacgtaggactggaaggcagctttggctccaagcacgtctccccgcggactcttacctcctgcttcctcagctgtgtggtctgtgtggagggcattgtcactaaatgttctctagttcgtcccaaagtcgtccgcagtgtccactactgtcctgctactaagaagaccatagagcgacgttattctgatctcaccaccctggtggcctttccctccagctctgtctatcctaccaaggatgaggagaacaatccccttgagacagaatatggcctttctgtctacaaggatcaccagaccatcaccatccaggagatgccggagaaggccccagccggccagctcccccgctctgtggacgtcattctggatgatgacttggtggataaagcgaagcctggtgaccgggttcaggtggtgggaacctaccgttgccttcctggaaagaagggaggctacacctctgggaccttcaggactgtcctgattgcctgtaatgttaagcagatgagcaaggatgctcagccctctttctctgctgaggatatagccaagatcaagaagttcagtaaaacccgatccaaggatatctttgaccagctggccaagtcattggccccaagtatccatgggcatgactatgtcaagaaagcaatcctctgcttgctcttgggaggggtggaacgagacctagaaaatggcagccacatccgtggggacatcaatattcttctaataggagacccatccgttgccaagtctcagcttctgcggtatgtgctttgcactgcaccccgagctatccccaccactggccggggctcctctggagtgggtctgacggctgctgtcaccacagaccaggaaacaggagagcgccgtctggaagcaggggccatggtcctggctgaccgaggcgtggtttgcattgatgaatttgacaaaatgtctgacatggatcgcacagccatccatgaagtgatggagcagggtcgagtgaccattgccaaggctggcatccatgctcggctgaatgcccgctgcagtgttttggcagctgccaaccctgtctacggcaggtatgaccagtataagactccaatggagaacattgggctacaggactcactgctgtcacgatttgacttgctcttcatcatgctggatcagatggatcctgagcaggatcgggagatctcagaccatgtccttcggatgcaccgttacagagcacctggggagcaggatggcgatgctatgcccttgggtagtgctgtggatatcctggccacagatgatcccaactttagccaggaagatcagcaggacacccagatttatgagaagcatgacaaccttctacatgggaccaagaagaaaaaggagaagatggtgagtgcagcattcatgaagaagtacatccatgtggccaaaatcatcaagcctgtcctgacacaggagtcggccacctacattgcagaagagtattcacgcctgcgcagccaggatagcatgagctcagacaccgccaggacatctccagttacagcccgaacactggaaactctgattcgactggccacagcccatgcgaaggcccgcatgagcaagactgtggacctgcaggatgcagaggaagctgtggagttggtccagtatgcttactttaagaaggttctggagaaggagaagaaacgtaagaagcgaagtgaggatgaatcagagacagaagatgaagaggagaaaagccaagaggaccaggagcagaagaggaagagaaggaagactcgccagccagatgccaaagatggggattcatacgacccctatgacttcagtgacacagaggaggaaatgcctcaagtacacactccaaagacggcagactcacaggagaccaaggaatcccagaaagtggagttgagtgaatccagagacgggatctcaccatgttgcccaggctggtcttggactcctggcctcaagcagtccttctacctgagcctcccaaaaggctgggattacaggcataagccactgtgcttgtttgatctcattctttttaatgactgcagggtttccatggttgaaggcattcaaggtggccctcttggatgtgttccgggaagctcatgcgcagtcaatcggcatgaatcgcctcacagaatccatcaaccgggacagcgaagagcccttctcttcagttgagatccaggctgctctgagcaagatgcaggatgacaatcaggtcatggtgtctgagggcatcatcttcctcatctgaggaggcctcgtctctgaacttgggttgtgccgagagagtttgttctgtgtttcccaccctctccctgacccaagtctttgcctctactcccttaacagtgttgaattcaactgaaggcgaggaatgttggtgatgaagctgagttcaggactcggtggaccctttgggaatgggtcatgaaagctgccatggggtgaggaaagaggagacagtgggagaggacaatgactattgcatcttcattgcaaaagcactggctcatccgccctacttcccatcccacacaaacccaattgtaaataacatatgacttctgagtacttttgggggcacaactgttttctgtttgctgtttttttgttttgttttttttctccagagcactttggtctagactaggctttgggtggttccaattggtggagagaagctctgaggcacgtcatgcaggtcaagaaagctttctttgcagtagcaccagttaaggtgaatatgtattgtatcacaaaacaaacccaatatccagatgaatatccgagatgttgaataaacttagccatttcgtaca

SEQ ID NO: 303209 - DNA, 3057 bp, Homo sapiens
ttcctcgaggtaacctttggtggcgggaagagttcggaagttttcgcgccggggtggagtcatcctgggaacctccacgcgactttggtggaggtagttctttggcagcgggcatggcgggtaccgtggtgctggacgatgtggagctgcgggaggctcagagagattacctggacttcctggacgacgaggaagaccagggaatttatcagagcaaagttcgggagctgatcagtgacaaccaataccggctgattgtcaatgtgaatgacctgcgcaggaaaaacgagaagagggctaaccggcttctgaacaatgcctttgaggagctggttgccttccagcgggccttaaaggattttgtggcctccattgatgctacctatgccaagcagtatgaggagttctacgtaggactggaaggcagctttggctccaagcacgtctccccgcggactcttacctcctgcttcctcagctgtgtggtctgtgtggagggcattgtcactaaatgttctctagttcgtcccaaagtcgtccgcagtgtccactactgtcctgctactaagaagaccatagagcgacgttattctgatctcaccaccctggtggcctttccctccagctctgtctatcctaccaaggatcaccagaccatcaccatccaggagatgccggagaaggccccagccggccagctcccccgctctgtggacgtcattctggatgatgacttggtggataaagcgaagcctggtgaccgggttcaggtggtgggaacctaccgttgccttcctggaaagaagggaggctacacctctgggaccttcaggactgtcctgattgcctgtaatgttaagcagatgagcaaggatgctcagccctctttctctgctgaggatatagccaagatcaagaagttcagtaaaacccgatccaaggatatctttgaccagctggccaagtcattggccccaagtatccatgggcatgactatgtcaagaaagcaatcctctgcttgctcttgggaggggtggaacgagacctagaaaatggcagccacatccgtggggacatcaatattcttctaataggagacccatccgttgccaagtctcagcttctgcggtatgtgctttgcactgcaccccgagctatccccaccactggccggggctcctctggagtgggtctgacggctgctgtcaccacagaccaggaaacaggagagcgccgtctggaagcaggggccatggtcctggctgaccgaggcgtggtttgcattgatgaatttgacaaaatgtctgacatggatcgcacagccatccatgaagtgatggagcagggtcgagtgaccattgccaaggctggcatccatgctcggctgaatgcccgctgcagtgttttggcagctgccaaccctgtctacggcaggtatgaccagtataagactccaatggagaacattgggctacaggactcactgctgtcacgatttgacttgctcttcatcatgctggatcagatggatcctgagcaggatcgggagatctcagaccatgtccttcggatgcaccgttacagagcacctggggagcaggatggcgatgctatgcccttgggtagtgctgtggatatcctggccacagatgatcccaactttagccaggaagatcagcaggacacccagatttatgagaagcatgacaaccttctacatgggaccaagaagaaaaaggagaagatggtgagtgcagcattcatgaagaagtacatccatgtggccaaaatcatcaagcctgtcctgacacaggagtcggccacctacattgcagaagagtattcacgcctgcgcagccaggatagcatgagctcagacaccgccaggacatctccagttacagcccgaacactggaaactctgattcgactggccacagcccatgcgaaggcccgcatgagcaagactgtggacctgcaggatgcagaggaagctgtggagttggtccagtatgcttactttaagaaggttctggagaaggagaagaaacgtaagaagcgaagtgaggatgaatcagagacagaagatgaagaggagaaaagccaagaggaccaggagcagaagaggaagagaaggaagactcgccagccagatgccaaagatggggattcatacgacccctatgacttcagtgacacagaggaggaaatgcctcaagtacacactccaaagacggcagactcacaggagaccaaggaatcccagaaagtggagttgagtgaatccaggttgaaggcattcaaggtggccctcttggatgtgttccgggaagctcatgcgcagtcaatcggcatgaatcgcctcacagaatccatcaaccgggacagcgaagagcccttctcttcagttgagatccaggctgctctgagcaagatgcaggatgacaatcaggtcatggtgtctgagggcatcatcttcctcatctgaggaggcctcgtctctgaacttgggttgtgccgagagagtttgttctgtgtttcccaccctctccctgacccaagtctttgcctctactcccttaacagtgttgaattcaactgaaggcgaggaatgttggtgatgaagctgagttcaggactcggtggaccctttgggaatgggtcatgaaagctgccatggggtgaggaaagaggagacagtgggagaggacaatgactattgcatcttcattgcaaaagcactggctcatccgccctacttcccatcccacacaaacccaattgtaaataacatatgacttctgagtacttttgggggcacaactgttttctgtttgctgtttttttgttttgttttttttctccagagcactttggtctagactaggctttgggtggttccaattggtggagagaagctctgaggcacgtcatgcaggtcaagaaagctttctttgcagtagcaccagttaaggtgaatatgtattgtatcacaaaacaaacccaatatccagatgaatatccgagatgttgaataaacttagccatttcgtaca

SEQ ID NO: 303210 - DNA, 2873 bp, Homo sapiens
ttcctcgaggtaacctttggtggcgggaagagttcggaagttttcgcgccggggtggagtcatcctgggaacctccacgcgactttggtggaggtagttctttggcagcgggcatggcgggtaccgtggtgctggacgatgtggagctgcgggaggctcagagagattacctggacttcctggacgacgaggaagaccagggaatttatcagagcaaagttcgggagctgatcagtgacaaccaataccggctgattgtcaatgtgaatgacctgcgcaggaaaaacgagaagagggctaaccggcttctgaacaatgcctttgaggagctggttgccttccagcgggccttaaaggattttgtggcctccattgatgctacctatgccaagcagtatgaggagttctacgtaggactggaaggcagctttggctccaagcacgtctccccgcggactcttacctcctgcttcctcagctgtgtggtctgtgtggagggcattgtcactaaatgttctctagttcgtcccaaagtcgtccgcagtgtccactactgtcctgctactaagaagaccatagagcgacgttattctgatctcaccaccctggtggcctttccctccagctctgtctatcctaccaaggatgaggagaacaatccccttgagacagaatatggcctttctgtctacaaggatcaccagaccatcaccatccaggagatgccggagaaggccccagccggccagctcccccgctctgtggacgtcattctggatgatgacttggtggataaagcgaagcctggtgaccgggttcaggtggtgggaacctaccgttgccttcctggaaagaagggaggctacacctctgggaccttcaggactgtcctgattgcctgtaatgttaagcagatgagcaaggatgctcagccctctttctctgctgaggatatagccaagatcaagaagttcagtaaaacccgatccaaggatatctttgaccagctggccaagtcattggccccaagtatccatgggcatgactatgtcaagaaagcaatcctctgcttgctcttgggaggggtggaacgagacctagaaaatggcagccacatccgtggggacatcaatattcttctaataggagacccatccgttgccaagtctcagcttctgcggtatgtgctttgcactgcaccccgagctatccccaccactggccggggctcctctggagtgggtctgacggctgctgtcaccacagaccaggaaacaggagagcgccgtctggaagcaggggccatggtcctggctgaccgaggcgtggtttgcattgatgaatttgacaaaatgtctgacatggatcgcacagccatccatgaagtgatggagcagggtcgagtgaccattgccaaggctggcatccatgctcggctgaatgcccgctgcagtgttttggcagctgccaaccctgtctacggcaggtatgaccagtataagactccaatggagaacattgggctacaggactcactgctgtcacgatttgacttgctcttcatcatgctggatcagatggatcctgagcaggatcgggagatctcagaccatgtccttcggatgcaccgttacagagcacctggggagcaggatggcgatgctatgcccttgggtagtgctgtggatatcctggccacagatgatcccaactttagccaggaagatcagcaggacacccagatttatgagaagcatgacaaccttctacatgggaccaagaagaaaaaggagaagatggtgagtgcagcattcatgaagaagtacatccatgtggccaaaatcatcaagcctgtcctgacacaggagtcggccacctacattgcagaagagtattcacgcctgcgcagccaggatagcatgagctcagacaccgccaggacatctccagttacagcccgaacactggaaactctgattcgactggccacagcccatgcgaaggcccgcatgagcaagactgtggacctgcaggatgcagaggaagctgtggagttggtccagtatgcttactttaagaaggttctggagaaggagaagaaacgtaagaagcgaagtgaggatgaatcagagacagaagatgaagaggagaaaagccaagaggaccaggagcagaagaggaagagaaggaagactcgccagccagatgccaaagatggggattcatacgacccctatgacttcagtgacacagaggaggaaatgcctcaagtacacactccaaagacggcagactcacaggagaccaaggaatcccagaaagtggagttgagtgaatccaggttgaaggcattcaaggtggccctcttggatgtgttccgggaagctcatgcgcagtcaatcggcatgaatcgcctcacagaatccatcaaccgggacagcgaagagcccttctcttcagttgagatccaggctgctctgagcaagatgcaggatgacaatcaggtcatggtgtctgagggcatcatcttcctcatctgaggaggcctcgtctctgaacttgggttgtgccgagagagtttgttctgtgtttcccaccctctccctgacccaagtctttgcctctactcccttaacagtgttgaattcaactgaaggcgaggaatgttggtgatgaagctgagttcaggactcggtggaccctttgggaatgggtcatgaaagctgccatggggtgaggaaagaggagacagtgggagaggacaatgactattgcatcttcattgcaaaagcactggctcatccgccctacttcccatcccacacaaacccaagcccccaaaagtactcagaagtcatatgttatttacgtcg

SEQ ID NO: 303211 - DNA, 2896 bp, Homo sapiens
  misc_feature (2896)..(2896): n is a, c, g, or t
ttcctcgaggtaacctttggtggcgggaagagttcggaagttttcgcgccggggtggagtcatcctgggaacctccacgcgactttggtggaggtagttctttggcagcgggcatggcgggtaccgtggtgctggacgatgtggagctgcgggaggctcagagagattacctggacttcctggacgacgaggaagaccagggaatttatcagagcaaagttcgggagctgatcagtgacaaccaataccggctgattgtcaatgtgaatgacctgcgcaggaaaaacgagaagagggctaaccggcttctgaacaatgcctttgaggagctggttgccttccagcgggccttaaaggattttgtggcctccattgatgctacctatgccaagcagtatgaggagttctacgtaggactggaaggcagctttggctccaagcacgtctccccgcggactcttacctcctgcttcctcagctgtgtggtctgtgtggagggcattgtcactaaatgttctctagttcgtcccaaagtcgtccgcagtgtccactactgtcctgctactaagaagaccatagagcgacgttattctgatctcaccaccctggtggcctttccctccagctctgtctatcctaccaaggatgaggagaacaatccccttgagacagaatatggcctttctgtctacaaggatcaccagaccatcaccatccaggagatgccggagaaggccccagccggccagctcccccgctctgtggacgtcattctggatgatgacttggtggataaagcgaagcctggtgaccgggttcaggtggtgggaacctaccgttgccttcctggaaagaagggaggctacacctctgggaccttcaggactgtcctgattgcctgtaatgttaagcagatgagcaaggatgctcagccctctttctctgctgaggatatagccaagatcaagaagttcagtaaaacccgatccaaggatatctttgaccagctggccaagtcattggccccaagtatccatgggcatgactatgtcaagaaagcaatcctctgcttgctcttgggaggggtggaacgagacctagaaaatggcagccacatccgtggggacatcaatattcttctaataggagacccatccgttgccaagtctcagcttctgcggtatgtgctttgcactgcaccccgagctatccccaccactggccggggctcctctggagtgggtctgacggctgctgtcaccacagaccaggaaacaggagagcgccgtctggaagcaggggccatggtcctggctgaccgaggcgtggtttgcattgatgaatttgacaaaatgtctgacatggatcgcacagccatccatgaagtgatggagcagggtcgagtgaccattgccaaggctggcatccatgctcggctgaatgcccgctgcagtgttttggcagctgccaaccctgtctacggcaggtatgaccagtataagactccaatggagaacattgggctacaggactcactgctgtcacgatttgacttgctcttcatcatgctggatcagatggatcctgagcaggatcgggagatctcagaccatgtccttcggatgcaccgttacagagcacctggggagcaggatggcgatgctatgcccttgggtagtgctgtggatatcctggccacagatgatcccaactttagccaggaagatcagcaggacacccagatttatgagaagcatgacaaccttctacatgggaccaagaagaaaaaggagaagatggtgagtgcagcattcatgaagaagtacatccatgtggccaaaatcatcaagcctgtcctgacacaggagtcggccacctacattgcagaagagtattcacgcctgcgcagccaggatagcatgagctcagacaccgccaggacatctccagttacagcccgaacactggaaactctgattcgactggccacagcccatgcgaaggcccgcatgagcaagactgtggacctgcaggatgcagaggaagctgtggagttggtccagtatgcttactttaagaaggttctggagaaggagaagaaacgtaagaagcgaagtgaggatgaatcagagacagaagatgaagaggagaaaagccaagaggaccaggagcagaagaggaagagaaggaagactcgccagccagatgccaaagatggggattcatacgacccctatgacttcagtgacacagaggaggaaatgcctcaagtacacactccaaagacggcagactcacaggagaccaaggaatcccagaaagtggagttgagtgaatccaggttgaaggcattcaaggtggccctcttggatgtgttccgggaagctcatgcgcagtcaatcggcatgaatcgcctcacagaatccatcaaccgggacagcgaagagcccttctcttcagttgagatccaggctgctctgagcaagatgcaggatgacaatcaggtcatggtgtctgagggcatcatcttcctcatctgaggaggcctcgtctctgaacttgggttgtgccgagagagtttgttctgtgtttcccaccctctccctgacccaagtctttgcctctactcccttaacagtgttgaattcaactgaaggcgaggaatgttggtgatgaagctgagttcaggactcggtggaccctttgggaatgggtcatgaaagctgccatggggtgaggaaagaggagacagtgggagaggacaatgactattgcatcttcattgcaaaagcactggctcatccgccctacttcccatcccacacaaacccaagcatactgcaataatatatagtttctcgctgcgtggtgtgttgcggggtgtgtgtgggggggn

SEQ ID NO: 303212 - DNA, 2977 bp, Homo sapiens
ttcctcgaggtaacctttggtggcgggaagagttcggaagttttcgcgccggggtggagtcatcctgggaacctccacgcgactttggtggaggtagttctttggcagcgggcatggcgggtaccgtggtgctggacgatgtggagctgcgggaggctcagagagattacctggacttcctggacgacgaggaagaccagggaatttatcagagcaaagttcgggagctgatcagtgacaaccaataccggctgattgtcaatgtgaatgacctgcgcaggaaaaacgagaagagggctaaccggcttctgaacaatgcctttgaggagctggttgccttccagcgggccttaaaggattttgtggcctccattgatgctacctatgccaagcagtatgaggagttctacgtaggactggaaggcagctttggctccaagcacgtctccccgcggactcttacctcctgcttcctcagctgtgtggtctgtgtggagggcattgtcactaaatgttctctagttcgtcccaaagtcgtccgcagtgtccactactgtcctgctactaagaagaccatagagcgacgttattctgatctcaccaccctggtggcctttccctccagctctgtctatcctaccaaggatgaggagaacaatccccttgagacagaatatggcctttctgtctacaaggatcaccagaccatcaccatccaggagatgccggagaaggccccagccggccagctcccccgctctgtggacgtcattctggatgatgacttggtggataaagcgaagcctggtgaccgggttcaggtggtgggaacctaccgttgccttcctggaaagaagggaggctacacctctgggaccttcaggactgtcctgattgcctgtaatgttaagcagatgagcaaggatgctcagccctctttctctgctgaggatatagccaagatcaagaagttcagtaaaacccgatccaaggatatctttgaccagctggccaagtcattggccccaagtatccatgggcatgactatgtcaagaaagcaatcctctgcttgctcttgggaggggtggaacgagacctagaaaatggcagccacatccgtggggacatcaatattcttctaataggagacccatccgttgccaagtctcagcttctgcggtatgtgctttgcactgcaccccgagctatccccaccactggccggggctcctctggagtgggtctgacggctgctgtcaccacagaccaggaaacaggagagcgccgtctggaagcaggggccatggtcctggctgaccgaggcgtggtttgcattgatgaatttgacaaaatgtctgacatggatcgcacagccatccatgaagtgatggagcagggtcgagtgaccattgccaaggctggcatccatgctcggctgaatgcccgctgcagtgttttggcagctgccaaccctgtctacggcaggtatgaccagtataagactccaatggagaacattgggctacaggactcactgctgtcacgatttgacttgctcttcatcatgctggatcagatggatcctgagcaggatcgggagatctcagaccatgtccttcggatgcaccgttacagagcacctggggagcaggatggcgatgctatgcccttgggtagtgctgtggatatcctggccacagatgatcccaactttagccaggaagatcagcaggacacccagatttatgagaagcatgacaaccttctacatgggaccaagaagaaaaaggagaagatggtgagtgcagcattcatgaagaagtacatccatgtggccaaaatcatcaagcctgtcctgacacaggagtcggccacctacattgcagaagagtattcacgcctgcgcagccaggatagcatgagctcagacaccgccaggacatctccagttacagcccgaacactggaaactctgattcgactggccacagcccatgcgaaggcccgcatgagcaagactgtggacctgcaggatgcagaggaagctgtggagttggtccagtatgcttactttaagaaggttctggagaaggagaagaaacgtaagaagcgaagtgaggatgaatcagagacagaagatgaagaggagaaaagccaagaggaccaggagcagaagaggaagagaaggaagactcgccagccagatgccaaagatggggattcatacgacccctatgacttcagtgacacagaggaggaaatgcctcaagtacacactccaaagacggcagactcacaggagaccaaggaatcccagaaagtggagttgagtgaatccaggttgaaggcattcaaggtggccctcttggatgtgttccgggaagctcatgcgcagtcaatcggcatgaatcgcctcacagaatccatcaaccgggacagcgaagagcccttctcttcagttgagatccaggctgctctgagcaagatgcaggatgacaatcaacagtgttgaattcaactgaaggcgaggaatgttggtgatgaagctgagttcaggactcggtggaccctttgggaatgggtcatgaaagctgccatggggtgaggaaagaggagacagtgggagaggacaatgactattgcatcttcattgcaaaagcactggctcatccgccctacttcccatcccacacaaacccaattgtaaataacatatgacttctgagtacttttgggggcacaactgttttctgtttgctgtttttttgttttgttttttttctccagagcactttggtctagactaggctttgggtggttccaattggtggagagaagctctgaggcacgtcatgcaggtcaagaaagctttctttgcagtagcaccagttaaggtgaatatgtattgtatcacaaaacaaacccaatatccagatgaatatccgagatgttgaataaacttagccatttcgtaca

SEQ ID NO: 303213 - DNA, 2935 bp, Homo sapiens
ttcctcgaggtaacctttggtggcgggaagagttcggaagttttcgcgccggggtggagtcatcctgggaacctccacgcgactttggtggaggtagttctttggcagcgggcatggcgggtaccgtggtgctggacgatgtggagctgcgggaggctcagagagattacctggacttcctggacgacgaggaagaccagggaatttatcagagcaaagttcgggagctgatcagtgacaaccaataccggctgattgtcaatgtgaatgacctgcgcaggaaaaacgagaagagggctaaccggcttctgaacaatgcctttgaggagctggttgccttccagcgggccttaaaggattttgtggcctccattgatgctacctatgccaagcagtatgaggagttctacgtaggactggaaggcagctttggctccaagcacgtctccccgcggactcttacctcctgcttcctcagctgtgtggtctgtgtggagggcattgtcactaaatgttctctagttcgtcccaaagtcgtccgcagtgtccactactgtcctgctactaagaagaccatagagcgacgttattctgatctcaccaccctggtggcctttccctccagctctgtctatcctaccaaggatgaggagaacaatccccttgagacagaatatggcctttctgtctacaaggatcaccagaccatcaccatccaggagatgccggagaaggccccagccggccagctcccccgctctgtggacgtcattctggatgatgacttggtggataaagcgaagcctggtgaccgggttcaggtggtgggaacctaccgttgccttcctggaaagaagggaggctacacctctgggaccttcaggactgtcctgattgcctgtaatgttaagcagatgagcaaggatgctcagccctctttctctgctgaggatatagccaagatcaagaagttcagtaaaacccgatccaaggatatctttgaccagctggccaagtcattggccccaagtatccatgggcatgactatgtcaagaaagcaatcctctgcttgctcttgggaggggtggaacgagacctagaaaatggcagccacatccgtggggacatcaatattcttctaataggagacccatccgttgccaagtctcagcttctgcggtatgtgctttgcactgcaccccgagctatccccaccactggccggggctcctctggagtgggtctgacggctgctgtcaccacagaccaggaaacaggagagcgccgtctggaagcaggggccatggtcctggctgaccgaggcgtggtttgcattgatgaatttgacaaaatgtctgacatggatcgcacagccatccatgaagtgatggagcagggtcgagtgaccattgccaaggctggcatccatgctcggctgaatgcccgctgcagtgttttggcagctgccaaccctgtctacggcaggtatgaccagtataagactccaatggagaacattgggctacaggactcactgctgtcacgatttgacttgctcttcatcatgctggatcagatggatcctgagcaggatcgggagatctcagaccatgtccttcggatgcaccgttacagagcacctggggagcaggatggcgatgctatgcccttgggtagtgctgtggatatcctggccacagatgatcccaactttagccaggaagatcagcaggacacccagatttatgagaagcatgacaaccttctacatgggaccaagaagaaaaaggagaagatggtgagtgcagcattcatgaagaagtacatccatgtggccaaaatcatcaagcctgtcctgacacaggagtcggccacctacattgcagaagagtattcacgcctgcgcagccaggatagcatgagctcagacaccgccaggacatctccagttacagcccgaacactggaaactctgattcgactggccacagcccatgcgaaggcccgcatgagcaagactgtggacctgcaggatgcagaggaagctgtggagttggtccagtatgcttactttaagaaggttctggagaaggagaagaaacgtaagaagcgaagtgaggatgaatcagagacagaagatgaagaggagaaaagccaagaggaccaggagcagaagaggaagagaaggaagactcgccagccagatgccaaagatggggattcatacgacccctatgacttcagtgacacagaggaggaaatgcctcaagtacacactccaaagacggcagactcacaggagaccaaggaatcccagaaagtggagttgagtgaatccaggttgaaggcattcaaggtggccctcttggatgtgttccgggaagctcatgcgcagtcaatcggcatgaatcgcctcacagaatccatcaaccgggacagcgaagagcccttctcttcagttgagatccaggctgctctgagcaagatgcaggatgacaatcaggtcatggtgtctgagggcatcatcttcctcatctgaggaggcctcgtctctgaacttgggttgtgccgagagagtttgttctgtgtttcccaccctctccctgacccaagtctttgcctctactcccttagtgggaagtcgacttcccaccgggacccgggaggcaaaagttccaatgagctgagatagcgccagtgcactctagcctgggtgacagagtgagactctatctcaatcaatcaatcaatcaatcaatcaaagttccagctacttgagaggctgaagcaagaggattgcttgagctcaggagttcaagaccagactaggcaagacagcaaggctttaaaaaataaaaaatgaagaaagaaataaaataaatgttggcaaggatgtaaagaaattggagccttcacacactcccggtgggaagt

SEQ ID NO: 303214 - DNA, 2591 bp, Homo sapiens
gtacttggctttttttgttactgaataataaaattttatgaagtcatcttatttgccatgacaggtgagtgtggcatttttaagacaggacggagatcactctgtccctctgtgtgcctttttctaggatgaggagaacaatccccttgagacagaatatggcctttctgtctacaaggatcaccagaccatcaccatccaggagatgccggagaaggccccagccggccagctcccccgctctgtggacgtcattctggatgatgacttggtggataaagcgaagcctggtgaccgggttcaggtggtgggaacctaccgttgccttcctggaaagaagggaggctacacctctgggaccttcaggactgtcctgattgcctgtaatgttaagcagatgagcaaggatgctcagccctctttctctgctgaggatatagccaagatcaagaagttcagtaaaacccgatccaaggatatctttgaccagctggccaagtcattggccccaagtatccatgggcatgactatgtcaagaaagcaatcctctgcttgctcttgggaggggtggaacgagacctagaaaatggcagccacatccgtggggacatcaatattcttctaataggagacccatccgttgccaagtctcagcttctgcggtatgtgctttgcactgcaccccgagctatccccaccactggccggggctcctctggagtgggtctgacggctgctgtcaccacagaccaggaaacaggagagcgccgtctggaagcaggggccatggtcctggctgaccgaggcgtggtttgcattgatgaatttgacaaaatgtctgacatggatcgcacagccatccatgaagtgatggagcagggtcgagtgaccattgccaaggctggcatccatgctcggctgaatgcccgctgcagtgttttggcagctgccaaccctgtctacggcaggtatgaccagtataagactccaatggagaacattgggctacaggactcactgctgtcacgatttgacttgctcttcatcatgctggatcagatggatcctgagcaggatcgggagatctcagaccatgtccttcggatgcaccgttacagagcacctggggagcaggatggcgatgctatgcccttgggtagtgctgtggatatcctggccacagatgatcccaactttagccaggaagatcagcaggacacccagatttatgagaagcatgacaaccttctacatgggaccaagaagaaaaaggagaagatggtgagtgcagcattcatgaagaagtacatccatgtggccaaaatcatcaagcctgtcctgacacaggagtcggccacctacattgcagaagagtattcacgcctgcgcagccaggatagcatgagctcagacaccgccaggacatctccagttacagcccgaacactggaaactctgattcgactggccacagcccatgcgaaggcccgcatgagcaagactgtggacctgcaggatgcagaggaagctgtggagttggtccagtatgcttactttaagaaggttctggagaaggagaagaaacgtaagaagcgaagtgaggatgaatcagagacagaagatgaagaggagaaaagccaagaggaccaggagcagaagaggaagagaaggaagactcgccagccagatgccaaagatggggattcatacgacccctatgacttcagtgacacagaggaggaaatgcctcaagtacacactccaaagacggcagactcacaggagaccaaggaatcccagaaagtggagttgagtgaatccaggttgaaggcattcaaggtggccctcttggatgtgttccgggaagctcatgcgcagtcaatcggcatgaatcgcctcacagaatccatcaaccgggacagcgaagagcccttctcttcagttgagatccaggctgctctgagcaagatgcaggatgacaatcaggtcatggtgtctgagggcatcatcttcctcatctgaggaggcctcgtctctgaacttgggttgtgccgagagagtttgttctgtgtttcccaccctctccctgacccaagtctttgcctctactcccttaacagtgttgaattcaactgaaggcgaggaatgttggtgatgaagctgagttcaggactcggtggaccctttgggaatgggtcatgaaagctgccatggggtgaggaaagaggagacagtgggagaggacaatgactattgcatcttcattgcaaaagcactggctcatccgccctacttcccatcccacacaaacccaattgtaaataacatatgacttctgagtacttttgggggcacaactgttttctgtttgctgtttttttgttttgttttttttctccagagcactttggtctagactaggctttgggtggttccaattggtggagagaagctctgaggcacgtcatgcaggtcaagaaagctttctttgcagtagcaccagttaaggtgaatatgtattgtatcacaaaacaaacccaatatccagatgaatatccgagatgttgaataaacttagccatttcgtaca

SEQ ID NO: 303215 - DNA, 2333 bp, Homo sapiens
cctgaggggtgccgagcgccccgcaggttttttaaactgtcaggctcggaggggtggggcactacgttgctcctgaaataagggaggctacagctctgggaccttcaggactgtcctgattgcctgtaatgttaagcagatgagcaaggatgctcagccctctttctctgctgaggatatagccaagatcaagaagttcagtaaaacccgatccaaggatatctttgaccagctggccaagtcattggccccaagtatccatgggcatgactatgtcaagaaagcaatcctctgcttgctcttgggaggggtggaacgagacctagaaaatggcagccacatccgtggggacatcaatattcttctaataggagacccatccgttgccaagtctcagcttctgcggtatgtgctttgcactgcaccccgagctatccccaccactggccggggctcctctggagtgggtctgacggctgctgtcaccacagaccaggaaacaggagagcgccgtctggaagcaggggccatggtcctggctgaccgaggcgtggtttgcattgatgaatttgacaaaatgtctgacatggatcgcacagccatccatgaagtgatggagcagggtcgagtgaccattgccaaggctggcatccatgctcggctgaatgcccgctgcagtgttttggcagctgccaaccctgtctacggcaggtatgaccagtataagactccaatggagaacattgggctacaggactcactgctgtcacgatttgacttgctcttcatcatgctggatcagatggatcctgagcaggatcgggagatctcagaccatgtccttcggatgcaccgttacagagcacctggggagcaggatggcgatgctatgcccttgggtagtgctgtggatatcctggccacagatgatcccaactttagccaggaagatcagcaggacacccagatttatgagaagcatgacaaccttctacatgggaccaagaagaaaaaggagaagatggtgagtgcagcattcatgaagaagtacatccatgtggccaaaatcatcaagcctgtcctgacacaggagtcggccacctacattgcagaagagtattcacgcctgcgcagccaggatagcatgagctcagacaccgccaggacatctccagttacagcccgaacactggaaactctgattcgactggccacagcccatgcgaaggcccgcatgagcaagactgtggacctgcaggatgcagaggaagctgtggagttggtccagtatgcttactttaagaaggttctggagaaggagaagaaacgtaagaagcgaagtgaggatgaatcagagacagaagatgaagaggagaaaagccaagaggaccaggagcagaagaggaagagaaggaagactcgccagccagatgccaaagatggggattcatacgacccctatgacttcagtgacacagaggaggaaatgcctcaagtacacactccaaagacggcagactcacaggagaccaaggaatcccagaaagtggagttgagtgaatccaggttgaaggcattcaaggtggccctcttggatgtgttccgggaagctcatgcgcagtcaatcggcatgaatcgcctcacagaatccatcaaccgggacagcgaagagcccttctcttcagttgagatccaggctgctctgagcaagatgcaggatgacaatcaggtcatggtgtctgagggcatcatcttcctcatctgaggaggcctcgtctctgaacttgggttgtgccgagagagtttgttctgtgtttcccaccctctccctgacccaagtctttgcctctactcccttaacagtgttgaattcaactgaaggcgaggaatgttggtgatgaagctgagttcaggactcggtggaccctttgggaatgggtcatgaaagctgccatggggtgaggaaagaggagacagtgggagaggacaatgactattgcatcttcattgcaaaagcactggctcatccgccctacttcccatcccacacaaacccaattgtaaataacatatgacttctgagtacttttgggggcacaactgttttctgtttgctgtttttttgttttgttttttttctccagagcactttggtctagactaggctttgggtggttccaattggtggagagaagctctgaggcacgtcatgcaggtcaagaaagctttctttgcagtagcaccagttaaggtgaatatgtattgtatcacaaaacaaacccaatatccagatgaatatccgagatgttgaataaacttagccatttcgtaca

SEQ ID NO: 303216 - DNA, 2319 bp, Homo sapiens
ccaccgagtgtcgacacctgtatcattgtgggggggcaaactacacggtgcctcttctgtgaaagaaaggaagcttccccttttggaaccttaagactgtcctgattgcctgtaatgttaagcagatgagcaaggatgctcagccctctttctctgctgaggatatagccaagatcaagaagttcagtaaaacccgatccaaggatatctttgaccagctggccaagtcattggccccaagtatccatgggcatgactatgtcaagaaagcaatcctctgcttgctcttgggaggggtggaacgagacctagaaaatggcagccacatccgtggggacatcaatattcttctaataggagacccatccgttgccaagtctcagcttctgcggtatgtgctttgcactgcaccccgagctatccccaccactggccggggctcctctggagtgggtctgacggctgctgtcaccacagaccaggaaacaggagagcgccgtctggaagcaggggccatggtcctggctgaccgaggcgtggtttgcattgatgaatttgacaaaatgtctgacatggatcgcacagccatccatgaagtgatggagcagggtcgagtgaccattgccaaggctggcatccatgctcggctgaatgcccgctgcagtgttttggcagctgccaaccctgtctacggcaggtatgaccagtataagactccaatggagaacattgggctacaggactcactgctgtcacgatttgacttgctcttcatcatgctggatcagatggatcctgagcaggatcgggagatctcagaccatgtccttcggatgcaccgttacagagcacctggggagcaggatggcgatgctatgcccttgggtagtgctgtggatatcctggccacagatgatcccaactttagccaggaagatcagcaggacacccagatttatgagaagcatgacaaccttctacatgggaccaagaagaaaaaggagaagatggtgagtgcagcattcatgaagaagtacatccatgtggccaaaatcatcaagcctgtcctgacacaggagtcggccacctacattgcagaagagtattcacgcctgcgcagccaggatagcatgagctcagacaccgccaggacatctccagttacagcccgaacactggaaactctgattcgactggccacagcccatgcgaaggcccgcatgagcaagactgtggacctgcaggatgcagaggaagctgtggagttggtccagtatgcttactttaagaaggttctggagaaggagaagaaacgtaagaagcgaagtgaggatgaatcagagacagaagatgaagaggagaaaagccaagaggaccaggagcagaagaggaagagaaggaagactcgccagccagatgccaaagatggggattcatacgacccctatgacttcagtgacacagaggaggaaatgcctcaagtacacactccaaagacggcagactcacaggagaccaaggaatcccagaaagtggagttgagtgaatccaggttgaaggcattcaaggtggccctcttggatgtgttccgggaagctcatgcgcagtcaatcggcatgaatcgcctcacagaatccatcaaccgggacagcgaagagcccttctcttcagttgagatccaggctgctctgagcaagatgcaggatgacaatcaggtcatggtgtctgagggcatcatcttcctcatctgaggaggcctcgtctctgaacttgggttgtgccgagagagtttgttctgtgtttcccaccctctccctgacccaagtctttgcctctactcccttaacagtgttgaattcaactgaaggcgaggaatgttggtgatgaagctgagttcaggactcggtggaccctttgggaatgggtcatgaaagctgccatggggtgaggaaagaggagacagtgggagaggacaatgactattgcatcttcattgcaaaagcactggctcatccgccctacttcccatcccacacaaacccaattgtaaataacatatgacttctgagtacttttgggggcacaactgttttctgtttgctgtttttttgttttgttttttttctccagagcactttggtctagactaggctttgggtggttccaattggtggagagaagctctgaggcacgtcatgcaggtcaagaaagctttctttgcagtagcaccagttaaggtgaatatgtattgtatcacaaaacaaacccaatatccagatgaatatccgagatgttgaataaacttagccatttcgtaca

SEQ ID NO: 303217 - DNA, 2121 bp, Homo sapiens
ttcctcgaggtaacctttggtggcgggaagagttcggaagttttcgcgccggggtggagtcatcctgggaacctccacgcgactttggtggaggtagttctttggcagcgggcatggcgggtaccgtggtgctggacgatgtggagctgcgggaggctcagagagattacctggacttcctggacgacgaggaagaccagggaatttatcagagcaaagttcgggagctgatcagtgacaaccaataccggctgattgtcaatgtgaatgacctgcgcaggaaaaacgagaagagggctaaccggcttctgaacaatgcctttgaggagctggttgccttccagcgggccttaaaggattttgtggcctccattgatgctacctatgccaagcagtatgaggagttctacgtaggactggaaggcagctttggctccaagcacgtctccccgcggactcttacctcctgcttcctcactgccaaccctgtctacggcaggtatgaccagtataagactccaatggagaacattgggctacaggactcactgctgtcacgatttgacttgctcttcatcatgctggatcagatggatcctgagcaggatcgggagatctcagaccatgtccttcggatgcaccgttacagagcacctggggagcaggatggcgatgctatgcccttgggtagtgctgtggatatcctggccacagatgatcccaactttagccaggaagatcagcaggacacccagatttatgagaagcatgacaaccttctacatgggaccaagaagaaaaaggagaagatggtgagtgcagcattcatgaagaagtacatccatgtggccaaaatcatcaagcctgtcctgacacaggagtcggccacctacattgcagaagagtattcacgcctgcgcagccaggatagcatgagctcagacaccgccaggacatctccagttacagcccgaacactggaaactctgattcgactggccacagcccatgcgaaggcccgcatgagcaagactgtggacctgcaggatgcagaggaagctgtggagttggtccagtatgcttactttaagaaggttctggagaaggagaagaaacgtaagaagcgaagtgaggatgaatcagagacagaagatgaagaggagaaaagccaagaggaccaggagcagaagaggaagagaaggaagactcgccagccagatgccaaagatggggattcatacgacccctatgacttcagtgacacagaggaggaaatgcctcaagtacacactccaaagacggcagactcacaggagaccaaggaatcccagaaagtggagttgagtgaatccaggttgaaggcattcaaggtggccctcttggatgtgttccgggaagctcatgcgcagtcaatcggcatgaatcgcctcacagaatccatcaaccgggacagcgaagagcccttctcttcagttgagatccaggctgctctgagcaagatgcaggatgacaatcaggtcatggtgtctgagggcatcatcttcctcatctgaggaggcctcgtctctgaacttgggttgtgccgagagagtttgttctgtgtttcccaccctctccctgacccaagtctttgcctctactcccttaacagtgttgaattcaactgaaggcgaggaatgttggtgatgaagctgagttcaggactcggtggaccctttgggaatgggtcatgaaagctgccatggggtgaggaaagaggagacagtgggagaggacaatgactattgcatcttcattgcaaaagcactggctcatccgccctacttcccatcccacacaaacccaattgtaaataacatatgacttctgagtacttttgggggcacaactgttttctgtttgctgtttttttgttttgttttttttctccagagcactttggtctagactaggctttgggtggttccaattggtggagagaagctctgaggcacgtcatgcaggtcaagaaagctttctttgcagtagcaccagttaaggtgaatatgtattgtatcacaaaacaaacccaatatccagatgaatatccgagatgttgaataaacttagccatttcgtaca

SEQ ID NO: 303218 - DNA, 2127 bp, Homo sapiens
caggtgtgagtggatgtgcctggccagtttctaagatgttatgatatatagatcattgaccattttagttgaggttttacttgtatcttctgagtaagggactccaaaaagttctaagtgcttgtagcctaaccaacttgccctgtctttatgacaggtaggggaaagggatcatctttcagagtcaggtcctgccttgggaatgagaagagcagaataaggtttgggaagcaggggcctggttttcagacctacactcagcctgttagaggttcctgtagtagaaagtggggcttcctaggaagctcagttaaagaagggttgcaggtagaagagatgatttacattgtttaatggctttaaaacacttccctttttcactgctttttgtctgttttgctctttgaggtcaagcctttcattcccactcccagaactgcagcagccttgttgttctttcttcctattgatgtcatgtccacttctgttgtcctcgcattccccagtatgaccagtataagactccaatggagaacattgggctacaggactcactgctgtcacgatttgacttgctcttcatcatgctggatcagatggatcctgagcaggatcgggagatctcagaccatgtccttcggatgcaccgttacagagcacctggggagcaggatggcgatgctatgcccttgggtagtgctgtggatatcctggccacagatgatcccaactttagccaggaagatcagcaggacacccagatttatgagaagcatgacaaccttctacatgggaccaagaagaaaaaggagaagatggtgagtgcagcattcatgaagaagtacatccatgtggccaaaatcatcaagcctgtcctgacacaggagtcggccacctacattgcagaagagtattcacgcctgcgcagccaggatagcatgagctcagacaccgccaggacatctccagttacagcccgaacactggaaactctgattcgactggccacagcccatgcgaaggcccgcatgagcaagactgtggacctgcaggatgcagaggaagctgtggagttggtccagtatgcttactttaagaaggttctggagaaggagaagaaacgtaagaagcgaagtgaggatgaatcagagacagaagatgaagaggagaaaagccaagaggaccaggagcagaagaggaagagaaggaagactcgccagccagatgccaaagatggggattcatacgacccctatgacttcagtgacacagaggaggaaatgcctcaagtacacactccaaagacggcagactcacaggagaccaaggaatcccagaaagtggagttgagtgaatccaggttgaaggcattcaaggtggccctcttggatgtgttccgggaagctcatgcgcagtcaatcggcatgaatcgcctcacagaatccatcaaccgggacagcgaagagcccttctcttcagttgagatccaggctgctctgagcaagatgcaggatgacaatcaggtcatggtgtctgagggcatcatcttcctcatctgaggaggcctcgtctctgaacttgggttgtgccgagagagtttgttctgtgtttcccaccctctccctgacccaagtctttgcctctactcccttaacagtgttgaattcaactgaaggcgaggaatgttggtgatgaagctgagttcaggactcggtggaccctttgggaatgggtcatgaaagctgccatggggtgaggaaagaggagacagtgggagaggacaatgactattgcatcttcattgcaaaagcactggctcatccgccctacttcccatcccacacaaacccaattgtaaataacatatgacttctgagtacttttgggggcacaactgttttctgtttgctgtttttttgttttgttttttttctccagagcactttggtctagactaggctttgggtggttccaattggtggagagaagctctgaggcacgtcatgcaggtcaagaaagctttctttgcagtagcaccagttaaggtgaatatgtattgtatcacaaaacaaacccaatatccagatgaatatccgagatgttgaataaacttagccatttcgtaca

SEQ ID NO: 303219 - DNA, 1444 bp, Homo sapiens
accagaaggtcatgtcatcttcaactacaagggcagaacgtgctgatcaacaaggacatccgttgcacggatgatgagtttacacacctgtacacactgattgtgcggccagacaacacctatgaggagaagatggtgagtgcagcattcatgaagaagtacatccatgtggccaaaatcatcaagcctgtcctgacacaggagtcggccacctacattgcagaagagtattcacgcctgcgcagccaggatagcatgagctcagacaccgccaggacatctccagttacagcccgaacactggaaactctgattcgactggccacagcccatgcgaaggcccgcatgagcaagactgtggacctgcaggatgcagaggaagctgtggagttggtccagtatgcttactttaagaaggttctggagaaggagaagaaacgtaagaagcgaagtgaggatgaatcagagacagaagatgaagaggagaaaagccaagaggaccaggagcagaagaggaagagaaggaagactcgccagccagatgccaaagatggggattcatacgacccctatgacttcagtgacacagaggaggaaatgcctcaagtacacactccaaagacggcagactcacaggagaccaaggaatcccagaaagtggagttgagtgaatccaggttgaaggcattcaaggtggccctcttggatgtgttccgggaagctcatgcgcagtcaatcggcatgaatcgcctcacagaatccatcaaccgggacagcgaagagcccttctcttcagttgagatccaggctgctctgagcaagatgcaggatgacaatcaggtcatggtgtctgagggcatcatcttcctcatctgaggaggcctcgtctctgaacttgggttgtgccgagagagtttgttctgtgtttcccaccctctccctgacccaagtctttgcctctactcccttaacagtgttgaattcaactgaaggcgaggaatgttggtgatgaagctgagttcaggactcggtggaccctttgggaatgggtcatgaaagctgccatggggtgaggaaagaggagacagtgggagaggacaatgactattgcatcttcattgcaaaagcactggctcatccgccctacttcccatcccacacaaacccaattgtaaataacatatgacttctgagtacttttgggggcacaactgttttctgtttgctgtttttttgttttgttttttttctccagagcactttggtctagactaggctttgggtggttccaattggtggagagaagctctgaggcacgtcatgcaggtcaagaaagctttctttgcagtagcaccagttaaggtgaatatgtattgtatcacaaaacaaacccaatatccagatgaatatccgagatgttgaataaacttagccatttcgtaca

SEQ ID NO: 303220 - DNA, 1392 bp, Homo sapiens
agatggtgagtgcagcattcatgaagaagtacatccatcttctcctttttcttcttggtcccatgtagaaaaaggagaagatggtgagtgcagcattcatgaagaagtacatccatgtggccaaaatcatcaagcctgtcctgacacaggagtcggccacctacattgcagaagagtattcacgcctgcgcagccaggatagcatgagctcagacaccgccaggacatctccagttacagcccgaacactggaaactctgattcgactggccacagcccatgcgaaggcccgcatgagcaagactgtggacctgcaggatgcagaggaagctgtggagttggtccagtatgcttactttaagaaggttctggagaaggagaagaaacgtaagaagcgaagtgaggatgaatcagagacagaagatgaagaggagaaaagccaagaggaccaggagcagaagaggaagagaaggaagactcgccagccagatgccaaagatggggattcatacgacccctatgacttcagtgacacagaggaggaaatgcctcaagtacacactccaaagacggcagactcacaggagaccaaggaatcccagaaagtggagttgagtgaatccaggttgaaggcattcaaggtggccctcttggatgtgttccgggaagctcatgcgcagtcaatcggcatgaatcgcctcacagaatccatcaaccgggacagcgaagagcccttctcttcagttgagatccaggctgctctgagcaagatgcaggatgacaatcaggtcatggtgtctgagggcatcatcttcctcatctgaggaggcctcgtctctgaacttgggttgtgccgagagagtttgttctgtgtttcccaccctctccctgacccaagtctttgcctctactcccttaacagtgttgaattcaactgaaggcgaggaatgttggtgatgaagctgagttcaggactcggtggaccctttgggaatgggtcatgaaagctgccatggggtgaggaaagaggagacagtgggagaggacaatgactattgcatcttcattgcaaaagcactggctcatccgccctacttcccatcccacacaaacccaattgtaaataacatatgacttctgagtacttttgggggcacaactgttttctgtttgctgtttttttgttttgttttttttctccagagcactttggtctagactaggctttgggtggttccaattggtggagagaagctctgaggcacgtcatgcaggtcaagaaagctttctttgcagtagcaccagttaaggtgaatatgtattgtatcacaaaacaaacccaatatccagatgaatatccgagatgttgaataaacttagccatttcgtaca

SEQ ID NO: 303221 - DNA, 1254 bp, Homo sapiens
ctccagccttgtacaatagagggagacctgagaaagttcagagcctggagagaagactgggagtcaggaactggatttaatgaggccattgttacgatggatcttgtgcctgtggagtcttttgtgaggcagtagccttatctgcggaggctgccgtgacgtagggtatgggcctaaataggccattgagagtcatgcgcttggtctgtagaggctgactggagaaagttctggagaaggagaagaaacgtaagaagcgaagtgaggatgaatcagagacagaagatgaagaggagaaaagccaagaggaccaggagcagaagaggaagagaaggaagactcgccagccagatgccaaagatggggattcatacgacccctatgacttcagtgacacagaggaggaaatgcctcaagtacacactccaaagacggcagactcacaggagaccaaggaatcccagaaagtggagttgagtgaatccaggttgaaggcattcaaggtggccctcttggatgtgttccgggaagctcatgcgcagtcaatcggcatgaatcgcctcacagaatccatcaaccgggacagcgaagagcccttctcttcagttgagatccaggctgctctgagcaagatgcaggatgacaatcaggtcatggtgtctgagggcatcatcttcctcatctgaggaggcctcgtctctgaacttgggttgtgccgagagagtttgttctgtgtttcccaccctctccctgacccaagtctttgcctctactcccttaacagtgttgaattcaactgaaggcgaggaatgttggtgatgaagctgagttcaggactcggtggaccctttgggaatgggtcatgaaagctgccatggggtgaggaaagaggagacagtgggagaggacaatgactattgcatcttcattgcaaaagcactggctcatccgccctacttcccatcccacacaaacccaattgtaaataacatatgacttctgagtacttttgggggcacaactgttttctgtttgctgtttttttgttttgttttttttctccagagcactttggtctagactaggctttgggtggttccaattggtggagagaagctctgaggcacgtcatgcaggtcaagaaagctttctttgcagtagcaccagttaaggtgaatatgtattgtatcacaaaacaaacccaatatccagatgaatatccgagatgttgaataaacttagccatttcgtaca

SEQ ID NO: 303222 - DNA, 935 bp, Homo sapiens
ttcctcgaggtaacctttggtggcgggaagagttcggaagttttcgcgccggggtggagtcatcctgggaacctccacgcgactttggtggaggtagttctttggcagcgggcatggcgggtaccgtggtgctggacgatgtggagctgcgggaggctcagagagattacctggacttcctggacgacgaggaagaccagggaatttatcagagcaaagttcgggagctgatcagtgacaaccaataccggctgattgtcaatgtgaatgacctgcgcaggaaaaacgagaagagggctaaccggcttctgaacaatgcctttgaggagctggttgccttccagcgggccttaaaggattttgtggcctccattgatgctacctatgccaagcagtatgaggagttctacgtaggactggaaggcagctttggctccaagcacgtctccccgcggactcttacctcctgcttcctcagctgtgtggtctgtgtggagggcattgtcactaaatgttctctagttcgtcccaaagtcgtccgcagtgtccactactgtcctgctactaagaagaccatagagcgacgttattctgatctcaccaccctggtggcctttccctccagctctgtctatcctaccaaggatgaggagaacaatccccttgagacagaatatggcctttctgtctacaaggatcaccagaccatcaccatccaggagatgccggagaaggccccagccggccagctcccccgctctgtggacgtcattctggatgatgacttggtggataaagcgaagcctggtgaccgggttcaggtggtgggaacctaccgttgccttcctggaaagaagggaggctacacctctgggaccttcaggatggctgatggtgagtagatagagggtcgcttttttgtgggttttcattga

SEQ ID NO: 303223 - DNA, 689 bp, Homo sapiens
gtgtctgagggcatcatgacctgattgtcatcctgcatcttgctcagacaccatgacctgattgtcatcctgcatcttgctcagggtcatggtgtctgagggcatcatcttcctcatctgaggaggcctcgtctctgaacttgggttgtgccgagagagtttgttctgtgtttcccaccctctccctgacccaagtctttgcctctactcccttaacagtgttgaattcaactgaaggcgaggaatgttggtgatgaagctgagttcaggactcggtggaccctttgggaatgggtcatgaaagctgccatggggtgaggaaagaggagacagtgggagaggacaatgactattgcatcttcattgcaaaagcactggctcatccgccctacttcccatcccacacaaacccaattgtaaataacatatgacttctgagtacttttgggggcacaactgttttctgtttgctgtttttttgttttgttttttttctccagagcactttggtctagactaggctttgggtggttccaattggtggagagaagctctgaggcacgtcatgcaggtcaagaaagctttctttgcagtagcaccagttaaggtgaatatgtattgtatcacaaaacaaacccaatatccagatgaatatccgagatgttgaataaacttagccatttcgtaca

SEQ ID NO: 303224 - DNA, 1800 bp, Homo sapiens
ttcctcgaggtaacctttggtggcgggaagagttcggaagttttcgcgccggggtggagtcatcctgggaacctccacgcgactttggtggaggtagttctttggcagcgggcatggcgggtaccgtggtgctggacgatgtggagctgcgggaggctcagagagattacctggacttcctggacgacgaggaagaccagggaatttatcagagcaaagttcgggagctgatcagtgacaaccaataccggctgattgtcaatgtgaatgacctgcgcaggaaaaacgagaagagggctaaccggcttctgaacaatgcctttgaggagctggttgccttccagcgggccttaaaggattttgtggcctccattgatgctacctatgccaagcagtatgaggagttctacgtaggactggaaggcagctttggctccaagcacgtctccccgcggactcttacctcctgcttcctcagctgtgtggtctgtgtggagggcattgtcactaaatgttctctagttcgtcccaaagtcgtccgcagtgtccactactgtcctgctactaagaagaccatagagcgacgttattctgatctcaccaccctggtggcctttccctccagctctgtctatcctaccaaggtttgggagcaggttggcataggaaaatgctttcttcttggtgttcagattgatctggattgaggacaatgcaaggttttcctctggagacaaaagatcatttatatggattacttgatgtctgaactgattctatcaaacaattcctctcctcccctcatcaaattttaattgagaactactgtattcaaagcactattaggcgctatggaggacaaggatataaataagacccagtcctcgtcattagtcttcacagtggtggagaaatgaaacataaacaaaaacgaatgaatatcttagaattataacttaaacatactttagcatcatttagtctacctccagatgaaatgctgagatcagagaagttaaacaatttgcttacggtcccagttagtgatggccttaaggactaggacctgtgtctctttaattcatgccagttgtattttctaagtcattctgttgtcttcttcggaccttaagatctccacttttttagaatttcctcttcaggaagtacttgggaagtactcttctgttgattactgtggccaagcttctttacttgaaaagtgaaatacattggaccagatcttctggaggttgtctatggtgatgcttaagagcgtgggctttggagttaacacctgtatcaagtcaagactctgctacttaactgtgtgacctgggggaacttacttaatctctcctagtctcctggtttccttgtgcatgacgtgtgaaaataccttctttacaaagttgttgtgataattacatgagataattttgtgaagtaatagcacagtgcctggcacatagcaaacactcaataagtgacaactgtgtttttagaaaattcaaatgtgaaggaagtaaaactttaatatacgtacaggaaagctcacataagtgtatagcttgatgaatttttacaagctgagtacacctgtgtaaccagctccaaatgaggaaatattagcacacagaagtccctcttgagggctcatgttacctaggggtaaccactatcctgatgtctaacagtatggattactttcagctgttttttatttaaatacttatgggctttttatgctcaacattgtgtttatgagatttatccatgttgtgtataggtgtgtttcat

SEQ ID NO: 303225 - DNA, 154 bp, Homo sapiens
ttgtttttaatgatctaagaatgtctgctgttttgaggatccatttttttgagttctgcccagtctaatttttctttctcttgcttatgtacaggcttctgaacaatgcctttgaggagctggttgccttccagcgggccttaaaggattttgt

SEQ ID NO: 303226 - DNA, 338 bp, Homo sapiens
ccattgatgctacctatgccaagcagtatgaggagttctacgtaggactggaaggcagctttggctccaagcacgtctccccgcggactcttacctcctgcttcctcagctgtgtggtctgtgtggagggcattgtcactaaatgtaagtgggttaaagggggccgcttaggaaatgaatagacagggagatggggaaagcaggagaggcaaagtagatctgggtagcttgtggcttcaaagaggtggagcattggaattacgtggtaaaacttggagggctcagtgtgtacaatgattgggggaccttgagtaatcacatgtattagtagaatgatg

SEQ ID NO: 303227 - DNA, 853 bp, Homo sapiens
gttttcatctccctgcgttataaagcaccatcctctgaatttggtcgttgcatcgggtcaaaagttctgcagcttgaaaaaccctgcaaaaacatccggaaaggagggagaacactacaactcccagaacgcaatgctttccctctcgccagcctgtcccctccagctgctcaatgaccagcctctgtgagcctcctctcagccctattggtcagtttgctcgtcagtgagtgaggcggagggaggggaggaacagagaatcccggatggtacgtttcccgccaccgcggggcgcgcagcggaaaacccgaagaagaagaagcttttgattggacagtcgctagtccgacctcagagaactcagccaatcataatgcttatatgctcccaaggtccccgcctcttcctcgaggtaacctttggtggcgggaagagttcggaagttttcgcgccggggtggagtcatcctgggaacctccacgcgactttggtggaggtagttctttggcagcgggcatggcgggtaccgtggtgctggacgatgtggagctgcgggaggctcagagagattacctggacttcctggacgacgaggtgagggaggcgccggcgcgcgggctctagcgctcggagcccctgcggacgcggcccggccgggaagccagaggcccgccagacctccagaccgtgtgccgcagcggagcctgccgggcccgagcctccagccccaatcttgtaacttctcaacgccggactcgctagtttgtgttcgataagtgaactcttaggaagccagctttctcttaagtacaagcgatggtccgggcgcgcaaaaggcgacaggttcccatta

SEQ ID NO: 303228 - DNA, 2480 bp, Homo sapiens
aaaacagtatttatttttacttttgtgaccactattttagaaactttatttaatattttaatgttttcagtcattgctttggttatctataaaataggcttttgtgccctacttttcttcttgtagggcttggtggtgttttatcgattgtcagaattgtttttgaaagcctaagaacccagctttttagaaaggattttcacactggcatttctaggtagtgatattttcttccacttacctgctgaagcacatttatgcatttctttatggcaaaaccaaataactttagttgtggtctgcctgatactaccatagcacctcagtaccaaggggagggattttgactagttgaattattaagccaccacaataaagcagatttttaaataagaaataataatgttaacttgactgtacattgagatattctgcagctgatagagcagcattttaaaaatgtaacaggtggaaaattacactgtgcttaatgactgattttttttttaaactgcgagtcccttaagatcacgtttgtcaagtgtgtattcacacatttacttaaatcaagggactcaatgcttgcttttattttaaccatcttttactatttttagaaggaaactagctttagtagtgggttgccctatatgttttctctttttgctcttaatatgccattgggtttttgtgtgtatgtgattttcaaaattcatgacttgaagtgcaaggacagatctagatgtttgtttaccaagctatgtgacttctcccaaaggatctgtactttctttccttacaacagcttgaaaatcattattttaaaatccttaaatcactgtgtctagatcattttttacattgtgtgccatagacttacccatgggacaacagagctccttcatttttggacaactactgtaatcatttttttttaggaaaaatggaaggtgccgggggtaatcatggccagtcaataattatataaaggagttcaaatactatagctgtcagttgatgaatttgttatgtagtaaaatgtatgactttgtatgggtttcttcagccctttttctgccactagcaaccagaatagcactttaccttttggttggctagataagtggctgactacctgtttttctcactgtggtgtgattggctaaacaatctcgcattaaaaattcaaatgtaaattgaattcacatgaaaaatcatgtttggttgtaaacctccaatgttttgattctctaatcatgttttcgtcacatgctgagtaaaagtgccttacaatgtaaaaattgtacagtacttatgttcccaagtagcatcatcatcttctgggtagtaattacattgtggtattaatatttagaaaaatggacctcagcagtgtatttactgtacatctcttaagtccttaactgtagttttaataagcatgacattatttgataagtatataacatttacatcatttcaaaaaatactgccgttactgtcttttatgcatattttagcctgaaattttgaagcgtcttttttctttcttttttctttttttgttttgttttttgttattgatattaaacagtgtaatctttgcaagcgtatattgaagattattctggagcatttattgccttaccagaaatgttagtaggaaatgttctttagagtagaaagatccacagcagttcatcctcatccacactaagccatcctgttagcttttaaaggaagttaatttaattaacattaatatactctatgggctccctctcccacctgtctgcatagaaaggcagaattagacatagcatgctttggaaaagcaaataggaattgttgggaatgatttaatcttgttgttgttgttgttgttgttcacttgtggttctacattcctggtgaatgatgaatgttgctgtcaaagggctgccccctaccttataagggttgctgggcatttgaaggcaggaagatttttaaagatagattgaggttggtttaaaattattcctgtaaaccaacaataaagcaaagaagaggttcatttttgtaaataacactggtttcaaatagtgatgttagacttaacctaatttataaacaagagattaatatctccatgcatagttttagacaaaaaaagatgtttcaataaaattactgtcttgtaatataaatgttgtccacttcccttttccacaggcctagaacagttaaagggaacataatttgtttaggctcccacataaatgtgaatctggccaacaactttggttcatcctttagtgaattagaggatttggctaccctgagtatatttatattcatttcttctgttctccttctgttattatacttaatcttctaaactaaactaatgtgaacagtagggaagcaagggcccaaatgcataagtttctttgcactgttgcacttacttaatacaaataaatgttttttaaagcttt

SEQ ID NO: 303229 - DNA, 3107 bp, Homo sapiens
ccgcccttgctcttcccagtttctccgtcagcctgcgggtcccggctggcggctgcttccggtaggagagcggtgtagagcgagcaggtctcagctcctcgtcatgtcatacggtcccttagacatgtaccggaacccggggccctcggggccccagctccgggacttcagcagcatcatccagacgtgcagcggcaacatccagcggatcagccaagccactgctcagataaagaatttgatgagccagctaggaactaagcaggactcaagcaagctacaggaaaatctgcaacagttacaacactccacaaatcagctcgccaaggaaacaaatgaattgctgaaagaattagggtccttgccccttcccttatctacttcagaacagcgccagcagagacttcagaaggaacgcctcatgaatgacttctctgcagccttaaacaatttccaggctgtgcagagaagggtatctgaaaaggaaaaggagagtattgccagagcaagagctggatctcgtctttctgcagaagagaggcaaagagaggagcagctggtctcatttgacagccatgaggagtggaaccagatgcagagccaggaggatgaggtggccatcactgagcaggatttggaacttattaaagaaagagaaacggcaattcggcagctggaggctgacattttggatgtcaatcagatatttaaagatttggccatgatgatccatgaccagggtgatctgattgatagcatagaagccaatgtggaaagctcagaggtgcacgtcgaaagagccactgaacagttacagcgagctgcttactatcagaaaaaatctcgcaagaagatgtgtatcctggtgcttgtcctgtcagtgattattctaatcttgggacttattatctggctagtttataaaacgaagtgattgcctccgatcgttctcccgctgagctgttttcaagggcaagtgcttgttgaagtcttgccagaacaaactgatcacaagaagacagcatatatcagaacgtcctgtaatcatttagttagaaactaactactaactagtctttggaattcgtgacctatggagacagtaattatcaatttattgattctattgatttctcaaattaggaattaacttatgtggattttgcttcctcttgtattctgattgcccttcatcccaagtgtttactgaaaattccattctagatattcttgttttgacaaatgacactacagtctcgtaatattgtcttttatgtatatacaaaatttacctttttactagcatctgagatagagttactttctggtacccagtatattggagtctgtcagaaactctataataggccaccagtttttattatttaacatttttatttgaatttctaagaagcctattctctatctattttgaaagattttggcactatatttaattggaaggtaaaatattgtacatgtgatccagagtaaatgagaagtctctatctgagctggtcagttactggagtacatgttactaatctgggtttaaagtttacttcattatctgctagtgtcatccacagcagttcatcctcatccacactaagccatcctgttagcttttaaaggaagttaatttaattaacattaatatactctatgggctccctctcccacctgtctgcatagaaaggcagaattagacatagcatgctttggaaaagcaaataggaattgttgggaatgatttaatcttgttgttgttgttgttgttgttcacttgtggttctacattcctggtgaatgatgaatgttgctgtcaaagggctgccccctaccttataagggttgctgggcatttgaaggcaggaagatttttaaagatagattgaggttggtttaaaattattcctgtaaaccaacaataaagcaaagaagaggttcatttttgtaaataacactggtttcaaatagtgatgttagacttaacctaatttataaacaagagattaatatctccatgcatagttttagacaaaaaaagatgtttcaataaaattactgtcttgtaatataaatgttgtccacttcccttttccacaggcctagaacagttaaagggaacataatttgtttaggctcccacataaatgtgaatctggccaacaactttggttcatcctttagtgaattagaggatttggctaccctgagtatatttatattcatttcttctgttctccttctgttattatacttaatcttctaaactaaactaatgtgaacagtagggaagcaagggcccaaatgcataagtttctttgcactgttgcacttacttaatacaaataaatgttttttaaagcttttgtagtatgtttttatgagttaacatcctaatgtggtaggtattaggtaatgtgctgtcatgagaaaaattgagacttccaagaaaactggacaccaggtgagggttggtttggagacggaataggtgtagctgcctttccttgaaaaacagtgtgtagagatggctgagtgcaatggctcacacttgtaatcccaacactttggaaggctgaggcgggaggatcagtatatcggtacgtctgagcccaagagttcaagatcagcctgggcagtatagcaagaccccatctccattttttttttaatgattttttaattaaaaaaaagaacaacaggatagagctgttggggtggcacagtggcccaaagagcagcttcagagataattccttggttctatgatccctgtttaactccaaattacagtcggacttggatacatcatttgtaacattgtaggaaagaaaaaagtcttggttgtgaaaaacgatttgcatttgggtaaaataaagtgaccatgcttttgttctgtaatactgtgtgacctgtggttgttgtaatggtgatcatggagagcaaatatgaacttggcctggattttaaatggcctagaatttgtggtagttgccaaagaggttctcctaggtggtcttaataaacctattcacagaaaaaacaagcttactgcaaaatacagctataaccctgaagcgcaacaatcaaaaaggagg

SEQ ID NO: 303230 - DNA, 3057 bp, Homo sapiens
ccgcccttgctcttcccagtttctccgtcagcctgcgggtcccggctggcggctgcttccggtaggagagcggtgtagagcgagcaggtctcagctcctcgtcatgtcatacggtcccttagacatgtaccggaacccggggccctcggggccccagctccgggacttcagcagcatcatccagacgtgcagcggcaacatccagcggatcagccaagccactgctcagataaagaatttgatgagccagctaggaactaagcaggactcaagcaagctacaggaaaatctgcaacagttacaacactccacaaatcagctcgccaaggaaacaaatgaattgctgaaagaattagggtccttgccccttcccttatctacttcagaacagcgccagcagagacttcagaaggaacgcctcatgaatgacttctctgcagccttaaacaatttccaggctgtgcagagaagggtatctggcagaagagaggcaaagagaggagcagctggtctcatttgacagccatgaggagtggaaccagatgcagagccaggaggatgaggtggccatcactgagcaggatttggaacttattaaagaaagagaaacggcaattcggcagctggaggctgacattttggatgtcaatcagatatttaaagatttggccatgatgatccatgaccagggtgatctgattgatagcatagaagccaatgtggaaagctcagaggtgcacgtcgaaagagccactgaacagttacagcgagctgcttactatcagaaaaaatctcgcaagaagatgtgtatcctggtgcttgtcctgtcagtgattattctaatcttgggacttattatctggctagtttataaaacgaagtgattgcctccgatcgttctcccgctgagctgttttcaagggcaagtgcttgttgaagtcttgccagaacaaactgatcacaagaagacagcatatatcagaacgtcctgtaatcatttagttagaaactaactactaactagtctttggaattcgtgacctatggagacagtaattatcaatttattgattctattgatttctcaaattaggaattaacttatgtggattttgcttcctcttgtattctgattgcccttcatcccaagtgtttactgaaaattccattctagatattcttgttttgacaaatgacactacagtctcgtaatattgtcttttatgtatatacaaaatttacctttttactagcatctgagatagagttactttctggtacccagtatattggagtctgtcagaaactctataataggccaccagtttttattatttaacatttttatttgaatttctaagaagcctattctctatctattttgaaagattttggcactatatttaattggaaggtaaaatattgtacatgtgatccagagtaaatgagaagtctctatctgagctggtcagttactggagtacatgttactaatctgggtttaaagtttacttcattatctgctagtgtcatccacagcagttcatcctcatccacactaagccatcctgttagcttttaaaggaagttaatttaattaacattaatatactctatgggctccctctcccacctgtctgcatagaaaggcagaattagacatagcatgctttggaaaagcaaataggaattgttgggaatgatttaatcttgttgttgttgttgttgttgttcacttgtggttctacattcctggtgaatgatgaatgttgctgtcaaagggctgccccctaccttataagggttgctgggcatttgaaggcaggaagatttttaaagatagattgaggttggtttaaaattattcctgtaaaccaacaataaagcaaagaagaggttcatttttgtaaataacactggtttcaaatagtgatgttagacttaacctaatttataaacaagagattaatatctccatgcatagttttagacaaaaaaagatgtttcaataaaattactgtcttgtaatataaatgttgtccacttcccttttccacaggcctagaacagttaaagggaacataatttgtttaggctcccacataaatgtgaatctggccaacaactttggttcatcctttagtgaattagaggatttggctaccctgagtatatttatattcatttcttctgttctccttctgttattatacttaatcttctaaactaaactaatgtgaacagtagggaagcaagggcccaaatgcataagtttctttgcactgttgcacttacttaatacaaataaatgttttttaaagcttttgtagtatgtttttatgagttaacatcctaatgtggtaggtattaggtaatgtgctgtcatgagaaaaattgagacttccaagaaaactggacaccaggtgagggttggtttggagacggaataggtgtagctgcctttccttgaaaaacagtgtgtagagatggctgagtgcaatggctcacacttgtaatcccaacactttggaaggctgaggcgggaggatcagtatatcggtacgtctgagcccaagagttcaagatcagcctgggcagtatagcaagaccccatctccattttttttttaatgattttttaattaaaaaaaagaacaacaggatagagctgttggggtggcacagtggcccaaagagcagcttcagagataattccttggttctatgatccctgtttaactccaaattacagtcggacttggatacatcatttgtaacattgtaggaaagaaaaaagtcttggttgtgaaaaacgatttgcatttgggtaaaataaagtgaccatgcttttgttctgtaatactgtgtgacctgtggttgttgtaatggtgatcatggagagcaaatatgaacttggcctggattttaaatggcctagaatttgtggtagttgccaaagaggttctcctaggtggtcttaataaacctattcacagaaaaaacaagcttactgcaaaatacagctataaccctgaagcgcaacaatcaaaaaggagg

SEQ ID NO: 303231 - DNA, 3176 bp, Homo sapiens
ccgcccttgctcttcccagtttctccgtcagcctgcgggtcccggctggcggctgcttccggtaggagagcggtgtagagcgagcaggtctcagctcctcgtcatgtcatacggtcccttagacatgtaccggaacccggggccctcggggccccagctccgggacttcagcagcatcatccagacgtgcagcggcaacatccagcggatcagccaagccactgctcagataaagaatttgatgagccagctaggaactaagcaggactcaagcaagctacaggaaaatctgcaacagttacaacactccacaaatcagctcgccaaggaaacaaatgaattgctgaaagaattagggtccttgccccttcccttatctacttcagaacagcgccagcagagacttcagaaggaacgcctcatgaatgacttctctgcagccttaaacaatttccaggctgtgcagagaagggtatctgaaaaggaaaaggagagtattgccagagcaagagctggatctcgtctttctgcagaagagaggcaaagagaggagcagctggtctcatttgacagctctttgcttctggatatgaagaatgtggccctccaagactttattgatagcagaggactggagccctgccatgaggagtggaaccagatgcagagccaggaggatgaggtggccatcactgagcaggatttggaacttattaaagaaagagaaacggcaattcggcagctggaggctgacattttggatgtcaatcagatatttaaagatttggccatgatgatccatgaccagggtgatctgattgatagcatagaagccaatgtggaaagctcagaggtgcacgtcgaaagagccactgaacagttacagcgagctgcttactatcagaaaaaatctcgcaagaagatgtgtatcctggtgcttgtcctgtcagtgattattctaatcttgggacttattatctggctagtttataaaacgaagtgattgcctccgatcgttctcccgctgagctgttttcaagggcaagtgcttgttgaagtcttgccagaacaaactgatcacaagaagacagcatatatcagaacgtcctgtaatcatttagttagaaactaactactaactagtctttggaattcgtgacctatggagacagtaattatcaatttattgattctattgatttctcaaattaggaattaacttatgtggattttgcttcctcttgtattctgattgcccttcatcccaagtgtttactgaaaattccattctagatattcttgttttgacaaatgacactacagtctcgtaatattgtcttttatgtatatacaaaatttacctttttactagcatctgagatagagttactttctggtacccagtatattggagtctgtcagaaactctataataggccaccagtttttattatttaacatttttatttgaatttctaagaagcctattctctatctattttgaaagattttggcactatatttaattggaaggtaaaatattgtacatgtgatccagagtaaatgagaagtctctatctgagctggtcagttactggagtacatgttactaatctgggtttaaagtttacttcattatctgctagtgtcatccacagcagttcatcctcatccacactaagccatcctgttagcttttaaaggaagttaatttaattaacattaatatactctatgggctccctctcccacctgtctgcatagaaaggcagaattagacatagcatgctttggaaaagcaaataggaattgttgggaatgatttaatcttgttgttgttgttgttgttgttcacttgtggttctacattcctggtgaatgatgaatgttgctgtcaaagggctgccccctaccttataagggttgctgggcatttgaaggcaggaagatttttaaagatagattgaggttggtttaaaattattcctgtaaaccaacaataaagcaaagaagaggttcatttttgtaaataacactggtttcaaatagtgatgttagacttaacctaatttataaacaagagattaatatctccatgcatagttttagacaaaaaaagatgtttcaataaaattactgtcttgtaatataaatgttgtccacttcccttttccacaggcctagaacagttaaagggaacataatttgtttaggctcccacataaatgtgaatctggccaacaactttggttcatcctttagtgaattagaggatttggctaccctgagtatatttatattcatttcttctgttctccttctgttattatacttaatcttctaaactaaactaatgtgaacagtagggaagcaagggcccaaatgcataagtttctttgcactgttgcacttacttaatacaaataaatgttttttaaagcttttgtagtatgtttttatgagttaacatcctaatgtggtaggtattaggtaatgtgctgtcatgagaaaaattgagacttccaagaaaactggacaccaggtgagggttggtttggagacggaataggtgtagctgcctttccttgaaaaacagtgtgtagagatggctgagtgcaatggctcacacttgtaatcccaacactttggaaggctgaggcgggaggatcagtatatcggtacgtctgagcccaagagttcaagatcagcctgggcagtatagcaagaccccatctccattttttttttaatgattttttaattaaaaaaaagaacaacaggatagagctgttggggtggcacagtggcccaaagagcagcttcagagataattccttggttctatgatccctgtttaactccaaattacagtcggacttggatacatcatttgtaacattgtaggaaagaaaaaagtcttggttgtgaaaaacgatttgcatttgggtaaaataaagtgaccatgcttttgttctgtaatactgtgtgacctgtggttgttgtaatggtgatcatggagagcaaatatgaacttggcctggattttaaatggcctagaatttgtggtagttgccaaagaggttctcctaggtggtcttaataaacctattcacagaaaaaacaagcttactgcaaaatacagctataaccctgaagcgcaacaatcaaaaaggagg

SEQ ID NO: 303232 - DNA, 2584 bp, Homo sapiens
tttttatgaatcatttatgggtaagttaaatacttcatagcccccaaaaattcattgttttttctccaaagaaaaggctagtctcttaccaaggtagtaactcgatttcatggctggatagtttggatagtggtagtgaaaccaggacatgtaacatcagaaatctgttcaatttgcagtcttaaaacatctgagtgtgttaaaacatcctctgtccttccttttgcagatagcatagaagccaatgtggaaagctcagaggtgcacgtcgaaagagccactgaacagttacagcgagctgcttactatcagaaaaaatctcgcaagaagatgtgtatcctggtgcttgtcctgtcagtgattattctaatcttgggacttattatctggctagtttataaaacgaagtgattgcctccgatcgttctcccgctgagctgttttcaagggcaagtgcttgttgaagtcttgccagaacaaactgatcacaagaagacagcatatatcagaacgtcctgtaatcatttagttagaaactaactactaactagtctttggaattcgtgacctatggagacagtaattatcaatttattgattctattgatttctcaaattaggaattaacttatgtggattttgcttcctcttgtattctgattgcccttcatcccaagtgtttactgaaaattccattctagatattcttgttttgacaaatgacactacagtctcgtaatattgtcttttatgtatatacaaaatttacctttttactagcatctgagatagagttactttctggtacccagtatattggagtctgtcagaaactctataataggccaccagtttttattatttaacatttttatttgaatttctaagaagcctattctctatctattttgaaagattttggcactatatttaattggaaggtaaaatattgtacatgtgatccagagtaaatgagaagtctctatctgagctggtcagttactggagtacatgttactaatctgggtttaaagtttacttcattatctgctagtgtcatccacagcagttcatcctcatccacactaagccatcctgttagcttttaaaggaagttaatttaattaacattaatatactctatgggctccctctcccacctgtctgcatagaaaggcagaattagacatagcatgctttggaaaagcaaataggaattgttgggaatgatttaatcttgttgttgttgttgttgttgttcacttgtggttctacattcctggtgaatgatgaatgttgctgtcaaagggctgccccctaccttataagggttgctgggcatttgaaggcaggaagatttttaaagatagattgaggttggtttaaaattattcctgtaaaccaacaataaagcaaagaagaggttcatttttgtaaataacactggtttcaaatagtgatgttagacttaacctaatttataaacaagagattaatatctccatgcatagttttagacaaaaaaagatgtttcaataaaattactgtcttgtaatataaatgttgtccacttcccttttccacaggcctagaacagttaaagggaacataatttgtttaggctcccacataaatgtgaatctggccaacaactttggttcatcctttagtgaattagaggatttggctaccctgagtatatttatattcatttcttctgttctccttctgttattatacttaatcttctaaactaaactaatgtgaacagtagggaagcaagggcccaaatgcataagtttctttgcactgttgcacttacttaatacaaataaatgttttttaaagcttttgtagtatgtttttatgagttaacatcctaatgtggtaggtattaggtaatgtgctgtcatgagaaaaattgagacttccaagaaaactggacaccaggtgagggttggtttggagacggaataggtgtagctgcctttccttgaaaaacagtgtgtagagatggctgagtgcaatggctcacacttgtaatcccaacactttggaaggctgaggcgggaggatcagtatatcggtacgtctgagcccaagagttcaagatcagcctgggcagtatagcaagaccccatctccattttttttttaatgattttttaattaaaaaaaagaacaacaggatagagctgttggggtggcacagtggcccaaagagcagcttcagagataattccttggttctatgatccctgtttaactccaaattacagtcggacttggatacatcatttgtaacattgtaggaaagaaaaaagtcttggttgtgaaaaacgatttgcatttgggtaaaataaagtgaccatgcttttgttctgtaatactgtgtgacctgtggttgttgtaatggtgatcatggagagcaaatatgaacttggcctggattttaaatggcctagaatttgtggtagttgccaaagaggttctcctaggtggtcttaataaacctattcacagaaaaaacaagcttactgcaaaatacagctataaccctgaagcgcaacaatcaaaaaggagg

SEQ ID NO: 303233 - DNA, 2375 bp, Homo sapiens
ccgcccttgctcttcccagtttctccgtcagcctgcgggtcccggctggcggctgcttccggtaggagagcggtgtagagcgagcaggtctcagctcctcgtcatgtcatacggtcccttagacatgtaccggaacccggggccctcggggccccagctccgggacttcagcagcatcatccagacgtgcagcggcaacatccagcggatcagccaagccactgctcagataaagaatttgatgagccagctaggaactaagcaggactcaagcaagctacaggaaaatctgcaacagttacaacactccacaaatcagctcgccaaggaaacaaatgaattgctgaaagaattagggtccttgccccttcccttatctacttcagaacagcgccagcagagacttcagaaggaacgcctcatgaatgacttctctgcagccttaaacaatttccaggctgtgcagagaagggtatctgaaaaggaaaaggagagtattgccagagcaagagctggatctcgtctttctgcagaagagaggcaaagagaggagcagctggtctcatttgacagccatgaggagtggaaccagatgcagagccaggaggatgaggtggccatcactgagcaggatttggaacttattaaagaaagagaaacggcaattcggcagctggaggctgacattttggatgtcaatcagatatttaaagatttggccatgatgatccatgaccagggtgatctgattgatagcatagaagccaatgtggaaagctcagaggtgcacgtcgaaagagccactgaacagttacagcgagctgcttactatcagaaaaaatctcgcaagaagatgtgtatcctggtgcttgtcctgtcagtgattattctaatcttgggacttattatctggctagtttataaaacgaagtgattgcctccgatcgttctcccgctgagctgttttcaagggcaagtgcttgttgaagtcttgccagaacaaactgatcacaagaagacagcatatatcagaacgtcctgtaatcatttagttagaaactaactactaactagtctttggaattcgtgacctatggagacagtaattatcaatttattgattctattgatttctcaaattaggaattaacttatgtggattttgcttcctcttgtattctgattgcccttcatcccaagtgtttactgaaaattccattctagatattcttgttttgacaaatgacactacagtctcgtaatattgtcttttatgtatatacaaaatttacctttttactagcatctgagatagagttactttctggtacccagtatattggagtctgtcagaaactctataataggccaccagtttttattatttaacatttttatttgaatttctaagaagcctattctctatctattttgaaagattttggcactatatttaattggaaggtaaaatattgtacatgtgatccagagtaaatgagaagtctctatctgagctggtcagttactggagtacatgttactaatctgggtttaaagtttacttcattatctgctagtgtcatccacagcagttcatcctcatccacactaagccatcctgttagcttttaaaggaagttaatttaattaacattaatatactctatgggctccctctcccacctgtctgcatagaaaggcagaattagacatagcatgctttggaaaagcaaataggaattgttgggaatgatttaatcttgttgttgttgttgttgttgttcacttgtggttctacattcctggtgaatgatgaatgttgctgtcaaagggctgccccctaccttataagggttgctgggcatttgaaggcaggaagatttttaaagatagattgaggttggtttaaaattattcctgtaaaccaacaataaagcaaagaagaggttcatttttgtaaataacactggtttcaaatagtgatgttagacttaacctaatttataaacaagagattaatatctccatgcatagttttagacaaaaaaagatgtttcaataaaattactgtcttgtaatataaatgttgtccacttcccttttccacaggcctagaacagttaaagggaacataatttgtttaggctcccacataaatgtgaatctggccaacaactttggttcatcctttagtgaattagaggatttggctaccctgagtatatttatattcatttcttctgttctccttctgttattatacttaatcttctaaactaaactaatgtgaacagtagggaagcaagggcccaaatgcataagtttctttgcactgttgcacttacttaatacaaataaatgttttttaaagcttt

SEQ ID NO: 303234 - DNA, 3053 bp, Homo sapiens
ccgcccttgctcttcccagtttctccgtcagcctgcgggtcccggctggcggctgcttccggtaggagagcggtgtagagcgagcaggtctcagctcctcgtcatgtcatacggtcccttagacatgtaccggaacccggggccctcggggccccagctccgggacttcagcagcatcatccagacgtgcagcggcaacatccagcggatcagccaagccactgctcagataaagaatttgatgagccagctaggaactaagcaggactcaagcaagctacaggaaaatctgcaacagttacaacactccacaaatcagctcgccaaggaaacaaatgaattgctgaaagaattagggtccttgccccttcccttatctacttcagaacagcgccagcagagacttcagaaggaacgcctcatgaatgacttctctgcagccttaaacaatttccaggctgtgcagagaagggtatctgaaaaggaaaaggagagtattgccagagcaagagctggatctcgtctttctgcagaagagaggcaaagagaggagcagctggtctcatttgacagccatgaggagtggaaccagatgcagagccaggaggatgaggtggccatcactgagcaggatttggaacttattaaagaaagagaaacggcaattcggcagctggaggctgacattttggatgtcaatcagatatttaaagatttggccatgatgatccatgaccagggtgatctgattgatagcatagaagccaatgtggaaagctcagaggtgcacgtcgaaagagccactgaacagttacagcgagctgcttactatcagaaaaaatctcgcaagaagatgtgtatcctggtgcttgtcctgtcagtgattattctaatcttgggacttattatctggctagtttataaaacgaagtgattgcctccgatcgttctcccgctgagctgttttcaagggcaagtgcttgttgaagtcttgccagaacaaactgatcacaagaagacagcatatatcagaacgtcctgtaatcatttagttagaaactaactactaactagtctttggaattcgtgacctatggagacagtaattatcaatttattgattctattgatttctcaaattaggaattaacttatgtggattttgcttcctcttgtattctgattgcccttcatcccaagtgtttactgaaaattccattctagatattcttgttttgacaaatgacactacagtctcgtaatattgtcttttatgtatatacaaaatttacctttttactagcatctgagatagagttactttctggtacccagtatattggagtctgtcagaaactctataataggccaccagtttttattatttaacatttttatttgaatttctaagaagcctattctctatctattttgaaagattttggcactatatttaattggaaggtaaaatattgtacatgtgatccagagtaaatgagaagtctctatctgagctggtcagttactggagtacatgttactaatctgggtttaaagtttacttcattatctgctagtgtcatccacagcagttcatcctcatccacactaagccatcctgttagcttttaaaggaagttaatttaattaacattaatatactctatgggctccctctcccacctgtctgcatagaaaggcagaattagacatagcatgctttggaaaagcaaataggaattgttgggaatgatttaatcttgttgttgttgttgttgttgttcacttgtggttctacattcctggtgaatgatgaatgttgctgtcaaagggctgccccctaccttataagggttgctgggcatttgaaggcaggaagatttttaaagatagattgaggttggtttaaaattattcctgtaaaccaacaataaagcaaagaagaggttcatttttgtaaataacactggtttcaaatagtgatgttagacttaacctaatttataaacaagagattaatatctccatgcatagttttagacaaaaaaagatgtttcaataaacagttaaagggaacataatttgtttaggctcccacataaatgtgaatctggccaacaactttggttcatcctttagtgaattagaggatttggctaccctgagtatatttatattcatttcttctgttctccttctgttattatacttaatcttctaaactaaactaatgtgaacagtagggaagcaagggcccaaatgcataagtttctttgcactgttgcacttacttaatacaaataaatgttttttaaagcttttgtagtatgtttttatgagttaacatcctaatgtggtaggtattaggtaatgtgctgtcatgagaaaaattgagacttccaagaaaactggacaccaggtgagggttggtttggagacggaataggtgtagctgcctttccttgaaaaacagtgtgtagagatggctgagtgcaatggctcacacttgtaatcccaacactttggaaggctgaggcgggaggatcagtatatcggtacgtctgagcccaagagttcaagatcagcctgggcagtatagcaagaccccatctccattttttttttaatgattttttaattaaaaaaaagaacaacaggatagagctgttggggtggcacagtggcccaaagagcagcttcagagataattccttggttctatgatccctgtttaactccaaattacagtcggacttggatacatcatttgtaacattgtaggaaagaaaaaagtcttggttgtgaaaaacgatttgcatttgggtaaaataaagtgaccatgcttttgttctgtaatactgtgtgacctgtggttgttgtaatggtgatcatggagagcaaatatgaacttggcctggattttaaatggcctagaatttgtggtagttgccaaagaggttctcctaggtggtcttaataaacctattcacagaaaaaacaagcttactgcaaaatacagctataaccctgaagcgcaacaatcaaaaaggagg

SEQ ID NO: 303235 - DNA, 2520 bp, Homo sapiens
ccgcccttgctcttcccagtttctccgtcagcctgcgggtcccggctggcggctgcttccggtaggagagcggtgtagagcgagcaggtctcagctcctcgtcatgtcatacggtcccttagacatgtaccggaacccggggccctcggggccccagctccgggacttcagcagcatcatccagacgtgcagcggcaacatccagcggatcagccaagccactgctcagataaagaatttgatgagccagctaggaactaagcaggactcaagcaagctacaggaaaatctgcaacagttacaacactccacaaatcagctcgccaaggaaacaaatgaattgctgaaagaattagggtccttgccccttcccttatctacttcagaacagcgccagcagagacttcagaaggaacgcctcatgaatgacttctctgcagccttaaacaatttccaggctgtgcagagaagggtatctgaaaaggaaaaggagagtattgccagagcaagagctggatctcgtctttctgcagaagagaggcaaagagaggagcagctggtctcatttgacagccatgaggagtggaaccagatgcagagccaggaggatgagtgtttactgaaaattccattctagatattcttgttttgacaaatgacactacagtctcgtaatattgtcttttatgtatatacaaaatttacctttttactagcatctgagatagagttactttctggtacccagtatattggagtctgtcagaaactctataataggccaccagtttttattatttaacatttttatttgaatttctaagaagcctattctctatctattttgaaagattttggcactatatttaattggaaggtaaaatattgtacatgtgatccagagtaaatgagaagtctctatctgagctggtcagttactggagtacatgttactaatctgggtttaaagtttacttcattatctgctagtgtcatccacagcagttcatcctcatccacactaagccatcctgttagcttttaaaggaagttaatttaattaacattaatatactctatgggctccctctcccacctgtctgcatagaaaggcagaattagacatagcatgctttggaaaagcaaataggaattgttgggaatgatttaatcttgttgttgttgttgttgttgttcacttgtggttctacattcctggtgaatgatgaatgttgctgtcaaagggctgccccctaccttataagggttgctgggcatttgaaggcaggaagatttttaaagatagattgaggttggtttaaaattattcctgtaaaccaacaataaagcaaagaagaggttcatttttgtaaataacactggtttcaaatagtgatgttagacttaacctaatttataaacaagagattaatatctccatgcatagttttagacaaaaaaagatgtttcaataaaattactgtcttgtaatataaatgttgtccacttcccttttccacaggcctagaacagttaaagggaacataatttgtttaggctcccacataaatgtgaatctggccaacaactttggttcatcctttagtgaattagaggatttggctaccctgagtatatttatattcatttcttctgttctccttctgttattatacttaatcttctaaactaaactaatgtgaacagtagggaagcaagggcccaaatgcataagtttctttgcactgttgcacttacttaatacaaataaatgttttttaaagcttttgtagtatgtttttatgagttaacatcctaatgtggtaggtattaggtaatgtgctgtcatgagaaaaattgagacttccaagaaaactggacaccaggtgagggttggtttggagacggaataggtgtagctgcctttccttgaaaaacagtgtgtagagatggctgagtgcaatggctcacacttgtaatcccaacactttggaaggctgaggcgggaggatcagtatatcggtacgtctgagcccaagagttcaagatcagcctgggcagtatagcaagaccccatctccattttttttttaatgattttttaattaaaaaaaagaacaacaggatagagctgttggggtggcacagtggcccaaagagcagcttcagagataattccttggttctatgatccctgtttaactccaaattacagtcggacttggatacatcatttgtaacattgtaggaaagaaaaaagtcttggttgtgaaaaacgatttgcatttgggtaaaataaagtgaccatgcttttgttctgtaatactgtgtgacctgtggttgttgtaatggtgatcatggagagcaaatatgaacttggcctggattttaaatggcctagaatttgtggtagttgccaaagaggttctcctaggtggtcttaataaacctattcacagaaaaaacaagcttactgcaaaatacagctataaccctgaagcgcaacaatcaaaaaggagg

SEQ ID NO: 303236 - DNA, 2958 bp, Homo sapiens
ccgcccttgctcttcccagtttctccgtcagcctgcgggtcccggctggcggctgcttccggtaggagagcggtgtagagcgagcaggtctcagctcctcgtcatgtcatacggtcccttagacatgtaccggaacccggggccctcggggccccagctccgggacttcagcagcatcatccagacgtgcagcggcaacatccagcggatcagccaagccactgctcagataaagaatttgatgagccagctaggaactaagcaggactcaagcaagctacaggaaaatctgcaacagttacaacactccacaaatcagctcgccaaggaaacaaatgaattgctgaaagaattagggtccttgccccttcccttatctacttcagaacagcgccagcagagacttcagaaggaacgcctcatgaatgacttctctgcagccttaaacaatttccaggctgtgcagagaagggtatctgaaaaggaaaaggagagtattgccagagcaagagctggatctcgtctttctgcagaagagaggcaaagagaggagcagctggtctcatttgacagccatgaggagtggaaccagatgcagagccaggaggatgaggtggccatcactgagcaggatttggaacttattaaagaaagagaaacggcaattcggcagctggaggctgacattttggatgtcaatcagatatttaaagatttggccatgatgatccatgaccagggtgatctgattgatagcatagaagccaatgtggaaagctcagaggtgcacgtcgaaagagccactgaacagttacagcgagctgcttactatcagaaaaaatctcgcaagaagatgtgtatcctggtgcttgtcctgtcagtgattattctaatcttgggacttattatctggctagtttataaaacgaagtgattgcctccgatcgttctcccgctgagctgttttcaagggcaagtgcttgttgaagtcttgccagaacaaactgatcacaagaagacagcatatatcagaacgtcctgtaatcatttagttagaaactaactactaactagtctttggaattcgtgacctatggagacagtaattatcaatttattgattctattgatttctcaaattaggaattaacttatgtggattttgcttcctcttgtattctgattgcccttcatcccaagtgtttactgaaaattccattctagatattcttgttttgacaaatgacactacagtctcgtaatattgtcttttatgtatatacaaaatttacctttttactagcatctgagatagagttactttctggtacccagtatattggagtctgtcagaaactctataataggccaccagtttttattatttaacatttttatttgaatttctaagaagcctattctctatctattttgaaagattttggcactatatttaattggaaggtaaaatattgtacatgtgatccagagtaaatgagaagtctctatctgagctggtcagttactggagtacatgttactaatctgggtttaaagtttacttcattatctgctagtgtcatccacagcagttcatcctcatccacactaagccatcctgttagcttttaaaggaagttaatttaattaacattaatatactctatgggctccctctcccacctgtctgcatagaaaggcagaattagacatagcatgctttggaaaagcaaataggaattgttgggaatgatttaatcttgttgttgttgttgttgttgttcacttgtggttctacattcctggtgaatgatgaatgttgctgtcaaagggctgccccctaccttataagggttgctgggcatttgaaggcaggaagatttttaaagatagattgaggttggtttaaaattattcctgtaaaccaacaataaagcaaagaagaggttcatttttgtaaataacactggtttcaaatagtgatgttagacttaacctaatttataaacaagagattaatatctccatgcatagttttagacaaaaaaagatgtttcaataaaattactgtcttgtaatataaatgttgtccacttcccttttccacaggcctagaacagttaaagggaacataatttgtttaggctcccacataaatgtgaatctggccaacaactttggttcatcctttagtgaattagaggatttggctaccctgagtatatttatattcatttcttctgttctccttctgttattatacttaatcttctaaactaaactaatgtgaacagtagggaagcaagggcccaaatgcataagtttctttgcactgttgcacttacttaatacaaataaatgttttttaaagcttttgtagtatgtttttatgagttaacatcctaatgtggtaggtattaggtaatgtgctgtcatgagaaaaattgagacttccaagaaaactggacaccaggtgagggttggtttggagacggaataggtgtagctgcctttccttgaaaaacagtgtgtagagatggctgagtgcaatggctcacacttgtaatcccaacactttggaaggctgaggcgggaggatcagtatatcggtacgtctgagcccaagagttcaagatcagcctgggcagtatagcaagaccccatctccattttttttttaatgattttttaattaaaaaaaagaacaacaggatagagctgttggggtggcacagtggcccaaagagcagcttcagagataattccttggttctatgatccctgtttaactccaaattacagtcggacttggatacatcatttgtaacattgtaggaaagaaaaaagtcttggttgtgaaaaacgatttgcatttgggtaaaataaagtgaccatgcttttgttcaaaaatcccataaacacacgacataacaaataagggcccccataaaaatcccc

SEQ ID NO: 303237 - DNA, 3051 bp, Homo sapiens
  misc_feature (2910)..(2910): n is a, c, g, or t
  misc_feature (2916)..(2916): n is a, c, g, or t
  misc_feature (2932)..(2932): n is a, c, g, or t
  misc_feature (2960)..(2961): n is a, c, g, or t
  misc_feature (2964)..(2964): n is a, c, g, or t
ccgcccttgctcttcccagtttctccgtcagcctgcgggtcccggctggcggctgcttccggtaggagagcggtgtagagcgagcaggtctcagctcctcgtcatgtcatacggtcccttagacatgtaccggaacccggggccctcggggccccagctccgggacttcagcagcatcatccagacgtgcagcggcaacatccagcggatcagccaagccactgctcagataaagaatttgatgagccagctaggaactaagcaggactcaagcaagctacaggaaaatctgcaacagttacaacactccacaaatcagctcgccaaggaaacaaatgaattgctgaaagaattagggtccttgccccttcccttatctacttcagaacagcgccagcagagacttcagaaggaacgcctcatgaatgacttctctgcagccttaaacaatttccaggctgtgcagagaagggtatctgaaaaggaaaaggagagtattgccagagcaagagctggatctcgtctttctgcagaagagaggcaaagagaggagcagctggtctcatttgacagccatgaggagtggaaccagatgcagagccaggaggatgaggtggccatcactgagcaggatttggaacttattaaagaaagagaaacggcaattcggcagctggaggctgacattttggatgtcaatcagatatttaaagatttggccatgatgatccatgaccagggtgatctgattgatagcatagaagccaatgtggaaagctcagaggtgcacgtcgaaagagccactgaacagttacagcgagctgcttactatcagaaaaaatctcgcaagaagatgtgtatcctggtgcttgtcctgtcagtgattattctaatcttgggacttattatctggctagtttataaaacgaagtgattgcctccgatcgttctcccgctgagctgttttcaagggcaagtgcttgttgaagtcttgccagaacaaactgatcacaagaagacagcatatatcagaacgtcctgtaatcatttagttagaaactaactactaactagtctttggaattcgtgacctatggagacagtaattatcaatttattgattctattgatttctcaaattaggaattaacttatgtggattttgcttcctcttgtattctgattgcccttcatcccaagtgtttactgaaaattccattctagatattcttgttttgacaaatgacactacagtctcgtaatattgtcttttatgtatatacaaaatttacctttttactagcatctgagatagagttactttctggtacccagtatattggagtctgtcagaaactctataataggccaccagtttttattatttaacatttttatttgaatttctaagaagcctattctctatctattttgaaagattttggcactatatttaattggaaggtaaaatattgtacatgtgatccagagtaaatgagaagtctctatctgagctggtcagttactggagtacatgttactaatctgggtttaaagtttacttcattatctgctagtgtcatccacagcagttcatcctcatccacactaagccatcctgttagcttttaaaggaagttaatttaattaacattaatatactctatgggctccctctcccacctgtctgcatagaaaggcagaattagacatagcatgctttggaaaagcaaataggaattgttgggaatgatttaatcttgttgttgttgttgttgttgttcacttgtggttctacattcctggtgaatgatgaatgttgctgtcaaagggctgccccctaccttataagggttgctgggcatttgaaggcaggaagatttttaaagatagattgaggttggtttaaaattattcctgtaaaccaacaataaagcaaagaagaggttcatttttgtaaataacactggtttcaaatagtgatgttagacttaacctaatttataaacaagagattaatatctccatgcatagttttagacaaaaaaagatgtttcaataaaattactgtcttgtaatataaatgttgtccacttcccttttccacaggcctagaacagttaaagggaacataatttgtttaggctcccacataaatgtgaatctggccaacaactttggttcatcctttagtgaattagaggatttggctaccctgagtatatttatattcatttcttctgttctccttctgttattatacttaatcttctaaactaaactaatgtgaacagtagggaagcaagggcccaaatgcataagtttctttgcactgttgcacttacttaatacaaataaatgttttttaaagcttttgtagtatgtttttatgagttaacatcctaatgtggtaggtattaggtaatgtgctgtcatgagaaaaattgagacttccaagaaaactggacaccaggtgagggttggtttggagacggaataggtgtagctgcctttccttgaaaaacagtgtgtagagatggctgagtgcaatggctcacacttgtaatcccaacactttggaaggctgaggcgggaggatcagtatatcggtacgtctgagcccaagagttcaagatcagcctgggcagtatagcaagaccccatctccattttttttttaatgattttttaattaaaaaaaagaacaacaggatagagctgttggggtggcacagtggcccaaagagcagcttcagagataattccttggttctatgatccctgtttaactccaaattacagtcggacttggatacatcatttgtaacattgtaggaaagaaaaaagtcttggttgtgaaaaacgatttgcatttgggtaaaataaagtgaccatgcttttgttcctcgntcctgnaaacagccgccggcgngcgcgcgcggcggtcgcgtggaagggtnnttntggagaggaaatatgaacttggtctctggattttaaatggctctagaatttttttttttttttttttttcttttatttttttttttt

SEQ ID NO: 303238 - DNA, 3052 bp, Homo sapiens
ccgcccttgctcttcccagtttctccgtcagcctgcgggtcccggctggcggctgcttccggtaggagagcggtgtagagcgagcaggtctcagctcctcgtcatgtcatacggtcccttagacatgtaccggaacccggggccctcggggccccagctccgggacttcagcagcatcatccagacgtgcagcggcaacatccagcggatcagccaagccactgctcagataaagaatttgatgagccagctaggaactaagcaggactcaagcaagctacaggaaaatctgcaacagttacaacactccacaaatcagctcgccaaggaaacaaatgaattgctgaaagaattagggtccttgccccttcccttatctacttcagaacagcgccagcagagacttcagaaggaacgcctcatgaatgacttctctgcagccttaaacaatttccaggctgtgcagagaagggtatctgaaaaggaaaaggagagtattgccagagcaagagctggatctcgtctttctgcagaagagaggcaaagagaggagcagctggtctcatttgacagccatgaggagtggaaccagatgcagagccaggaggatgaggtggccatcactgagcaggatttggaacttattaaagaaagagaaacggcaattcggcagctggaggctgacattttggatgtcaatcagatatttaaagatttggccatgatgatccatgaccagggtgatctgattgatagcatagaagccaatgtggaaagctcagaggtgcacgtcgaaagagccactgaacagttacagcgagctgcttactatcagaaaaaatctcgcaagaagatgtgtatcctggtgcttgtcctgtcagtgattattctaatcttgggacttattatctggctagtttataaaacgaagtgattgcctccgatcgttctcccgctgagctgttttcaagggcaagtgcttgttgaagtcttgccagaacaaactgatcacaagaagacagcatatatcagaacgtcctgtaatcatttagttagaaactaactactaactagtctttggaattcgtgacctatggagacagtaattatcaatttattgattctattgatttctcaaattaggaattaacttatgtggattttgcttcctcttgtattctgattgcccttcatcccaagtgtttactgaaaattccattctagatattcttgttttgacaaatgacactacagtctcgtaatattgtcttttatgtatatacaaaatttacctttttactagcatctgagatagagttactttctggtacccagtatattggagtctgtcagaaactctataataggccaccagtttttattatttaacatttttatttgaatttctaagaagcctattctctatctattttgaaagattttggcactatatttaattggaaggtaaaatattgtacatgtgatccagagtaaatgagaagtctctatctgagctggtcagttactggagtacatgttactaatctgggtttaaagtttacttcattatctgctagtgtcatccacagcagttcatcctcatccacactaagccatcctgttagcttttaaaggaagttaatttaattaacattaatatactctatgggctccctctcccacctgtctgcatagaaaggcagaattagacatagcatgctttggaaaagcaaataggaattgttgggaatgatttaatcttgttgttgttgttgttgttgttcacttgtggttctacattcctggtgaatgatgaatgttgctgtcaaagggctgccccctaccttataagggttgctgggcatttgaaggcaggaagatttttaaagatagattgaggttggtttaaaattattcctgtaaaccaacaataaagcaaagaagaggttcatttttgtaaataacactggtttcaaatagtgatgttagacttaacctaatttataaacaagagattaatatctccatgcatagttttagacaaaaaaagatgtttcaataaaattactgtcttgtaatataaatgttgtccacttcccttttccacaggcctagaacagttaaagggaacataatttgtttaggctcccacataaatgtgaatctggccaacaactttggttcatcctttagtgaattagaggatttggctaccctgagtatatttatattcatttcttctgttctccttctgttattatacttaatcttctaaactaaactaatgtgaacagtagggaagcaagggcccaaatgcataagtttctttgcactgttgcacttacttaatacaaataaatgttttttaaagcttttgtagtatgtttttatgagttaacatcctaatgtggtaggtattaggtaatgtgctgtcatgagaaaaattgagacttccaagaaaactggacaccaggtgagggttggtttggagacggaataggtgtagctgcctttccttgatttggaaggctgaggcgggaggatcagtatatcggtacgtctgagcccaagagttcaagatcagcctgggcagtatagcaagaccccatctccattttttttttaatgattttttaattaaaaaaaagaacaacaggatagagctgttggggtggcacagtggcccaaagagcagcttcagagataattccttggttctatgatccctgtttaactccaaattacagtcggacttggatacatcatttgtaacattgtaggaaagaaaaaagtcttggttgtgaaaaacgatttgcatttgggtaaaataaagtgaccatgcttttgttctgtaatactgtgtgacctgtggttgttgtaatggtgatcatggagagcaaatatgaacttggcctggattttaaatggcctagaatttgtggtagttgccaaagaggttctcctaggtggtcttaataaacctattcacagaaaaaacaagcttactgcaaaatacagctataaccctgaagcgcaacaatcaaaaaggagg

SEQ ID NO: 303239 - DNA, 2329 bp, Homo sapiens
agagtatctggagcattgctgctggtgagctgagtgatcctaatcgttagggtagcatacattgagtctagtgacgtatgtttactaaaaagcagaatctggttgcactgcacgtatctgttcgcgacggctgagccagtaaaaaaggggccacggtgggctgatcgaagcgtttcgtgaagcaaacatacaagtgagttcagatatgagagagatgaaattattgtgcagtaatagttaaactggtaagttatttataggtaaagaacaactaatcataataaacgtagtgctagtctttggaattcgtgacctatggagacagtaattatcaatttattgattctattgatttctcaaattaggaattaacttatgtggattttgcttcctcttgtattctgattgcccttcatcccaagtgtttactgaaaattccattctagatattcttgttttgacaaatgacactacagtctcgtaatattgtcttttatgtatatacaaaatttacctttttactagcatctgagatagagttactttctggtacccagtatattggagtctgtcagaaactctataataggccaccagtttttattatttaacatttttatttgaatttctaagaagcctattctctatctattttgaaagattttggcactatatttaattggaaggtaaaatattgtacatgtgatccagagtaaatgagaagtctctatctgagctggtcagttactggagtacatgttactaatctgggtttaaagtttacttcattatctgctagtgtcatccacagcagttcatcctcatccacactaagccatcctgttagcttttaaaggaagttaatttaattaacattaatatactctatgggctccctctcccacctgtctgcatagaaaggcagaattagacatagcatgctttggaaaagcaaataggaattgttgggaatgatttaatcttgttgttgttgttgttgttgttcacttgtggttctacattcctggtgaatgatgaatgttgctgtcaaagggctgccccctaccttataagggttgctgggcatttgaaggcaggaagatttttaaagatagattgaggttggtttaaaattattcctgtaaaccaacaataaagcaaagaagaggttcatttttgtaaataacactggtttcaaatagtgatgttagacttaacctaatttataaacaagagattaatatctccatgcatagttttagacaaaaaaagatgtttcaataaaattactgtcttgtaatataaatgttgtccacttcccttttccacaggcctagaacagttaaagggaacataatttgtttaggctcccacataaatgtgaatctggccaacaactttggttcatcctttagtgaattagaggatttggctaccctgagtatatttatattcatttcttctgttctccttctgttattatacttaatcttctaaactaaactaatgtgaacagtagggaagcaagggcccaaatgcataagtttctttgcactgttgcacttacttaatacaaataaatgttttttaaagcttttgtagtatgtttttatgagttaacatcctaatgtggtaggtattaggtaatgtgctgtcatgagaaaaattgagacttccaagaaaactggacaccaggtgagggttggtttggagacggaataggtgtagctgcctttccttgaaaaacagtgtgtagagatggctgagtgcaatggctcacacttgtaatcccaacactttggaaggctgaggcgggaggatcagtatatcggtacgtctgagcccaagagttcaagatcagcctgggcagtatagcaagaccccatctccattttttttttaatgattttttaattaaaaaaaagaacaacaggatagagctgttggggtggcacagtggcccaaagagcagcttcagagataattccttggttctatgatccctgtttaactccaaattacagtcggacttggatacatcatttgtaacattgtaggaaagaaaaaagtcttggttgtgaaaaacgatttgcatttgggtaaaataaagtgaccatgcttttgttctgtaatactgtgtgacctgtggttgttgtaatggtgatcatggagagcaaatatgaacttggcctggattttaaatggcctagaatttgtggtagttgccaaagaggttctcctaggtggtcttaataaacctattcacagaaaaaacaagcttactgcaaaatacagctataaccctgaagcgcaacaatcaaaaaggagg

SEQ ID NO: 303240 - DNA, 2321 bp, Homo sapiens
ccgcccttgctcttcccagtttctccgtcagcctgcgggtcccggctggcggctgcttccggtaggagagcggtgtagagcgagcaggtctcagctcctcgtcatgtcatacggtcccttagacatgtaccggaacccggggccctcggggccccagctccgggacttcagcagcatcatccagacgtgcagcggcaacatccagcggatcagccaagccactgctcagataaagaatttgatgagccagctaggaactaagcaggactcaagcaagctacaggaaaatctgcaacagttacaacactccacaaatcagctcgccaaggaaacaaatgaattgctgaaagaattagggtccttgccccttcccttatctacttcagaacagcgccagcagagacttcagaaggaacgcctcatgaatgacttctctgcagccttaaacaatttccaggctgtgcagagaagggtatctgaaaaggaaaaggagagtattgccagagcaagagctggatctcgtctttctgcagaagagaggcaaagagaggagcagctggtctcatttgacagccatgaggagtggaaccagatgcagagccaggaggatgaggtggccatcactgagcaggatttggaacttattaaagaaagagaaacggcaattcggcagctggaggctgacattttggatgtcaatcagatatttaaagatttggccatgatgatccatgaccagggtgatctgattgatagcatagaagccaatgtggaaagctcagaggtgcacgtcgaaagagccactgaacagttacagcgagctgcttactatcagaaaaaatctcgcaagaagatgtgtatcctggtgcttgtcctgtcagtgattattctaatcttgggacttattatctggctagtttataaaacgaagtgattgcctccgatcgttctcccgctgagctgttttcaagggcaagtgcttgttgaagtcttgccagaacaaactgatcacaagaagacagcatatatcagaacgtcctgtaatcatttagttagaaactaactactaactagtctttggaattcgtgacctatggagacagtaattatcaatttattgattctattgatttctcaaattaggaattaacttatgtggattttgcttcctcttgtattctgattgcccttcatcccaagtgtttactgaaaattccattctagatattcttgttttgacaaatgacactacagtctcgtaatattgtcttttatgtatatacaaaatttacctttttactagcatctgagatagagttactttctggtacccagtatattggagtctgtcagaaactctataataggccaccagtttttattatttaacatttttatttgaatttctaagaagcctattctctatctattttgaaagattttggcactatatttaattggaaggtaaaatattgtacatgtgatccagagtaaatgagaagtctctatctgagctggtcagttactggagtacatgttactaatctgggtttaaagtttacttcattatctgctagtgtcatccacagcagttcatcctcatccacactaagccatcctgttagcttttaaaggaagttaatttaattaacattaatatactctatgggctccctctcccacctgtctgcatagaaaggcagaattagacatagcatgctttggaaaagcaaataggaattgttgggaatgatttaatcttgttgttgttgttgttgttgttcacttgtggttctacattcctggtgaatgatgaatgttgctgtcaaagggctgccccctaccttataagggttgctgggcatttgaaggcaggaagatttttaaagatagattgaggttggtttaaaattattcctgtaaaccaacaataaagcaaagaagaggttcatttttgtaaataacactggtttcaaatagtgatgttagacttaacctaatttataaacaagagattaatatctccatgcatagttttagacaaaaaaagatgtttcaataaacagttaaagggaacataatttgtttaggctcccacataaatgtgaatctggccaacaactttggttcatcctttagtgaattagaggatttggctaccctgagtatatttatattcatttcttctgttctccttctgttattatacttaatcttctaaactaaactaatgtgaacagtagggaagcaagggcccaaatgcataagtttctttgcactgttgcacttacttaatacaaataaatgttttttaaagcttt

SEQ ID NO: 303241 - DNA, 1330 bp, Homo sapiens
ccgcccttgctcttcccagtttctccgtcagcctgcgggtcccggctggcggctgcttccggtaggagagcggtgtagagcgagcaggtctcagctcctcgtcatgtcatacggtcccttagacatgtaccggaacccggggccctcggggccccagctccgggacttcagcagcatcatccagacgtgcagcggcaacatccagcggatcagccaagccactgctcagataaagaatttgatgagccagctaggaactaagcaggactcaagcaagctacaggaaaatctgcaacagttacaacactccacaaatcagctcgccaaggaaacaaatgaattgctgaaagaattagggtccttgccccttcccttatctacttcagaacagcgccagcagagacttcagaaggaacgcctcatgaatgacttctctgcagccttaaacaatttccaggctgtgcagagaagggtatctgaaaaggaaaaggagagtattgccagagcaagagctggatctcgtctttctgcagaagagaggcaaagagaggagcagctggtctcatttgacagccatgaggagtggaaccagatgcagagccaggaggatgaggtggccatcactgagcaggatttggaacttattaaagaaagagaaacggcaattcggcagctggaggctgacattttggatgtcaatcagatatttaaagatttggccatgatgatccatgaccagggtgatctgattgatagcatagaagccaatgtggaaagctcagaggtgcacgtcgaaagagccactgaacagttacagcgagctgcttactatcagaaaaaatctcgcaagaagatgtgtatcctggtgcttgtcctgtcagtgattattctaatcttgggacttattatctggctagtttataaaacgaagtgattgcctccgatcgttctcccgctgagctgttttcaagggcaagtgcttgttgaagtcttgccagaacaaactgatcacaagaagacagcatatatcagaacgtcctgtaatcatttagttagaaactaactactaactagtctttggaattcgtgacctatggagacagtaattatcaatttattgattctattgatttctcaaattaggaattaacttatgtggattttgcttcctcttgtatttttatattcatttcttctgttctccttctgttattatacttaatcttctaaactaaactaatgtgaacagtagggaagcaagggcccaaatgcataagtttctttgcactgttgcacttacttaatacaaataaatgttttttaaagcttt

SEQ ID NO: 303242 - DNA, 792 bp, Homo sapiens
  misc_feature (688)..(688): n is a, c, g, or t
ccgcccttgctcttcccagtttctccgtcagcctgcgggtcccggctggcggctgcttccggtaggagagcggtgtagagcgagcaggtctcagctcctcgtcatgtcatacggtcccttagacatgtaccggaacccggggccctcggggccccagctccgggacttcagcagcatcatccagacgtgcagcggcaacatccagcggatcagccaagccactgctcagataaagaatttgatgagccagctaggaactaagcaggactcaagcaagctacaggaaaatctgcaacagttacaacactccacaaatcagctcgccaaggaaacaaatgaattgctgaaagaattagggtccttgccccttcccttatctacttcagaacagcgccagcagagacttcagaaggaacgcctcatgaatgacttctctgcagccttaaacaatttccaggctgtgcagagaagggtatctgaaaaggaaaaggagagtattgccagagcaagagctggatctcgtctttctgcagaagagaggcaaagagaggagcagctggtctcatttgacagccatgaggagtggaaccagatgcagagccaggaggatgaggtggccatcactgagcaggatttggaacttattaaagaaagagaaacggcaattcggcagctggaggctgcattntgatgcaatcaatttaagatttgcctgatgtcatgccagggtgtctgatgtagctgagccatgggaagctgtgcacgtgagagcatgacagtcggagtgtactt

SEQ ID NO: 303243 - DNA, 972 bp, Homo sapiens
ccgcccttgctcttcccagtttctccgtcagcctgcgggtcccggctggcggctgcttccggtaggagagcggtgtagagcgagcaggtctcagctcctcgtcatgtcatacggtcccttagacatgtaccggaacccggggccctcggggccccagctccgggacttcagcagcatcatccagacgtgcagcggcaacatccagcggatcagccaagccactgctcagataaagaatttgatgagccagctaggaactaagcaggactcaagcaagctacaggaaaatctgcaacagttacaacactccacaaatcagctcgccaaggaaacaaatgaattgctgaaagaattagggtccttgccccttcccttatctacttcagaacagcgccagcagagacttcagaaggaacgcctcatgaatgacttctctgcagccttaaacaatttccaggctgtgcagagaagggtatctgaaaaggaaaaggagagtattgccagagcaagagctggatctcgtctttctgcagaagagaggcaaagagaggagcagctggtctcatttgacagctctttgcttctggatatgaagaatgtggccctccaagactttattgatagcagaggactggagccctgccatgaggagtggaaccagatgcagagccaggaggatgaggtggccatcactgagcaggatttggaacttattaaagaaagagaaacggcaattcggcagctggaggctgacattttggatgtcaatcagatatttaaagatttggccatgatgatccatgaccagggtgatctgattggtatgtattattgatacctttaacctcaaggtgagttgatagtatttggcatgcatctgtaatcccagctactcagaaggctgaggctgaagcaccatctaggagtttgaagccaacctgggcaacataatgagaatttgtctcttaaaaa

SEQ ID NO: 303244 - DNA, 813 bp, Homo sapiens
  misc_feature (762)..(762): n is a, c, g, or t
ccgcccttgctcttcccagtttctccgtcagcctgcgggtcccggctggcggctgcttccggtaggagagcggtgtagagcgagcaggtctcagctcctcgtcatgtcatacggtcccttagacatgtaccggaacccggggccctcggggccccagctccgggacttcagcagcatcatccagacgtgcagcggcaacatccagcggatcagccaagccactgctcagataaagaatttgatgagccagctaggaactaagcaggactcaagcaagctacaggaaaatctgcaacagttacaacactccacaaatcagctcgccaaggaaacaaatgaattgctgaaagaattagggtccttgccccttcccttatctacttcagaacagcgccagcagagacttcagaaggaacgcctcatgaatgacttctctgcagccttaaacaatttccaggctgtgcagagaagggtatctgaaaaggaaaaggagagtattgccagagcaagagctggatctcgtctttctgtaagttgattcccaaaagaagacctttgcaatatcagaatgttcttttccaagtttgtgggtttttttctttttctctttgaccaataaacatgtaagttagctgctgtgaaaatggcaggttggtgtaacctatgtaaaaaacatatatgcatgtgatcaaagcctagaaaggaatctgaatgaaggttaagagatataggaggaagaactatgtctaattttcttttttnccaaatttttttttttttttgggggaaaaaattttaaaaaaattttaaaaa

SEQ ID NO: 303245 - DNA, 380 bp, Homo sapiens
gctcttactggttctcatgtagcatgtcccattaatgttgcttgaagagtgagtttatgtgccttctgttttacaatattgggtaggcagcaatagattattttctgtttatggagaaagcatgctttgtagagccttaaaaacacacgtgttaatagctaaaactttaggtacgtgagggaaacaaatcttctaacatgttgcttaatgttagttaattgttttttgtcttccttaggctgacattttggatgtcaatcagatatttaaagatttggccatgatgatccatgaccagggtgatctgattggtatgtattattgatacctttaacctcaaggtgagttgatagtatttggcatgcatctgtaatcccagc

SEQ ID NO: 303246 - DNA, 424 bp, Homo sapiens
accaaggtagtaactcgatttcatggctggatagtttggatagtggtagtgaaaccaggacatgtaacatcagaaatctgttcaatttgcagtcttaaaacatctgagtgtgttaaaacatcctctgtccttccttttgcagatagcatagaagccaatgtggaaagctcagaggtgcacgtcgaaagagccactgaacagttacagcgagctgcttactatcaggtaaaagcgggtaccaaagaaagtcactctgtgttgcagactttttaggccatcagagtacattgacatattgagaacagctacagcctttgcttaggtttaagctaaaggaaagtagtcataattgcagtcccagttccatttttattattttcctttgcagatagatctacaaaaaataatcacaccttgaataaac

SEQ ID NO: 303247 - DNA, 406 bp, Homo sapiens
ttttagccctttctcctacgcatattattctccaccctgttcagtatggtttctgttcaggactcaaactggaatgcagattttcttcaaccactttacacccacttcttagttgagacagattgccagagtcctatgtaatcttacagattctgtgggtgtcaaaggatgttgcttctttatactgtgctaaggaagcccttgttttgtgtgtctgtgatgtgtttctggatgacagcagcaataataccatctactttctagggcagaagagaggcaaagagaggagcagctggtctcatttgacaggtaatagaattattcatacaacctgctggatagttgagatgggaatctatctcgttatattttaattttaaaaatcaatgaaaaaatagagggcaaa

SEQ ID NO: 303248 - DNA, 1538 bp, Homo sapiens
actctgccccacagccacagcccctgactgccgcagcccccacagagcccgccgcgcaccccacgtcccccacgccagcgcccagccatggaggccatcaagaagaaaatgcagatgctgaagttggacaaggagaatgccatcgaccgcgcggagcaggcggaggcggataagaaagccgctgaggacaagtgcaagcaggtggaggaggagctgacgcacctccagaagaaactaaaagggacagaggacgagctggataaatattccgaggacctgaaggacgcgcaggagaagctggagctcacggagaagaaggcctccgacgctgaaggtgatgtggccgccctcaaccgacgcatccagctcgttgaggaggagttggacagggctcaggaacgactggccacggccctgcagaagctggaggaggcagaaaaagctgcagatgagagtgagagaggaatgaaggtgatagaaaaccgggccatgaaggatgaggagaagatggagattcaggagatgcagctcaaagaggccaagcacattgcggaagaggctgaccgcaaatacgaggaggtagctcgtaagctggtcatcctggagggtgagctggagagggcagaggagcgtgcggaggtgtctgaactaaaatgtggtgacctggaagaagaactcaagaatgttactaacaatctgaaatctctggaggctgcatctgaaaagtattctgaaaaggaggacaaatatgaagaagaaattaaacttctgtctgacaaactgaaagaggctgagacccgtgctgaatttgcagagagaacggttgcaaaactggaaaagacaattgatgacctggaagagaaacttgcccaggccaaagaagagaacgtgggcttacatcagacactggatcagacactaaacgaacttaactgtatataagcaaaacagaagagtcttgttccaacagaaactctggagctccgtgggtctttctcttctcttgtaagaagttccttttgttattgccatcttcgctttgctggaaatgtcaagcaaattatgaatacatgaccaaatattttgtatcggagaagctttgagcaccagttaaatctcattccttccctttttttttcaaatggcaccagctttttcagctctcttattttttccttaagtagcatttattcctaaggtaggcagggtatttcctagtaagcatactttcttaagacggaggccatttggttcctgggagaataggcagccccacactttgaagaatacagaccccagtatctagtcgtggatataattaaaacgctgaagaccataaccttttgggtcaactgttggtcaaactataggagagaccagggactcctatttattcagcaccacactacccaggaaatacactagcaaattgtgcaatggaataaaatccacactttagattcttgcaactgtatcatatgtaatagtatcactttttctacattttggtcaaataaatttttacataaactacaaaa

SEQ ID NO: 303249 - DNA, 2521 bp, Homo sapiens
gctagtacgaggcctggtttgaattggccgaggggcgcggctgtgcagctctcgccggagccgagcccagccgagcgtccgccgctgcccgtgcgcctctgcgcctccgcgccatggccggcctcaactccctggaggcggtgaaacgcaagatccaggccctgcagcagcaggcggacgaggcggaagaccgcgcgcagggcctgcagcgggagctggacggcgagcgcgagcggcgcgagaaagctgaaggtgatgtggccgccctcaaccgacgcatccagctcgttgaggaggagttggacagggctcaggaacgactggccacggccctgcagaagctggaggaggcagaaaaagctgcagatgagagtgagagaggaatgaaggtgatagaaaaccgggccatgaaggatgaggagaagatggagattcaggagatgcagctcaaagaggccaagcacattgcggaagaggctgaccgcaaatacgaggaggtagctcgtaagctggtcatcctggagggtgagctggagagggcagaggagcgtgcggaggtgtctgaactaaaatgtggtgacctggaagaagaactcaagaatgttactaacaatctgaaatctctggaggctgcatctgaaaagtattctgaaaaggaggacaaatatgaagaagaaattaaacttctgtctgacaaactgaaagaggctgagacccgtgctgaatttgcagagagaacggttgcaaaactggaaaagacaattgatgacctggaagagaaacttgcccaggccaaagaagagaacgtgggcttacatcagacactggatcagacactaaacgaacttaactgtatataagcaaaacagaagagtcttgttccaacagaaactctggagctccgtgggtctttctcttctcttgtaagaagttccttttgttattgccatcttcgctttgctggaaatgtcaagcaaattatgaatacatgaccaaatattttgtatcggagaagctttgagcaccagttaaatctcattccttccctttttttttcaaatggcaccagctttttcagctctcttattttttccttaagtagcatttattcctaaggtaggcagggtatttcctagtaagcatactttcttaagacggaggccatttggttcctgggagaataggcagccccacactttgaagaatacagaccccagtatctagtcgtggatataattaaaacgctgaagaccataaccttttgggtcaactgttggtcaaactataggagagaccagggaccatcacatgggtagggattttccatccagagccaataaaaggactggtgggggccgggggtggctattgtgggaagtcataacccacagatagatcaacctaagaatcctggcccttctccactctccaccatgcaggacaaacatcttctcaagcagtcaacgtagaatgcttgggaaatagtcataattacccacatatagtaattaatagatggtaattaattgatccttgatgtgatgttcttttgcatatttccttcattctaaagttgttccctggccgggagcgttggctttcgcctgtaatcccaacactttgggaggccaggacagatcacttgaggtcaggagttcgagaccagcccagccaacatggcgaaaccatgtctctactaaaaatacaaaaattatggtgacgcctgcctgtagtcccagctactcgggaggctgaggcaggaggatcgcttgaacccaggaagtggagactgcagtgagccgatatcgcaccacagcgctccagcctggtcgacagagtgagactccatctcaagaaaaaataaaaataaagttgttctctgaagagcaaatgtctcattccagtaatgacccactcagcaggaatatggtggagttcagtccaattcaggtcagccatatccaaaagaccacaagtcattactaagttgagcaaaagagtttttatctattagcagaaagggcctctctggcagcagagattaaaaactggcccaacttcatttccatacttcagggaacagcaaattgaggatttacttatctaggacttgaattccttctttgggaccaagttaataaaagaccaagaaactcctgattaaactggataatgaaggattctgtagacagggctgcacgtatcggctttgtttgacttctcttttctcagttaacatctcagagctagaacattccacattccccagcagcgtgtgggggctgactaaagtttacaattccaactaaaaatcaccctgcttctggcttatctgaatcccttacccaccccaccccaccaccctactcctatttattcagcaccacactacccaggaaatacactagcaaattgtgcaatggaataaaatccacactttagattcttgcaactgtatcatatgtaatagtatcactttttctacattttggtcaaataaatttttacataaactacaaaa

SEQ ID NO: 303250 - DNA, 2498 bp, Homo sapiens
gctagtacgaggcctggtttgaattggccgaggggcgcggctgtgcagctctcgccggagccgagcccagccgagcgtccgccgctgcccgtgcgcctctgcgcctccgcgccatggccggcctcaactccctggaggcggtgaaacgcaagatccaggccctgcagcagcaggcggacgaggcggaagaccgcgcgcagggcctgcagcgggagctggacggcgagcgcgagcggcgcgagaaagctgaaggtgatgtggccgccctcaaccgacgcatccagctcgttgaggaggagttggacagggctcaggaacgactggccacggccctgcagaagctggaggaggcagaaaaagctgcagatgagagtgagagaggaatgaaggtgatagaaaaccgggccatgaaggatgaggagaagatggagattcaggagatgcagctcaaagaggccaagcacattgcggaagaggctgaccgcaaatacgaggaggtagctcgtaagctggtcatcctggagggtgagctggagagggcagaggagcgtgcggaggtgtctgaactaaaatgtggtgacctggaagaagaactcaagaatgttactaacaatctgaaatctctggaggctgcatctgaaaagtattctgaaaaggaggacaaatatgaagaagaaattaaacttctgtctgacaaactgaaagaggctgagacccgtgctgaatttgcagagagaacggttgcaaaactggaaaagacaattgatgacctggaagagaaacttgcccaggccaaagaagagaacgtgggcttacatcagacactggatcagacactaaacgaacttaactgtatataagcaaaacagaagagtcttgttccaacagaaactctggagctccgtgggtctttctcttctcttgtaagaagttccttttgttattgccatcttcgctttgctggaaatgtcaagcaaattatgaatacatgaccaaatattttgtatcggagaagctttgagcaccagttaaatctcattccttccctttttttttcaaatggcaccagctttttcagctctcttattttttccttaagtagcatttattcctaaggtaggcagggtatttcctagtaagcatactttcttaagacggaggccatttggttcctgggagaataggcagccccacactttgaagaatacagaccccagtatctagtcgtggatataattaaaacgctgaagaccataaccttttgggtcaactgttggtcaaactataggagagaccagggaccatcacatgggtagggattttccatccagagccaataaaaggactggtgggggccgggggtggctattgtgggaagtcataacccacagatagatcaacctaagaatcctggcccttctccactctccaccatgcaggacaaacatcttctcaagcagtcaacgtagaatgcttgggaaatagtcataattacccacatatagtaattaatagatggtaattaattgatccttgatgtgatgttcttttgcatatttccttcattctaaagttgttccctggccgggagcgttggctttcgcctgtaatcccaacactttgggaggccaggacagatcacttgaggtcaggagttcgagaccagcccagccaacatggcgaaaccatgtctctactaaaaatacaaaaattatggtgacgcctgcctgtagtcccagctactcgggaggctgaggcaggaggatcgcttgaacccaggaagtggagactgcagtgagccgatatcgcaccacagcgctccagcctggtcgacagagtgagactccatctcaagaaaaaataaaaataaagttgttctctgaagagcaaatgtctcattccagtaatgacccactcagcaggaatatggtggagttcagtccaattcaggtcagccatatccaaaagaccacaagtcattactaagttgagcaaaagagtttttatctattagcagaaagggcctctctggcagcagagattaaaaactggcccaacttcatttccatacttcagggaacagcaaattgaggatttacttatctaggacttgaattccttctttgggaccaagttaataaaagaccaagaaactcctgattaaactggataatgaaggattctgtagacagggctgcacgtatcggctttgtttgacttctcttttctcagttaacatctcagagctagaacattccacattccccagcagcgtgtgggggctgactaaagtttacaattccaactaaaaatcaccctgcttctggcttatctgaatcccttacccaccccaccccaccaccctactgaccaaaatgtagaaaaagtgatactattacatatgatacagttgcaagaatctaaagtgtggattttattccattgcacaatttgctagtgtatttcctgggtagtgtggtgctgaataaatgtcgacg

SEQ ID NO: 303251 - DNA, 2603 bp, Homo sapiens
actctgccccacagccacagcccctgactgccgcagcccccacagagcccgccgcgcaccccacgtcccccacgccagcgcccagccatggaggccatcaagaagaaaatgcagatgctgaagttggacaaggagaatgccatcgaccgcgcggagcaggcggaggcggataagaaagccgctgaggacaagtgcaagcaggtggaggaggagctgacgcacctccagaagaaactaaaagggacagaggacgagctggataaatattccgaggacctgaaggacgcgcaggagaagctggagctcacggagaagaaggcctccgacgctgaaggtgatgtggccgccctcaaccgacgcatccagctcgttgaggaggagttggacagggctcaggaacgactggccacggccctgcagaagctggaggaggcagaaaaagctgcagatgagagtgagagaggaatgaaggtgatagaaaaccgggccatgaaggatgaggagaagatggagattcaggagatgcagctcaaagaggccaagcacattgcggaagaggctgaccgcaaatacgaggaggtagctcgtaagctggtcatcctggagggtgagctggagagggcagaggagcgtgcggaggtgtctgaactaaaatgtggtgacctggaagaagaactcaagaatgttactaacaatctgaaatctctggaggctgcatctgaaaagtattctgaaaaggaggacaaatatgaagaagaaattaaacttctgtctgacaaactgaaagaggctgagacccgtgctgaatttgcagagagaacggttgcaaaactggaaaagacaattgatgacctggaagagaaacttgcccaggccaaagaagagaacgtgggcttacatcagacactggatcagacactaaacgaacttaactgtatataagcaaaacagaagagtcttgttccaacagaaactctggagctccgtgggtctttctcttctcttgtaagaagttccttttgttattgccatcttcgctttgctggaaatgtcaagcaaattatgaatacatgaccaaatattttgtatcggagaagctttgagcaccagttaaatctcattccttccctttttttttcaaatggcaccagctttttcagctctcttattttttccttaagtagcatttattcctaaggtaggcagggtatttcctagtaagcatactttcttaagacggaggccatttggttcctgggagaataggcagccccacactttgaagaatacagaccccagtatctagtcgtggatataattaaaacgctgaagaccataaccttttgggtcaactgttggtcaaactataggagagaccagggaccatcacatgggtagggattttccatccagagccaataaaaggactggtgggggccgggggtggctattgtgggaagtcataacccacagatagatcaacctaagaatcctggcccttctccactctccaccatgcaggacaaacatcttctcaagcagtcaacgtagaatgcttgggaaatagtcataattacccacatatagtaattaatagatggtaattaattgatccttgatgtgatgttcttttgcatatttccttcattctaaagttgttccctggccgggagcgttggctttcgcctgtaatcccaacactttgggaggccaggacagatcacttgaggtcaggagttcgagaccagcccagccaacatggcgaaaccatgtctctactaaaaatacaaaaattatggtgacgcctgcctgtagtcccagctactcgggaggctgaggcaggaggatcgcttgaacccaggaagtggagactgcagtgagccgatatcgcaccacagcgctccagcctggtcgacagagtgagactccatctcaagaaaaaataaaaataaagttgttctctgaagagcaaatgtctcattccagtaatgacccactcagcaggaatatggtggagttcagtccaattcaggtcagccatatccaaaagaccacaagtcattactaagttgagcaaaagagtttttatctattagcagaaagggcctctctggcagcagagattaaaaactggcccaacttcatttccatacttcagggaacagcaaattgaggatttacttatctaggacttgaattccttctttgggaccaagttaataaaagaccaagaaactcctgattaaactggataatgaaggattctgtagacagggctgcacgtatcggctttgtttgacttctcttttctcagttaacatctcagagctagaacattccacattccccagcagcgtgtgggggctgactaaagtttacaattccaactaaaaatcaccctgcttctggcttatctgaatcccttacccaccccaccccaccaccctactcctatttattcagcaccacactacccaggaaatacactagcaaattgtgcaatggaataaaatccacactttagattcttgcaactgtatcatatgtaatagtatcactttttctacattttggtcaaataaatttttacataaactacaaaa

SEQ ID NO: 303252 - DNA, 2468 bp, Homo sapiens
gctagtacgaggcctggtttgaattggccgaggggcgcggctgtgcagctctcgccggagccgagcccagccgagcgtccgccgctgcccgtgcgcctctgcgcctccgcgccatggccggcctcaactccctggaggcggtgaaacgcaagatccaggccctgcagcagcaggcggacgaggcggaagaccgcgcgcagggcctgcagcgggagctggacggcgagcgcgagcggcgcgagaaagctgaaggtgatgtggccgccctcaaccgacgcatccagctcgttgaggaggagttggacagggctcaggaacgactggccacggccctgcagaagctggaggaggcagaaaaagctgcagatgagagtgagagaggaatgaaggtgatagaaaaccgggccatgaaggatgaggagaagatggagattcaggagatgcagctcaaagaggccaagcacattgcggaagaggctgaccgcaaatacgaggaggtagctcgtaagctggtcatcctggagggtgagctggagagggcagaggagcgtgcggaggtgtctgaactaaaatgtggtgacctggaagaagaactcaagaatgttactaacaatctgaaatctctggaggctgcatctgaaaagtattctgaaaaggaggacaaatatgaagaagaaattaaacttctgtctgacaaactgaaagaggctgagacccgtgctgaatttgcagagagaacggttgcaaaactggaaaagacaattgatgacctggaagagaaacttgcccaggccaaagaagagaacgtgggcttacatcagacactggatcagacactaaacgaacttaactgtatataagcaaaacagaagagtcttgttccaacagaaactctggagctccgtgggtctttctcttctcttgtaagaagttccttttgttattgccatcttcgctttgctggaaatgtcaagcaaattatgaatacatgaccaaatattttgtatcggagaagctttgagcaccagttaaatctcattccttccctttttttttcaaatggcaccagctttttcagctctcttattttttccttaagtagcatttattcctaaggtaggcagggtatttcctagtaagcatactttcttaagacggaggccatttggttcctgggagaataggcagccccacactttgaagaatacagaccccagtatctagtcgtggatataattaaaacgctgaagaccataaccttttgggtcaactgttggtcaaactataggagagaccagggaccatcacatgggtagggattttccatccagagcacagatagatcaacctaagaatcctggcccttctccactctccaccatgcaggacaaacatcttctcaagcagtcaacgtagaatgcttgggaaatagtcataattacccacatatagtaattaatagatggtaattaattgatccttgatgtgatgttcttttgcatatttccttcattctaaagttgttccctggccgggagcgttggctttcgcctgtaatcccaacactttgggaggccaggacagatcacttgaggtcaggagttcgagaccagcccagccaacatggcgaaaccatgtctctactaaaaatacaaaaattatggtgacgcctgcctgtagtcccagctactcgggaggctgaggcaggaggatcgcttgaacccaggaagtggagactgcagtgagccgatatcgcaccacagcgctccagcctggtcgacagagtgagactccatctcaagaaaaaataaaaataaagttgttctctgaagagcaaatgtctcattccagtaatgacccactcagcaggaatatggtggagttcagtccaattcaggtcagccatatccaaaagaccacaagtcattactaagttgagcaaaagagtttttatctattagcagaaagggcctctctggcagcagagattaaaaactggcccaacttcatttccatacttcagggaacagcaaattgaggatttacttatctaggacttgaattccttctttgggaccaagttaataaaagaccaagaaactcctgattaaactggataatgaaggattctgtagacagggctgcacgtatcggctttgtttgacttctcttttctcagttaacatctcagagctagaacattccacattccccagcagcgtgtgggggctgactaaagtttacaattccaactaaaaatcaccctgcttctggcttatctgaatcccttacccaccccaccccaccaccctactcctatttattcagcaccacactacccaggaaatacactagcaaattgtgcaatggaataaaatccacactttagattcttgcaactgtatcatatgtaatagtatcactttttctacattttggtcaaataaatttttacataaactacaaaa

SEQ ID NO: 303253 - DNA, 1952 bp, Homo sapiens
gctagtacgaggcctggtttgaattggccgaggggcgcggctgtgcagctctcgccggagccgagcccagccgagcgtccgccgctgcccgtgcgcctctgcgcctccgcgccatggccggcctcaactccctggaggcggtgaaacgcaagatccaggccctgcagcagcaggcggacgaggcggaagaccgcgcgcagggcctgcagcgggagctggacggcgagcgcgagcggcgcgagaaagctgaaggtgatgtggccgccctcaaccgacgcatccagctcgttgaggaggagttggacagggctcaggaacgactggccacggccctgcagaagctggaggaggcagaaaaagctgcagatgagagtgagagaggaatgaaggtgatagaaaaccgggccatgaaggatgaggagaagatggagattcaggagatgcagctcaaagaggccaagcacattgcggaagaggctgaccgcaaatacgaggaggtagctcgtaagctggtcatcctggagggtgagctggagagggcagaggagcgtgcggaggtgtctgaactaaaatgtggtgacctggaagaagaactcaagaatgttactaacaatctgaaatctctggaggctgcatctgaaaagtattctgaaaaggaggacaaatatgaagaagaaattaaacttctgtctgacaaactgaaagaggctgagacccgtgctgaatttgcagagagaacggttgcaaaactggaaaagacaattgatgacctggaagagaaacttgcccaggccaaagaagagaacgtgggcttacatcagacactggatcagacactaaacgaacttaactgtatataagcaaaacagaagagtcttgttccaacagaaactctggagctccgtgggtctttctcttctcttgtaagaagttccttttgttattgccatcttcgctttgctggaaatgtcaagcaaattatgaatacatgaccaaatattttgtatcggagaagctttgagcaccagttaaatctcattccttccctttttttttcaaatggcaccagctttttcagctctcttattttttccttaagtagcatttattcctaaggtaggcagggtatttcctagtaagcatactttcttaagacggaggccatttggttcctgggagaataggcagccccacactttgaagaatacagaccccagtatctagtcgtggatataattaaaacgctgaagaccataaccttttgggtcaactgttggtcaaactataggagagaccagggaccatcacatgggtagggattttccatccagagccaataaaaggactggtgggggccgggggtggctattgtgggaagtcataacccacagatagatcaacctaagaatcctggcccttctccactctccaccatgcaggacaaacatcttctcaagcagtcaacgtagaatgcttgggaaatagtcataattacccacatatagtaattaatagatggtaattaattgatccttgatgtgatgttcttttgcatatttccttcattctaaagttgttccctggccgggagcgttggctttcgcctgtaatcccaacactttgggaggccaggacagatcacttgaggtcaggagttcgagaccagcccagccaacatggcgaaaccatgtctctactaaaaatacaaaaattatggtgacgcctgcctgtagtcccagctactcgggaggctgaggcaggaggatcgcttgaacccaggaagtggagactgcagtgagccgatatcgcaccacagcgctccagcctggtgcgatatcggactcttctccattctccaccatgcaggacaaactatcttctctagagcgagtcaacggtagacatgcttgggaaagtagtcatacattacccactatagtaggaagttacat

SEQ ID NO: 303254 - DNA, 1699 bp, Homo sapiens
gctagtacgaggcctggtttgaattggccgaggggcgcggctgtgcagctctcgccggagccgagcccagccgagcgtccgccgctgcccgtgcgcctctgcgcctccgcgccatggccggcctcaactccctggaggcggtgaaacgcaagatccaggccctgcagcagcaggcggacgaggcggaagaccgcgcgcagggcctgcagcgggagctggacggcgagcgcgagcggcgcgagaaagctgaaggtgatgtggccgccctcaaccgacgcatccagctcgttgaggaggagttggacagggctcaggaacgactggccacggccctgcagaagctggaggaggcagaaaaagctgcagatgagagtgagagaggaatgaaggtgatagaaaaccgggccatgaaggatgaggagaagatggagattcaggagatgcagctcaaagaggccaagcacattgcggaagaggctgaccgcaaatacgaggaggtagctcgtaagctggtcatcctggagggtgagctggagagggcagaggagcgtgcggaggtgtctgaactaaaatgtggtgacctggaagaagaactcaagaatgttactaacaatctgaaatctctggaggctgcatctgaaaagtattctgaaaaggaggacaaatatgaagaagaaattaaacttctgtctgacaaactgaaagaggctgagacccgtgctgaatttgcagagagaacggttgcaaaactggaaaagacaattgatgacctggaagagaaacttgcccaggccaaagaagagaacgtgggcttacatcagacactggatcagacactaaacgaacttaactgtatataagcaaaacagaagagtcttgttccaacagaaactctggagctccgtgggtctttctcttctcttgtaagaagttccttttgttattgccatcttcgctttgctggaaatgtcaagcaaattatgaatacatgaccaaatattttgtatcggagaagctttgagcaccagttaaatctcattccttccctttttttttcaaatggcaccagctttttcagctctcttattttttccttaagtagcatttattcctaaggtaggcagggtatttcctagtaagcatactttcttaagacggaggccatttggttcctgggagaataggcagccccacactttgaagaatacagaccccagtatctagtcgtggatataattaaaacgctgaagaccataaccttttgggtcaactgttggtcaaactataggagagaccagggaccatcacatgggtagggattttccatccagagccaataaaaggactggtgggggccgggggtggctattgtgggaagtcataacccacagatagatcaacctaagaatcctggcccttctccactctccaccatgcaggacaaacatcttctcaagcagtcaacgtagaatgcttgggaaatagtcataattacccacatatagtaattaatagatggtaattaattgatccttgatgtgatgttcttttgcatatttccttcattctaaagttgttccctggccgggagcgttggctttcgcctgtaatcccaacactttagtgctagtgtgagccaccatacccagccacattttgacaaatgtatgcatctgtgtaaccaccactatagccatct

SEQ ID NO: 303255 - DNA, 1566 bp, Homo sapiens
gctagtacgaggcctggtttgaattggccgaggggcgcggctgtgcagctctcgccggagccgagcccagccgagcgtccgccgctgcccgtgcgcctctgcgcctccgcgccatggccggcctcaactccctggaggcggtgaaacgcaagatccaggccctgcagcagcaggcggacgaggcggaagaccgcgcgcagggcctgcagcgggagctggacggcgagcgcgagcggcgcgagaaagctgaaggtgatgtggccgccctcaaccgacgcatccagctcgttgaggaggagttggacagggctcaggaacgactggccacggccctgcagaagctggaggaggcagaaaaagctgcagatgagagtgagagaggaatgaaggtgatagaaaaccgggccatgaaggatgaggagaagatggagattcaggagatgcagctcaaagaggccaagcacattgcggaagaggctgaccgcaaatacgaggaggtagctcgtaagctggtcatcctggagggtgagctggagagggcagaggagcgtgcggaggtgtctgaactaaaatgtggtgacctggaagaagaactcaagaatgttactaacaatctgaaatctctggaggctgcatctgaaaagtattctgaaaaggaggacaaatatgaagaagaaattaaacttctgtctgacaaactgaaagaggctgagacccgtgctgaatttgcagagagaacggttgcaaaactggaaaagacaattgatgacctggaagagaaacttgcccaggccaaagaagagaacgtgggcttacatcagacactggatcagacactaaacgaacttaactgtatataagcaaaacagaagagtcttgttccaacagaaactctggagctccgtgggtctttctcttctcttgtaagaagttccttttgttattgccatcttcgctttgctggaaatgtcaagcaaattatgaatacatgaccaaatattttgtatcggagaagctttgagcaccagttaaatctcattccttccctttttttttcaaatggcaccagctttttcagctctcttattttttccttaagtagcatttattcctaaggtaggcagggtatttcctagtaagcatactttcttaagacggaggccatttggttcctgggagaataggcagccccacactttgaagaatacagaccccagtatctagtcgtggatataattaaaacgctgaagaccataaccttttgggtcaactgttggtcaaactataggagagaccagggaccatcacatgggtagggattttccatccagagccaataaaaggactggtgggggccgggggtggctattgtgggaagtcataacccacagatagatcaacctaagaatcctggcccttctccactctccaccatgcaggacaaacatcttctcaagcagtcaacgtagaatgcttgggaaatagtcataattacccacatatagtaattaatagatggtaattaattgatccttgatgtatctcgctcgggtcctctaaacagcc

SEQ ID NO: 303256 - DNA, 1456 bp, Homo sapiens
gctagtacgaggcctggtttgaattggccgaggggcgcggctgtgcagctctcgccggagccgagcccagccgagcgtccgccgctgcccgtgcgcctctgcgcctccgcgccatggccggcctcaactccctggaggcggtgaaacgcaagatccaggccctgcagcagcaggcggacgaggcggaagaccgcgcgcagggcctgcagcgggagctggacggcgagcgcgagcggcgcgagaaagctgaaggtgatgtggccgccctcaaccgacgcatccagctcgttgaggaggagttggacagggctcaggaacgactggccacggccctgcagaagctggaggaggcagaaaaagctgcagatgagagtgagagaggaatgaaggtgatagaaaaccgggccatgaaggatgaggagaagatggagattcaggagatgcagctcaaagaggccaagcacattgcggaagaggctgaccgcaaatacgaggaggtagctcgtaagctggtcatcctggagggtgagctggagagggcagaggagcgtgcggaggtgtctgaactaaaatgtggtgacctggaagaagaactcaagaatgttactaacaatctgaaatctctggaggctgcatctgaaaagtattctgaaaaggaggacaaatatgaagaagaaattaaacttctgtctgacaaactgaaagaggctgagacccgtgctgaatttgcagagagaacggttgcaaaactggaaaagacaattgatgacctggaagagaaacttgcccaggccaaagaagagaacgtgggcttacatcagacactggatcagacactaaacgaacttaactgtatataagcaaaacagaagagtcttgttccaacagaaactctggagctccgtgggtctttctcttctcttgtaagaagttccttttgttattgccatcttcgctttgctggaaatgtcaagcaaattatgaatacatgaccaaatattttgtatcggagaagctttgagcaccagttaaatctcattccttccctttttttttcaaatggcaccagctttttcagctctcttattttttccttaagtagcatttattcctaaggtaggcagggtatttcctagtaagcatactttcttaagacggaggccatttggttcctgggagaataggcagccccacactttgaagaatacagaccccagtatctagtcgtggatataattaaaacgctgaagaccataaccttttgggtcaactgttggtcaaactataggagagaccagggactcctatttattcagcaccacactacccaggaaatacactagcaaattgtgcaatggaataaaatccacactttagattcttgcaactgtatcatatgtaatagtatcactttttctacattttggtcaaataaatttttacataaactacaaaa

SEQ ID NO: 303257 - DNA, 1443 bp, Homo sapiens
aacctacatgctgcccaatgctgctgactttatcctgtgccatgcgtggattgcgagctggcaatccacgcatgggacggaggccatttggttcctgggagaataggcagccccacactttgaagaatacagaccccagtatctagtcgtggatataattaaaacgctgaagaccataaccttttgggtcaactgttggtcaaactataggagagaccagggaccatcacatgggtagggattttccatccagagccaataaaaggactggtgggggccgggggtggctattgtgggaagtcataacccacagatagatcaacctaagaatcctggcccttctccactctccaccatgcaggacaaacatcttctcaagcagtcaacgtagaatgcttgggaaatagtcataattacccacatatagtaattaatagatggtaattaattgatccttgatgtgatgttcttttgcatatttccttcattctaaagttgttccctggccgggagcgttggctttcgcctgtaatcccaacactttgggaggccaggacagatcacttgaggtcaggagttcgagaccagcccagccaacatggcgaaaccatgtctctactaaaaatacaaaaattatggtgacgcctgcctgtagtcccagctactcgggaggctgaggcaggaggatcgcttgaacccaggaagtggagactgcagtgagccgatatcgcaccacagcgctccagcctggtcgacagagtgagactccatctcaagaaaaaataaaaataaagttgttctctgaagagcaaatgtctcattccagtaatgacccactcagcaggaatatggtggagttcagtccaattcaggtcagccatatccaaaagaccacaagtcattactaagttgagcaaaagagtttttatctattagcagaaagggcctctctggcagcagagattaaaaactggcccaacttcatttccatacttcagggaacagcaaattgaggatttacttatctaggacttgaattccttctttgggaccaagttaataaaagaccaagaaactcctgattaaactggataatgaaggattctgtagacagggctgcacgtatcggctttgtttgacttctcttttctcagttaacatctcagagctagaacattccacattccccagcagcgtgtgggggctgactaaagtttacaattccaactaaaaatcaccctgcttctggcttatctgaatcccttacccaccccaccccaccaccctactcctatttattcagcaccacactacccaggaaatacactagcaaattgtgcaatggaataaaatccacactttagattcttgcaactgtatcatatgtaatagtatcactttttctacattttggtcaaataaatttttacataaactacaaaa

SEQ ID NO: 303258 - DNA, 1240 bp, Homo sapiens
cagagtccaaacagtgcccagagtccaaacagtgcccaaagtccaaacagtgccaataaaaggactggtgggggccgggggtggctattgtgggaagtcataacccacagatagatcaacctaagaatcctggcccttctccactctccaccatgcaggacaaacatcttctcaagcagtcaacgtagaatgcttgggaaatagtcataattacccacatatagtaattaatagatggtaattaattgatccttgatgtgatgttcttttgcatatttccttcattctaaagttgttccctggccgggagcgttggctttcgcctgtaatcccaacactttgggaggccaggacagatcacttgaggtcaggagttcgagaccagcccagccaacatggcgaaaccatgtctctactaaaaatacaaaaattatggtgacgcctgcctgtagtcccagctactcgggaggctgaggcaggaggatcgcttgaacccaggaagtggagactgcagtgagccgatatcgcaccacagcgctccagcctggtcgacagagtgagactccatctcaagaaaaaataaaaataaagttgttctctgaagagcaaatgtctcattccagtaatgacccactcagcaggaatatggtggagttcagtccaattcaggtcagccatatccaaaagaccacaagtcattactaagttgagcaaaagagtttttatctattagcagaaagggcctctctggcagcagagattaaaaactggcccaacttcatttccatacttcagggaacagcaaattgaggatttacttatctaggacttgaattccttctttgggaccaagttaataaaagaccaagaaactcctgattaaactggataatgaaggattctgtagacagggctgcacgtatcggctttgtttgacttctcttttctcagttaacatctcagagctagaacattccacattccccagcagcgtgtgggggctgactaaagtttacaattccaactaaaaatcaccctgcttctggcttatctgaatcccttacccaccccaccccaccaccctactcctatttattcagcaccacactacccaggaaatacactagcaaattgtgcaatggaataaaatccacactttagattcttgcaactgtatcatatgtaatagtatcactttttctacattttggtcaaataaatttttacataaactacaaaa

SEQ ID NO: 303259 - DNA, 1085 bp, Homo sapiens
gctagtacgaggcctggtttgaattggccgaggggcgcggctgtgcagctctcgccggagccgagcccagccgagcgtccgccgctgcccgtgcgcctctgcgcctccgcgccatggccggcctcaactccctggaggcggtgaaacgcaagatccaggccctgcagcagcaggcggacgaggcggaagaccgcgcgcagggcctgcagcgggagctggacggcgagcgcgagcggcgcgagaaagctgaaggtgatgtggccgccctcaaccgacgcatccagctcgttgaggaggagttggacagggctcaggaacgactggccacggccctgcagaagctggaggaggcagaaaaagctgcagatgagagtgagagaggaatgaaggtgatagaaaaccgggccatgaaggatgaggagaagatggagattcaggagatgcagctcaaagaggccaagcacattgcggaagaggctgaccgcaaatacgaggaggtagctcgtaagctggtcatcctggagggtgagctggagagggcagaggagcgtgcggaggtgtctgaactaaaatgtggtgacctggaagaagaactcaagaatgttactaacaatctgaaatctctggaggctgcatctgaaaagtattctgaaaaggaggacaaatatgaagaagaaattaaacttctgtctgacaaactgaaagaggctgagacccgtgctgaatttgcagagagaacggttgcaaaactggaaaagacaattgatgacctggaagagaaacttgcccaggccaaagaagagaacgtgggcttacatcagacactggatcagacactaaacgaacttaactgtatataagcaaaacagaagagtcttgttccaacagaaactctggagctccgtgggtctttctcttctcttgtaagaagttccttttgttattgccatcttcgctttgctggaaatgtcaagcaaattatgaatacatgaccaaatattttgtatcggagaagctttgagcaccagttaaatctcattccttccctttgcgggtaccggagtcgaatcgaatctggctagaga

SEQ ID NO: 303260 - DNA, 1024 bp, Homo sapiens
gtgtaaaccagttgtgaggaagttaggaccttggggttacctaaagataatttatattaagttgttggtccataaaaactgggcagaattggccacgcgcggtgactcaacgcctgtaatcccagcactttgggaggccgacgcggactagtcaggagttcgagaccagcccagccaacatggcgaaaccatgtctctactaaaaatacaaaaattatggtgacgcctgcctgtagtcccagctactcgggaggctgaggcaggaggatcgcttgaacccaggaagtggagactgcagtgagccgatatcgcaccacagcgctccagcctggtcgacagagtgagactccatctcaagaaaaaataaaaataaagttgttctctgaagagcaaatgtctcattccagtaatgacccactcagcaggaatatggtggagttcagtccaattcaggtcagccatatccaaaagaccacaagtcattactaagttgagcaaaagagtttttatctattagcagaaagggcctctctggcagcagagattaaaaactggcccaacttcatttccatacttcagggaacagcaaattgaggatttacttatctaggacttgaattccttctttgggaccaagttaataaaagaccaagaaactcctgattaaactggataatgaaggattctgtagacagggctgcacgtatcggctttgtttgacttctcttttctcagttaacatctcagagctagaacattccacattccccagcagcgtgtgggggctgactaaagtttacaattccaactaaaaatcaccctgcttctggcttatctgaatcccttacccaccccaccccaccaccctactcctatttattcagcaccacactacccaggaaatacactagcaaattgtgcaatggaataaaatccacactttagattcttgcaactgtatcatatgtaatagtatcactttttctacattttggtcaaataaatttttacataaactacaaaa

SEQ ID NO: 303261 - DNA, 846 bp, Homo sapiens
attacctccacgtggaggaatactatttgacaggagagtaactcacatgaggctgtagccaggacaccacttctcccagagacgggaggatcgcttgaacccaggaagtggagactgcagtgagccgatatcgcaccacagcgctccagcctggtcgacagagtgagactccatctcaagaaaaaataaaaataaagttgttctctgaagagcaaatgtctcattccagtaatgacccactcagcaggaatatggtggagttcagtccaattcaggtcagccatatccaaaagaccacaagtcattactaagttgagcaaaagagtttttatctattagcagaaagggcctctctggcagcagagattaaaaactggcccaacttcatttccatacttcagggaacagcaaattgaggatttacttatctaggacttgaattccttctttgggaccaagttaataaaagaccaagaaactcctgattaaactggataatgaaggattctgtagacagggctgcacgtatcggctttgtttgacttctcttttctcagttaacatctcagagctagaacattccacattccccagcagcgtgtgggggctgactaaagtttacaattccaactaaaaatcaccctgcttctggcttatctgaatcccttacccaccccaccccaccaccctactcctatttattcagcaccacactacccaggaaatacactagcaaattgtgcaatggaataaaatccacactttagattcttgcaactgtatcatatgtaatagtatcactttttctacattttggtcaaataaatttttacataaactacaaaa

SEQ ID NO: 303262 - DNA, 3114 bp, Homo sapiens
gctagtacgaggcctggtttgaattggccgaggggcgcggctgtgcagctctcgccggagccgagcccagccgagcgtccgccgctgcccgtgcgcctctgcgcctccgcgccatggccggcctcaactccctggaggcggtgaaacgcaagatccaggccctgcagcagcaggcggacgaggcggaagaccgcgcgcagggcctgcagcgggagctggacggcgagcgcgagcggcgcgagaaagctgaaggtgatgtggccgccctcaaccgacgcatccagctcgttgaggaggagttggacagggctcaggaacgactggccacggccctgcagaagctggaggaggcagaaaaagctgcagatgagagtgagagaggaatgaaggtgatagaaaaccgggccatgaaggatgaggagaagatggagattcaggagatgcagctcaaagaggccaagcacattgcggaagaggctgaccgcaaatacgaggaggtagctcgtaagctggtcatcctggagggtgagctggagagggcagaggagcgtgcggaggtgtctgaactaaaatgtggtgacctggaagaagaactcaagaatgttactaacaatctgaaatctctggaggctgcatctgaaaagtattctgaaaaggaggacaaatatgaagaagaaattaaacttctgtctgacaaactgaaagaggctgagacccgtgctgaatttgcagagagaacggttgcaaaactggaaaagacaattgatgacctggaagagaaacttgcccaggccaaagaagagaacgtgggcttacatcagacactggatcagacactaaacgaacttaactgtatataagcaaaacagaagagtcttgttccaacagaaactctggagctccgtgggtctttctcttctcttgtaagaagttccttttgttattgccatcttcgctttgctggaaatgtcaagcaaattatgaatacatgaccaaatattttgtatcggagaagctttgagcaccagttaaatctcattccttccctttttttttcaaatggcaccagctttttcagctctcttattttttccttaagtagcatttattcctaaggtaggcagggtatttcctagtaagcatactttcttaagacggaggccatttggttcctgggagaataggcagccccacactttgaagaatacagaccccagtatctagtcgtggatataattaaaacgctgaagaccataaccttttgggtcaactgttggtcaaactataggagagaccagggaccatcacatgggtagggattttccatccagagccaataaaaggactggtgggggccgggggtggctattgtgggaagtcataacccacagatagatcaacctaagaatcctggcccttctccactctccaccatgcaggacaaacatcttctcaagcagtcaacgtagaatgcttgggaaatagtcataattacccacatatagtaattaatagatggtaattaattgatccttgatgtgatgttcttttgcatatttccttcattctaaagttgttccctggccgggagcgttggctttcgcctgtaatcccaacactttgggaggccaggacagatcacttgaggtcaggagttcgagaccagcccagccaacatggcgaaaccatgtctctactaaaaatacaaaaattatggtgacgcctgcctgtagtcccagctactcgggaggctgaggcaggaggatcgcttgaacccaggaagtggagactgcagtgagccgatatcgcaccacagcgctccagcctggtcgacagagtgagactccatctcaagaaaaaataaaaataaagttgttctctgaagagcaaatgtctcattccagtaatgacccactcagcaggaatatggtggagttcagtccaattcaggtcagccatatccaaaagaccacaagtcattactaagttgagcaaaagagtttttatctattagcagaaagggcctctctggcagcagagattaaaaactggcccaacttcatttccatacttcagggaacagcaaattgaggatttacttatctaggacttgaattccttctttgggaccaagttaataaaagaccaagaaactcctgattaaactggataatgaaggattctgtagacagggctgcacgtatcggctttgtttgacttctcttttctcagttaacatctcagagctagaacattccacattccccagcagcgtgtgggggctgactaaagtttacaattccaactaaaaatcaccctgcttctggcttatctgaatcccttacccaccccaccccaccaccctaccctatctccccttttatactaataatcttataaaaaaaaaaaaaacaaaaaaaaaaaaaaaaaaaaaagggggggggcggcaaaaaaaaaccccagcggggggcccaactcaagcggcaaccacgaggttttcttggacaccacggggcccccacataagggggcagggagactaaaacaaccagcaacaggcaggagagcgccccagccccatcaaacaaccacctcggactcggcgagaaacacctgcgcacaccaccgcaccatccctgcgtcacaagcacacccatccctcctgcggcgggcgcacactggcgcacccactccccccagaagagattaagtctacacacgcgacacataacacacttagcacgcgcctcacaggcgaaaccaccaccacattacacccacaccgacacaactctagctcgaggcatactgcgcaaaacatttacaccgagcgagccagcaaaccacactagccacgaccaccaccctacaacgcgaacacaccaaccaggcaagcaacagccgcgcccatcaaggcaccgaccgcacaatgccacgacacgccaccagaacgacgaaacccacacacgccagccaccacccaaccccgcagccggacagcaccccgccaagccaccacgcaaccacaaacaccgaaacacgcacgaaccgacaaccactcagacacctgactcatcagcccaccacacaagcaaacacacaaaaccaagaacc

SEQ ID NO: 303263 - DNA, 2316 bp, Homo sapiens
gctagtacgaggcctggtttgaattggccgaggggcgcggctgtgcagctctcgccggagccgagcccagccgagcgtccgccgctgcccgtgcgcctctgcgcctccgcgccatggccggcctcaactccctggaggcggtgaaacgcaagatccaggccctgcagcagcaggcggacgaggcggaagaccgcgcgcagggcctgcagcgggagctggacggcgagcgcgagcggcgcgagaaagctgaaggtgatgtggccgccctcaaccgacgcatccagctcgttgaggaggagttggacagggctcaggaacgactggccacggccctgcagaagctggaggaggcagaaaaagctgcagatgagagtgagagaggaatgaaggtgatagaaaaccgggccatgaaggatgaggagaagatggagattcaggagatgcagctcaaagaggccaagcacattgcggaagaggctgaccgcaaatacgaggaggtagctcgtaagctggtcatcctggagggtgagctggagagggcagaggagcgtgcggaggtgtctgaactaaaatgtggtgacctggaagaagaactcaagaatgttactaacaatctgaaatctctggaggctgcatctgaaaagtattctgaaaaggaggacaaatatgaagaagaaattaaacttctgtctgacaaactgaaagaggctgagacccgtgctgaatttgcagagagaacggttgcaaaactggaaaagacaattgatgacctggaagagaaacttgcccaggccaaagaagagaacgtgggcttacatcagacactggatcagacactaaacgaacttaactgtatataagcaaaacagaagagtcttgttccaacagaaactctggagctccgtgggtctttctcttctcttgtaagaagttccttttgttattgccatcttcgctttgctggaaatgtcaagcaaattatgaatacatgaccaaatattttgtatcggagaagctttgagcaccagttaaatctcattccttccctttttttttcaaatggcaccagctttttcagctctcttattttttccttaagtagcatttattcctaaggtaggcagggtatttcctagtaagcatactttcttaagacggaggccatttggttcctgggagaataggcagccccacactttgaagaatacagaccccagtatctagtcgtggatataattaaaacgctgaagaccataaccttttgggtcaactgttggtcaaactataggagagaccagggaccatcacatgggtagggattttccatccagagccaataaaaggactggtgggggccgggggtggctattgtgggaagtcataacccacagatagatcaacctaagaatcctggcccttctccactctccaccatgcaggacaaacatcttctcaagcagtcaacgtagaatgcttgggaaatagtcataattacccacatatagtaattaatagatggtaattaattgatccttgatgtgatgttcttttgcatatttccttcattctaaagttgttccctggccgggagcgttggctttcgcctgtaatcccaacactttgggaggccaggacagatcacttgaggtcaggagttcgagaccagcccagccaacatggcgaaaccatgtctctactaaaaatacaaaaattatggtgacgcctgcctgtagtcccagctactcgggaggctgaggcaggaggatcgcttgaacccaggaagtggagactgcagtgagccgatatcgcaccacagcgctccagcctggtcgacagagtgagactccatctcaagaaaaaataaaaataaagttgttctctgaagagcaaatgtctcattccagtaatgacccactcagcaggaatatggtggagttcagtccaattcaggtcagccatatccaaaagaccacaagtcattactaagttgagcaaaagagtttttatctattagcagaaagggcctctctggcagcagagattaaaaactggcccaacttcatttccatacttcagggaacagcaaattgaggatttacttatctaggacttgaattccttctttgggaccaagttaataaaagaccaagaaactcctgattaaactggataatgaaggattctgtagacagggctgcacgtatcggctttgtttgacttctcttttctcagttaacatctcagagctagaacattccacattccccagcagcaggagaattccagcagcaggagaatcgcggcgctcctctagat

SEQ ID NO: 303264 - DNA, 2470 bp, Homo sapiens
actctgccccacagccacagcccctgactgccgcagcccccacagagcccgccgcgcaccccacgtcccccacgccagcgcccagccatggaggccatcaagaagaaaatgcagatgctgaagttggacaaggagaatgccatcgaccgcgcggagcaggcggaggcggataagaaagccgctgaggacaagtgcaagcaggtggaggaggagctgacgcacctccagaagaaactaaaagggacagaggacgagctggataaatattccgaggacctgaaggacgcgcaggagaagctggagctcacggagaagaaggcctccgacgaggaatgaaggtgatagaaaaccgggccatgaaggatgaggagaagatggagattcaggagatgcagctcaaagaggccaagcacattgcggaagaggctgaccgcaaatacgaggaggtagctcgtaagctggtcatcctggagggtgagctggagagggcagaggagcgtgcggaggtgtctgaactaaaatgtggtgacctggaagaagaactcaagaatgttactaacaatctgaaatctctggaggctgcatctgaaaagtattctgaaaaggaggacaaatatgaagaagaaattaaacttctgtctgacaaactgaaagaggctgagacccgtgctgaatttgcagagagaacggttgcaaaactggaaaagacaattgatgacctggaagagaaacttgcccaggccaaagaagagaacgtgggcttacatcagacactggatcagacactaaacgaacttaactgtatataagcaaaacagaagagtcttgttccaacagaaactctggagctccgtgggtctttctcttctcttgtaagaagttccttttgttattgccatcttcgctttgctggaaatgtcaagcaaattatgaatacatgaccaaatattttgtatcggagaagctttgagcaccagttaaatctcattccttccctttttttttcaaatggcaccagctttttcagctctcttattttttccttaagtagcatttattcctaaggtaggcagggtatttcctagtaagcatactttcttaagacggaggccatttggttcctgggagaataggcagccccacactttgaagaatacagaccccagtatctagtcgtggatataattaaaacgctgaagaccataaccttttgggtcaactgttggtcaaactataggagagaccagggaccatcacatgggtagggattttccatccagagccaataaaaggactggtgggggccgggggtggctattgtgggaagtcataacccacagatagatcaacctaagaatcctggcccttctccactctccaccatgcaggacaaacatcttctcaagcagtcaacgtagaatgcttgggaaatagtcataattacccacatatagtaattaatagatggtaattaattgatccttgatgtgatgttcttttgcatatttccttcattctaaagttgttccctggccgggagcgttggctttcgcctgtaatcccaacactttgggaggccaggacagatcacttgaggtcaggagttcgagaccagcccagccaacatggcgaaaccatgtctctactaaaaatacaaaaattatggtgacgcctgcctgtagtcccagctactcgggaggctgaggcaggaggatcgcttgaacccaggaagtggagactgcagtgagccgatatcgcaccacagcgctccagcctggtcgacagagtgagactccatctcaagaaaaaataaaaataaagttgttctctgaagagcaaatgtctcattccagtaatgacccactcagcaggaatatggtggagttcagtccaattcaggtcagccatatccaaaagaccacaagtcattactaagttgagcaaaagagtttttatctattagcagaaagggcctctctggcagcagagattaaaaactggcccaacttcatttccatacttcagggaacagcaaattgaggatttacttatctaggacttgaattccttctttgggaccaagttaataaaagaccaagaaactcctgattaaactggataatgaaggattctgtagacagggctgcacgtatcggctttgtttgacttctcttttctcagttaacatctcagagctagaacattccacattccccagcagcgtgtgggggctgactaaagtttacaattccaactaaaaatcaccctgcttctggcttatctgaatcccttacccaccccaccccaccaccctactcctatttattcagcaccacactacccaggaaatacactagcaaattgtgcaatggaataaaatccacactttagattcttgcaactgtatcatatgtaatagtatcactttttctacattttggtcaaataaatttttacataaactacaaaa

SEQ ID NO: 303265 - DNA, 1811 bp, Homo sapiens
  misc_feature (1698)..(1698): n is a, c, g, or t
  misc_feature (1702)..(1702): n is a, c, g, or t
  misc_feature (1704)..(1704): n is a, c, g, or t
  misc_feature (1711)..(1711): n is a, c, g, or t
  misc_feature (1731)..(1731): n is a, c, g, or t
  misc_feature (1741)..(1741): n is a, c, g, or t
  misc_feature (1811)..(1811): n is a, c, g, or t
gctagtacgaggcctggtttgaattggccgaggggcgcggctgtgcagctctcgccggagccgagcccagccgagcgtccgccgctgcccgtgcgcctctgcgcctccgcgccatggccggcctcaactccctggaggcggtgaaacgcaagatccaggccctgcagcagcaggcggacgaggcggaagaccgcgcgcagggcctgcagcgggagctggacggcgagcgcgagcggcgcgagaaagctgaaggtgatgtggccgccctcaaccgacgcatccagctcgttgaggaggagttggacagggctcaggaacgactggccacggccctgcagaagctggaggaggcagaaaaagctgcagatgagagtgagagaggaatgaaggtgatagaaaaccgggccatgaaggatgaggagaagatggagattcaggagatgcagctcaaagaggccaagcacattgcggaagaggctgaccgcaaatacgaggaggtagctcgtaagctggtcatcctggagggtgagctggagagggcagaggagcgtgcggaggtgtctgaactaaaatgtggtgacctggaagaagaactcaagaatgttactaacaatctgaaatctctggaggctgcatctgaaaagtattctgaaaaggaggacaaatatgaagaagaaattaaacttctgtctgacaaactgaaagaggctgagacccgtgctgaatttgcagagagaacggttgcaaaactggaaaagacaattgatgacctggaagagaaacttgcccaggccaaagaagagaacgtgggcttacatcagacactggatcagacactaaacgaacttaactgtatataagcaaaacagaagagtcttgttccaacagaaactctggagctccgtgggtctttctcttctcttgtaagaagttccttttgttattgccatcttcgctttgctggaaatgtcaagcaaattatgaatacatgaccaaatattttgtatcggagaagctttgagcaccagttaaatctcattccttccctttttttttcaaatggcaccagctttttcagctctcttattttttccttaagtagcatttattcctaaggtaggcagggtatttcctagtaagcatactttcttaagacggaggccatttggttcctgggagaataggcagccccacactttgaagaatacagaccccagtatctagtcgtggatataattaaaacgctgaagaccataaccttttgggtcaactgttggtcaaactataggagagaccagggaccatcacatgggtagggattttccatccagagccaataaaaggactggtgggggccgggggtggctattgtgggaagtcataacccacagatagatcaacctaagaatcctggcccttctccactctccaccatgcaggacaaacatcttctcaagcagtcaacgtagaatgcttgggaaatagtcataattacccacatatagtaattaatagatggtaattaattgatccttgatgtgatgttcttttgcatatttccttcattctaaagttgttccctggccgggagcgttggctttcgcctgtaatcccaacactttgggaggccaggacagatcacttgagctggtctcgaacacctgggctcaagtgatccgcctgcctcggcctgccgcnaagngntgggatnacaggtgtgagccaccccgntcaacaaggntttattatttaagttagttaaactttggatagattgtataatatatagtttaatgtaatcatgctaatgn

SEQ ID NO: 303266 - DNA, 1669 bp, Homo sapiens
gctagtacgaggcctggtttgaattggccgaggggcgcggctgtgcagctctcgccggagccgagcccagccgagcgtccgccgctgcccgtgcgcctctgcgcctccgcgccatggccggcctcaactccctggaggcggtgaaacgcaagatccaggccctgcagcagcaggcggacgaggcggaagaccgcgcgcagggcctgcagcgggagctggacggcgagcgcgagcggcgcgagaaagctgaaggtgatgtggccgccctcaaccgacgcatccagctcgttgaggaggagttggacagggctcaggaacgactggccacggccctgcagaagctggaggaggcagaaaaagctgcagatgagagtgagagaggaatgaaggtgatagaaaaccgggccatgaaggatgaggagaagatggagattcaggagatgcagctcaaagaggccaagcacattgcggaagaggctgaccgcaaatacgaggaggtagctcgtaagctggtcatcctggagggtgagctggagagggcagaggagcgtgcggaggtgtctgaactaaaatgtggtgacctggaagaagaactcaagaatgttactaacaatctgaaatctctggaggctgcatctgaaaagtattctgaaaaggaggacaaatatgaagaagaaattaaacttctgtctgacaaactgaaagaggctgagacccgtgctgaatttgcagagagaacggttgcaaaactggaaaagacaattgatgacctggaagagaaacttgcccaggccaaagaagagaacgtgggcttacatcagacactggatcagacactaaacgaacttaactgtatataagcaaaacagaagagtcttgttccaacagaaactctggagctccgtgggtctttctcttctcttgtaagaagttccttttgttattgccatcttcgctttgctggaaatgtcaagcaaattatgaatacatgaccaaatattttgtatcggagaagctttgagcaccagttaaatctcattccttccctttttttttcaaatggcaccagctttttcagctctcttattttttccttaagtagcatttattcctaaggtaggcagggtatttcctagtaagcatactttcttaagacggaggccatttggttcctgggagaataggcagccccacactttgaagaatacagaccccagtatctagtcgtggatataattaaaacgctgaagaccataaccttttgggtcaactgttggtcaaactataggagagaccagggaccatcacatgggtagggattttccatccagagccaataaaaggactggtgggggccgggggtggctattgtgggaagtcataacccacagatagatcaacctaagaatcctggcccttctccactctccaccatgcaggacaaacatcttctcaagcagtcaacgtagaatgcttgggaaatagtcataattacccacatatagtaattaatagatggtaattaattgatccttgatgtgatgttcttttgcatatttccttcattctaaagttgttccctggccgggagcgttggctttcgcctgtaatcccaacactttcctgacctcgtgatccacctgccttggcacccaaagtgttgggatta

SEQ ID NO: 303267 - DNA, 1263 bp, Homo sapiens
gctagtacgaggcctggtttgaattggccgaggggcgcggctgtgcagctctcgccggagccgagcccagccgagcgtccgccgctgcccgtgcgcctctgcgcctccgcgccatggccggcctcaactccctggaggcggtgaaacgcaagatccaggccctgcagcagcaggcggacgaggcggaagaccgcgcgcagggcctgcagcgggagctggacggcgagcgcgagcggcgcgagaaagctgaaggtgatgtggccgccctcaaccgacgcatccagctcgttgaggaggagttggacagggctcaggaacgactggccacggccctgcagaagctggaggaggcagaaaaagctgcagatgagagtgagagaggaatgaaggtgatagaaaaccgggccatgaaggatgaggagaagatggagattcaggagatgcagctcaaagaggccaagcacattgcggaagaggctgaccgcaaatacgaggaggtagctcgtaagctggtcatcctggagggtgagctggagagggcagaggagcgtgcggaggtgtctgaactaaaatgtggtgacctggaagaagaactcaagaatgttactaacaatctgaaatctctggaggctgcatctgaaaagtattctgaaaaggaggacaaatatgaagaagaaattaaacttctgtctgacaaactgaaagaggctgagacccgtgctgaatttgcagagagaacggttgcaaaactggaaaagacaattgatgacctggaagagaaacttgcccaggccaaagaagagaacgtgggcttacatcagacactggatcagacactaaacgaacttaactgtatataagcaaaacagaagagtcttgttccaacagaaactctggagctccgtgggtctttctcttctcttgtaagaagttccttttgttattgccatcttcgctttgctggaaatgtcaagcaaattatgaatacatgaccaaatattttgtatcggagaagctttgagcaccagttaaatctcattccttccctttttttttcaaatggcaccagctttttcagctctcttattttttccttaagtagcatttattcctatttattcagcaccacactacccaggaaatacactagcaaattgtgcaatggaataaaatccacactttagattcttgcaactgtatcatatgtaatagtatcactttttctacattttggtcaaataaatttttacataaactacaaaa

SEQ ID NO: 303268 - DNA, 1241 bp, Homo sapiens
ctaaaggcaacagaaggcacagatgtaaggcactgcagatatggtaaaggagctctggaagagcagaaaaggcccagtcgcagcagagaaggcaataaacaagcagatgaagacagtcaagggacccagaacctgtttacttcgcgtgagtccacattccaaaatgtgggactcaagcagtcaacgtagaatgcttgggaaatagtcataattacccacatatagtaattaatagatggtaattaattgatccttgatgtgatgttcttttgcatatttccttcattctaaagttgttccctggccgggagcgttggctttcgcctgtaatcccaacactttgggaggccaggacagatcacttgaggtcaggagttcgagaccagcccagccaacatggcgaaaccatgtctctactaaaaatacaaaaattatggtgacgcctgcctgtagtcccagctactcgggaggctgaggcaggaggatcgcttgaacccaggaagtggagactgcagtgagccgatatcgcaccacagcgctccagcctggtcgacagagtgagactccatctcaagaaaaaataaaaataaagttgttctctgaagagcaaatgtctcattccagtaatgacccactcagcaggaatatggtggagttcagtccaattcaggtcagccatatccaaaagaccacaagtcattactaagttgagcaaaagagtttttatctattagcagaaagggcctctctggcagcagagattaaaaactggcccaacttcatttccatacttcagggaacagcaaattgaggatttacttatctaggacttgaattccttctttgggaccaagttaataaaagaccaagaaactcctgattaaactggataatgaaggattctgtagacagggctgcacgtatcggctttgtttgacttctcttttctcagttaacatctcagagctagaacattccacattccccagcagcgtgtgggggctgactaaagtttacaattccaactaaaaatcaccctgcttctggcttatctgaatcccttacccaccccaccccaccaccctactcctatttattcagcaccacactacccaggaaatacactagcaaattgtgcaatggaataaaatccacactttagattcttgcaactgtatcatatgtaatagtatcactttttctacattttggtcaaataaatttttacataaactacaaaa

SEQ ID NO: 303269 - DNA, 695 bp, Homo sapiens
ggcatttgaatgagaccatattaccctgagctatgttaaatctcttcataaagtgaatagtatgtgaaaacgataataatacctagcagcctgcttctaccgtggacttccctccatgaaattattcttccttcactgcttagtatagtactcacttatactatactggctcatttattagtatttataggttattattattatacttgatccatctgccaaactgtaagttagcggctacttgacccatacagaataagtattaataataaggggtttcaaatgctgaaacattatctttgcagtagttgctgatcaataagagtggtgaggtcttccatagatatttttaggaactattgatcattatcccacagctgtgaacagggcactcctggagagaagaaagctacatttcccattctcagattccaacaaatattgcagatagtatgttttctgacagagatcatgtttttggtagccttgccaggaaccctgtccttttctgccaaatcaatggcatgttttgggttttttgttttgttttgtttctagagacagggtcctgttctgttgcacaggatggagcgcagtggcgccatcacagctcactgcagcctcaaactcctgggctcaagggatcctccccacctcagcctcccaaagcactgggattacaggcttgcaccacc

SEQ ID NO: 303270 - DNA, 641 bp, Homo sapiens
ggcatttgaatgagaccatattaccctgagctatgttaaatctcttcataaagtgaatagtatgtgaaaacgataataatacctagcagcctgcttctaccgtggacttccctccatgaaattattcttccttcactgcttagtatagtactcacttatactatactggctcatttattagtatttataggttattattattatacttgatccatctgccaaactgtaagttagcggctacttgacccatacagaataagtattaataataaggggtttcaaatgctgaaacattataggaactattgatcattatcccacagctgtgaacagggcactcctggagagaagaaagctacatttcccattctcagattccaacaaatattgcagatagtatgttttctgacagagatcatgtttttggtagccttgccaggaaccctgtccttttctgccaaatcaatggcatgttttgggttttttgttttgttttgtttctagagacagggtcctgttctgttgcacaggatggagcgcagtggcgccatcacagctcactgcagcctcaaactcctgggctcaagggatcctccccacctcagcctcccaaagcactgggattacaggcttgcaccacc

SEQ ID NO: 303271 - DNA, 1453 bp, Homo sapiens
tcctggagccagtgtgtacgactccacagagcatttggattacactcctccgaatgctgaaggaaaaacgctcaaaatctcattcttcagggggaagcgttgccactccgaggtgcccactgggaacgaatcccaaagccacgagcgcctgcctagtggggaatgtgaactgttatcctgagagtcgtccttctctctccctggtccaggacagaaaatactgaatagacaggaatttctgaagtctaaacgcctccaatgataacaggagtgttattggaaagggaacaagcgagaagacacagtcttcgaggagttaagttttgctaatctaatgatgagactgcattcatgaagactgagtgaagactttattgcaccatcacatcactaaggtttttctccaacatgaacattctgatgaagtcgaaggcttgaggcctgactaaagcacatatcacactccctacacttccatgttttctctcccatgtggaccctctgatgcatatcaagattcaagcgcctgttgtagcccttcccacagtcctcacatttgtatggcttttctacactgtgaactttttcttgcacttcagagaatgaattctgtacaatgttcttcccatgctgctcacatttgagaggtgtttctctgctgtggcgtctctgatgggtcagacgagttgaggaccagctgaagcccttcccacactcatcacatttgtatggcttttctccagtgtgcactctttgatgagaatgaagctgtgaattctgagtaaatcttttcccacactcttcacatttgaaaggtttttccccactgtgcagtctctgatgtttcaaaagacacgaggcccagccaaaactcttcccacattccttacaattgtatggtctctctcctgtgtggaccttctggtgcatatcaagattaaacttactattgtagccctttccacacttctcacatttgtatggcttttctccagtgtgaactctctgatgggaatgaagatgtgaattttgagtaaatctcttcccacactcttcacattggaatggtttttctccactgtggagtctctcatgtttcaaaagacatggggcccgactaaagctcttcccacattccttacaattatacagtttctctcctgtatggacgcgctggtgaaagtcaagatccaacctccttttgtagcccttcccacactccacacatttgtatggtttttctccactatgggatctctggtgggaatagcattgtgaatttgtgtaaaatcctttcccacattcttcacatttgaatggtttttctccactgtggactcgctgatgtttcaaaagacacgaggcccatctgaagctcttcccacactctttacaattatatggcttctctcccgtgtggaccatatgatgcgtataaagatctcgcctacaa

SEQ ID NO: 303272 - DNA, 693 bp, Homo sapiens
ctctagaggacccccactaagggatcacgcctgttgtagcccttcccacagtcctcacatttgtatggcttttctacactgtgaactttttcttgcacttcagagaatgaattctgtacaatgttcttcccatgctgctcacatttgagaggtgtttctctgctgtggcgtctctgatgggtcagacgagttgaggaccagctgaagcccttcccacactcatcacatttgtatggcttttctccagtgtgcactctttgatgagaatgaagctgtgaattctgagtaaatcttttcccacactcttcacatttgaaaggtttttccccactgtgcagtctctgatgtttcaaaagacacgaggcccagccaaaactcttcccacattccttacaattgtatggtctctctcctgtgtggaccttctggtgcatatcaagattaaacttactattgtagccctttccacacttctcacatttgtatggcttttctccagtgtgaactttttcttgcactttagagaatgaattctgtacaatgttcttcccatgctgctcacatttgagaggtgatctctgctgtggcgttctgatgggtcagacgagttgaggacagttgatccctagtgggtacgactcgatcgtatcctgtctgccttccaggctaatgcccagaaaacctcgcggcaat

SEQ ID NO: 303273 - DNA, 630 bp, Homo sapiens
tcctggagccagtgtgtacgactccacagagcatttggattacactcctccgaatgctgaaggaaaaacgctcaaaatctcattcttcagggggaagcgttgccactccgaggtgcccactgggaacgaatcccaaagccacgagcgcctgcctagtggggaatgtgaactgttatcctgagagtcgtccttctctctccctggtccaggacagaaaatactgaatagacaggaatttctgaagtctaaacgcctccaatgataacaggagtgttattggaaagggaacaagcgagaagacacagtcttcgaggagttaagttttgctaatctaatgccacgtgcacagtaagaagctggcaagatgggccaatcaactgggaagcctatttgcataagaagattagggtggggcgaccagccttccccacgcactatgtaaacgtcataactgatcgaaccaatctatgacccctatgtaaatcagacactgcctcctcaaactggtctgtaaaactcagcacattcactgccagccgacccttttccgctcggagaccccttcctctatggaggaacccgtttctctttctcttcttcctattaaacctccgctcctaaactgaggag

SEQ ID NO: 303274 - DNA, 1268 bp, Homo sapiens
tgaagcactgatgttatcttaaacaaatgttttccctcttccaagaatgggtgaaatttatcaccagcatggattcagagataaaatactcaaagggaagtgcttactatgtgcctcatattttaatgtgtctctcctttgtgaactttcagatgagactgcattcatgaagactgagtgaagactttattgcaccatcacatcactaaggtttttctccaacatgaacattctgatgaagtcgaaggcttgaggcctgactaaagcacatatcacactccctacacttccatgttttctctcccatgtggaccctctgatgcatatcaagattcaagcgcctgttgtagcccttcccacagtcctcacatttgtatggcttttctacactgtgaactttttcttgcacttcagagaatgaattctgtacaatgttcttcccatgctgctcacatttgagaggtgtttctctgctgtggcgtctctgatgggtcagacgagttgaggaccagctgaagcccttcccacactcatcacatttgtatggcttttctccagtgtgcactctttgatgagaatgaagctgtgaattctgagtaaatcttttcccacactcttcacatttgaaaggtttttccccactgtgcagtctctgatgtttcaaaagacacgaggcccagccaaaactcttcccacattccttacaattgtatggtctctctcctgtgtggaccttctggtgcatatcaagattaaacttactattgtagccctttccacacttctcacatttgtatggcttttctccagtgtgaactctctgatgggaatgaagatgtgaattttgagtaaatctcttcccacactcttcacattggaatggtttttctccactgtggagtctctcatgtttcaaaagacatggggcccgactaaagctcttcccacattccttacaattatacagtttctctcctgtatggacgcgctggtgaaagtcaagatccaacctccttttgtagcccttcccacactccacacatttgtatggtttttctccactatgggatctctggtgggaatagcattgtgaatttgtgtaaaatcctttcccacattcttcacatttgaatggtttttctccactgtggactcgctgatgtttcaaaagacacgaggcccatctgaagctcttcccacactctttacaattatatggcttctctcccgtgtggaccatatgatgcgtataaagatctcgcctacaa

SEQ ID NO: 303275 - DNA, 1259 bp, Homo sapiens
agcccgaagtttttttacaaaatgttttccttttccccacggggggggggttatcccccccgggttgggagataaaatactcaaagggaagtgcttactatgtgcctcatattttaatgtgtctctcctttgtgaactttcagatgagactgcattcatgaagactgagtgaagactttattgcaccatcacatcactaaggtttttctccaacatgaacattctgatgaagtcgaaggcttgaggcctgactaaagcacatatcacactccctacacttccatgttttctctcccatgtggaccctctgatgcatatcaagattcaagcgcctgttgtagcccttcccacagtcctcacatttgtatggcttttctacactgtgaactttttcttgcacttcagagaatgaattctgtacaatgttcttcccatgctgctcacatttgagaggtgtttctctgctgtggcgtctctgatgggtcagacgagttgaggaccagctgaagcccttcccacactcatcacatttgtatggcttttctccagtgtgcactctttgatgagaatgaagctgtgaattctgagtaaatcttttcccacactcttcacatttgaaaggtttttccccactgtgcagtctctgatgtttcaaaagacacgaggcccagccaaaactcttcccacattccttacaattgtatggtctctctcctgtgtggaccttctggtgcatatcaagattaaacttactattgtagccctttccacacttctcacatttgtatggcttttctccagtgtgaactctctgatgggaatgaagatgtgaattttgagtaaatctcttcccacactcttcacattggaatggtttttctccactgtggagtctctcatgtttcaaaagacatggggcccgactaaagctcttcccacattccttacaattatacagtttctctcctgtatggacgcgctggtgaaagtcaagatccaacctccttttgtagcccttcccacactccacacatttgtatggtttttctccactatgggatctctggtgggaatagcattgtgaatttgtgtaaaatcctttcccacattcttcacatttgaatggtttttctccactgtggactcgctgatgtttcaaaagacacgaggcccatctgaagctcttcccacactctttacaattatatggcttctctcccgtgtggaccatatgatgcgtataaagatctcgcctacaa

SEQ ID NO: 303276 - DNA, 490 bp, Homo sapiens
tgattcgcctgccggagccaagctgaccgctactccactgagcgtctggactaccattcccagaattgcttgtatcctcctcctggagccagtgtgtacgactccacagagcatttggattacactcctccgaatgctgaaggaaaaacgctcaaaatctcattcttcagggggaagcgttgccactccgaggtgcccactgggaacgaatcccaaagccacgagcgcctgcctagtggggaatgtgaactgttatcctgagagtcgtccttctctctccctggtccaggacagaaaatactgaatagacaggaatttctgaagtctaaacgcctccaatgataacaggagtgttattggaaagggaacaagcgagaagacacagtcttcgaggagttaagttttgctaatctaatggtaagaaatggtttctaaatgtagttttaatttgtatttgttcttttgtaaataaagtggaacatccgtgcat

SEQ ID NO: 303277 - DNA, 1285 bp, Homo sapiens
tcctggagccagtgtgtacgactccacagagcatttggattacactcctccgaatgctgaaggaaaaacgctcaaaatctcattcttcagggggaagcgttgccactccgaggtgcccactgggaacgaatcccaaagccacgagcgcctgcctagtggggaatgtgaactgttatcctgagagtcgtccttctctctccctggtccaggacagaaaatactgaatagacaggaatttctgaagtctaaacgcctccaatgataacaggagtgttattggaaagggaacaagcgagaagacacagtcttcgaggagttaagttttgctaatctaatgatgagactgcattcatgaagactgagtgaagactttattgcaccatcacatcactaaggtttttctccaacatgaacattctgatgaagtcgaaggcttgaggcctgactaaagcacatatcacactccctacacttccatgttttctctcccatgtggaccctctgatgcatatcaagattcaagcgcctgttgtagcccttcccacagtcctcacatttgtatggcttttctccagtgtgcactctttgatgagaatgaagctgtgaattctgagtaaatcttttcccacactcttcacatttgaaaggtttttccccactgtgcagtctctgatgtttcaaaagacacgaggcccagccaaaactcttcccacattccttacaattgtatggtctctctcctgtgtggaccttctggtgcatatcaagattaaacttactattgtagccctttccacacttctcacatttgtatggcttttctccagtgtgaactctctgatgggaatgaagatgtgaattttgagtaaatctcttcccacactcttcacattggaatggtttttctccactgtggagtctctcatgtttcaaaagacatggggcccgactaaagctcttcccacattccttacaattatacagtttctctcctgtatggacgcgctggtgaaagtcaagatccaacctccttttgtagcccttcccacactccacacatttgtatggtttttctccactatgggatctctggtgggaatagcattgtgaatttgtgtaaaatcctttcccacattcttcacatttgaatggtttttctccactgtggactcgctgatgtttcaaaagacacgaggcccatctgaagctcttcccacactctttacaattatatggcttctctcccgtgtggaccatatgatgcgtataaagatctcgcctacaa

SEQ ID NO: 303278 - DNA, 1332 bp, Homo sapiens
gggtgctatagacgcacaaacgaccgcgagccacaaatcaagcacacatatcaaaaaacaaatgagctcttattttgtaaactcattttgcggtcgctatccaaatggcccggactaccagttgcataattatggagatcatagttccgtgagcgagcaattcagggactcggcgagcatgcactccggcaggtacggctacggctacaatggcatggatctcagcgtcggccgctcgggctccggccactttggctccggagagcgcgcccgcagctacgctgccagcgccagcgcggcgcccgccgagcccaggtacagccagccggccacgtccacgcactctcctcagcccgatccgctgccctgctccgccgtggccccctcgcccggcagcgacagccaccacggcgggaaaaactccctaagcaactccagcggcgcctcggccgacgccggcagcacccacatcagcagcagagagggggttggcacggcgtccggagccgaggaggacgcccctgccagcagcgagcaggcgagtgcgcagagcgagccgagcccggcgccgcccgcccaaccccagatctacccctggatgcgcaagctgcacataagtcatgacaacataggcggcccggaaggcaaaagggcccggacggcctacacgcgctaccagaccctggagctggagaaggagttccacttcaaccgttacctgacccgcagaaggaggattgaaatagcacatgctctttgcctctccgagagacaaattaaaatctggttccaaaaccggagaatgaagtggaaaaaagataataagctgaaaagcatgagcatggccgcggcaggaggggccttccgtccctgagtatctgagcgtttaaagtactgagcagtattagcggatcccgcgtagtgtcagtactaaggtgactttctgaaactcccttgtgttccttctgtgaagaagccctgttctcgttgccctaattcatcttttaatcatgagcctgtttattgccattatagcgcctgtataagtagatctgctttctgttcatctctttgtcctgaatggctttgtcttgaaaaaaaatagatgttttaacttatttatatgaagcaagctgtgttacttgaagtaactataacaaaaaaagaaaagagaaaaaaaaacacacaaaaagtcccccttcaatctcgtttagtgccaatgttgtgtgttgcactcaagttgtttaactgtgcatgtgcgtggaagtgttcctgtctcaatagctccaagctgttaaagatatttttattcaaactacctatattccttgt

SEQ ID NO: 303279 - DNA, 759 bp, Homo sapiens
cgccttgggacgcgctcccgggtcaggccagccgagcaaggcgcagagagacaacataggcggcccggaaggcaaaagggcccggacggcctacacgcgctaccagaccctggagctggagaaggagttccacttcaaccgttacctgacccgcagaaggaggattgaaatagcacatgctctttgcctctccgagagacaaattaaaatctggttccaaaaccggagaatgaagtggaaaaaagataataagctgaaaagcatgagcatggccgcggcaggaggggccttccgtccctgagtatctgagcgtttaaagtactgagcagtattagcggatcccgcgtagtgtcagtactaaggtgactttctgaaactcccttgtgttccttctgtgaagaagccctgttctcgttgccctaattcatcttttaatcatgagcctgtttattgccattatagcgcctgtataagtagatctgctttctgttcatctctttgtcctgaatggctttgtcttgaaaaaaaatagatgttttaacttatttatatgaagcaagctgtgttacttgaagtaactataacaaaaaaagaaaagagaaaaaaaaacacacaaaaagtcccccttcaatctcgtttagtgccaatgttgtgtgttgcactcaagttgtttaactgtgcatgtgcgtggaagtgttcctgtctcaatagctccaagctgttaaagatatttttattcaaactacctatattccttgt

SEQ ID NO: 303280 - DNA, 564 bp, Homo sapiens
ctttctgaaactcccttgtgttccttctgtgaagaagccctgttctcgttgccctaattcatcttttaatcatgagcctgtttattgccattatagcgcctgtataagtagatctgctttctgttcatctctttgtcctgaatggctttgtcttgaaaaaaaatagatgttttaacttatttatatgaagcaagctgtgttacttgaagtaactataacaaaaaaagaaaagagaaaaaaaaacacacaaaaagtcccccttcaatctcgtttagtgccaatgttgtgtgttgcactcaagttgtttaactgtgcatgtgcgtggaagtgttcctgtctcaatagctccaagctgttaaagatatttttattcaaactacctatattccttgtgtaattaatgctgttgtagaggtgacttgatgagacacaacttgttcgacgtgtagtgactagtgactctgtgatgaaaactgtgactccaagcggtgtgtccctgcgtgcctttataggaccctttgcacgaactctggaagtggctcttataagcgcagcttcagtgat

SEQ ID NO: 303281 - DNA, 908 bp, Homo sapiens
cccgggggttatgggaggggggcggcgtgaacctccttggcctgggcgaagctgtgtggaccaagcaagtcaggagtgtggccatgttttctgagcaggctgcccagagggcccacactctactgtccccaccatcagccaacaatgccacctttgcccgggtgccagtggcaacctacaccaactcctcacaacccttccggctaggagagcgcagctttagccggcagtatgcccacatttatgccacccgcctcatccaaatgagacccttcctggagaaccgggcccagcagcactggggcagtggagtgggagtgaagaagctgtgtgaactgcagcctgaggagaagtgctgtgtggtgggcactctgttcaaggccatgccgctgcagccctccatcctgcgggaggtcagcgaggagcacaacctgctcccccagcctcctcggagtaaatacatacacccagatgacgagctggtcttggaagatgaactgcagcgtatcaaactaaaaggcaccattgacgtgtcaaagctggttacggggactgtcctggctgtgtttggctccgtgagagacgacgggaagtttctggtggaggactattgctttgctgaccttgctccccagaagcccgcacccccacttgacacagataggtttgtgctactggtgtccggcctgggcctgggtggcggtggaggcgagagcctgctgggcacccagctgctggtggatgtggtgacggggcagcttggggacgaaggggagcagtgcagcgccgcccacgtctcccgggttatcctcgctggcaacctcctcagccaagaccacgacaggatctttcaataggcaagtctccacagaaaccaggccgcaacgggacgggcagagcgggagaaa

SEQ ID NO: 303282 - DNA, 659 bp, Homo sapiens
tccccctgtgggtttgcacttgccagcattgctgagaactgtctgaggagaagttcagaggcttggcacctgctctggaagctactctggaatcttaattctaaggccaatggctgcccaccccaacgggcagcaacagcagggccaaggtcttgtgacaatgtctggaggtgcccctattgtcacactgggggtctcctactggcctgcaatgggaggaggggctgcagccccacatcctgtgcagagtgctagtgctgaggcggaaccctcctcagagctgccccttctcctccaggttgttaccccttctacaaaactgacccgttcatcttcccagagtgcccgcatgtctacttttgtggcaacacccccagctttggctccaaaatcatccgaggtcctgaggaccagacagtgctgttggtgactgtccctgacttcagtgccacgcagaccgcctgccttgtgaacctgcgcagcctggcctgccagcccatcagcttctcgggcttcggggcagaggacgatgacctgggaggcctggggctgggcccctgactcaaaaaagtggttttgaccagagaggcccagatggaggctgttcattccctgcagtgtcggcattgtaaataaagcctgagcacttgctgatgcga

SEQ ID NO: 303283 - DNA, 533 bp, Homo sapiens
aaacctgcattgtggagtccccctggcccttgtgggatggacagctgaggtcttctgcacagctgccatttcactgtgggagccaagctgcctcgccagctgggcagggactggaacggctcccagcctgtgtgcctctcaaggctaatctctggtctcctattgtcactgccccactgtgtgccaatggggactcctgtttatttctggcagcttctctttgaggcaggacttacttggaacctacagtgggtcctatgtgacttctttgcaggtcctgaggaccagacagtgctgttggtgactgtccctgacttcagtgccacgcagaccgcctgccttgtgaacctgcgcagcctggcctgccagcccatcagcttctcgggcttcggggcagaggacgatgacctgggaggcctggggctgggcccctgactcaaaaaagtggttttgaccagagaggcccagatggaggctgttcattccctgcagtgtcggcattgtaaataaagcctgagcacttgctgatgcga

SEQ ID NO: 303284 - DNA, 413 bp, Homo sapiens
cagtcagagtcctcagaggttccaagctggcaaagttcaggttaacagtggcctgtgtggaaggatctcttgagaacagaagttcaagaccagcatgggcaacatagcgaggctccgtctctacaaaatatataaaattagctgtagtcccagctactcgggaggctgaggcaggagaatggcgtgaacccgggaggcggagcttgcagtgagctgagatcgcgccactgcactccagcctggatgacagcgagactccgcctcaaaacaaaaacaaaaacagaaacaacaataacagaaaaacacagacatttactctctggcagttctggaggccagaagttgaaatccagatgtcagccggcacatgggttctctccagtcacgacgaggggagaatcaccgcccggcct

SEQ ID NO: 303285 - DNA, 1617 bp, Homo sapiens
aggccgtgggtaaatcggccgagggggattggcgggatgcggcgcgccgcgcgtgaacctccttggcctgggcgaagctgtgtggaccaagcaagtcaggagtgtggccatgttttctgagcaggctgcccagagggcccacactctactgtccccaccatcagccaacaatgccacctttgcccgggtgccagtggcaacctacaccaactcctcacaacccttccggctaggagagcgcagctttagccggcagtatgcccacatttatgccacccgcctcatccaaatgagacccttcctggagaaccgggcccagcagcactggggcagtggagtgggagtgaagaagctgtgtgaactgcagcctgaggagaagtgctgtgtggtgggcactctgttcaaggccatgccgctgcagccctccatcctgcgggaggtcagcgaggagcacaacctgctcccccagcctcctcggagtaaatacatacacccagatgacgagctggtcttggaagatgaactgcagcgtatcaaactaaaaggcaccattgacgtgtcaaagctggttacggggactgtcctggctgtgtttggctccgtgagagacgacgggaagtttctggtggaggactattgctttgctgaccttgctccccagaagcccgcacccccacttgacacagataggtttgtgctactggtgtccggcctgggcctgggtggcggtggaggcgagagcctgctgggcacccagctgctggtggatgtggtgacggggcagcttggggacgaaggggagcagtgcagcgccgcccacgtctcccgggttatcctcgctggcaacctcctcagccacagcacccagagcagggattctatcaataaggccaaatacctcaccaagaaaacccaggcagccagcgtggaggctgttaagatgctggatgagatcctcctgcagctgagcgcctcagtgcccgtggacgtgatgccaggcgagtttgatcccaccaattacacgctcccccagcagcccctccacccctgcatgttcccgctggccactgcctactccacgctccagctggtcaccaacccctaccaggccaccattgatggagtcagatttttggggacatcaggacagaacgtgagtgacattttccgatacagcagcatggaggatcacttggagatcctggagtggaccctgcgggtccgtcacatcagccccacagcccctgacactctaggttgttaccccttctacaaaactgacccgttcatcttcccagagtgcccgcatgtctacttttgtggcaacacccccagctttggctccaaaatcatccgaggtcctgaggaccagacagtgctgttggtgactgtccctgacttcagtgccacgcagaccgcctgccttgtgaacctgcgcagcctggcctgccagcccatcagcttctcgggcttcggggcagaggacgatgacctgggaggcctggggctgggcccctgactcaaaaaagtggttttgaccagagaggcccagatggaggctgttcattccctgcagtgtcggcattgtaaataaagcctgagcacttgctgatgcga

SEQ ID NO: 303286 - DNA, 1620 bp, Homo sapiens
  misc_feature (22)..(22): n is a, c, g, or t
  misc_feature (29)..(29): n is a, c, g, or t
taggctagtagaggcccgtgtnaatcggncgagggcgggatgcggcgcgccgcgcgtgaacctccttggcctgggcgaagctgtgtggaccaagcaagtcaggagtgtggccatgttttctgagcaggctgcccagagggcccacactctactgtccccaccatcagccaacaatgccacctttgcccgggtgccagtggcaacctacaccaactcctcacaacccttccggctaggagagcgcagctttagccggcagtatgcccacatttatgccacccgcctcatccaaatgagacccttcctggagaaccgggcccagcagcactggggcagtggagtgggagtgaagaagctgtgtgaactgcagcctgaggagaagtgctgtgtggtgggcactctgttcaaggccatgccgctgcagccctccatcctgcgggaggtcagcgaggagcacaacctgctcccccagcctcctcggagtaaatacatacacccagatgacgagctggtcttggaagatgaactgcagcgtatcaaactaaaaggcaccattgacgtgtcaaagctggttacggggactgtcctggctgtgtttggctccgtgagagacgacgggaagtttctggtggaggactattgctttgctgaccttgctccccagaagcccgcacccccacttgacacagataggtttgtgctactggtgtccggcctgggcctgggtggcggtggaggcgagagcctgctgggcacccagctgctggtggatgtggtgacggggcagcttggggacgaaggggagcagtgcagcgccgcccacgtctcccgggttatcctcgctggcaacctcctcagccacagcacccagagcagggattctatcaataaggccaaatacctcaccaagaaaacccaggcagccagcgtggaggctgttaagatgctggatgagatcctcctgcagctgagcgcctcagtgcccgtggacgtgatgccaggcgagtttgatcccaccaattacacgctcccccagcagcccctccacccctgcatgttcccgctggccactgcctactccacgctccagctggtcaccaacccctaccaggccaccattgatggagtcagatttttggggacatcaggacagaacgtgagtgacattttccgatacagcagcatggaggatcacttggagatcctggagtggaccctgcgggtccgtcacatcagccccacagcccctgacactctaggttgttaccccttctacaaaactgacccgttcatcttcccagagtgcccgcatgtctacttttgtggcaacacccccagctttggctccaaaatcatccgaggtcctgaggaccagacagtgctgttggtgactgtccctgacttcagtgccacgcagaccgcctgccttgtgaacctgcgcagcctggcctgccagcccatcagcttctcgggcttcggggcagaggacgatgacctgggaggcctggggctgggcccctgactcaaaaaagtggttttgaccagagaggcccagatggaggctgttcattccctgcagtgtcggcattgtaaataaagcctgagcacttgctgatgcga

SEQ ID NO: 303287 - DNA, 1613 bp, Homo sapiens
ctgatacggtccgcaatccctgttgaggcgggatgcggcgcgccgcgcgtgaacctccttggcctgggcgaagctgtgtggaccaagcaagtcaggagtgtggccatgttttctgagcaggctgcccagagggcccacactctactgtccccaccatcagccaacaatgccacctttgcccgggtgccagtggcaacctacaccaactcctcacaacccttccggctaggagagcgcagctttagccggcagtatgcccacatttatgccacccgcctcatccaaatgagacccttcctggagaaccgggcccagcagcactggggcagtggagtgggagtgaagaagctgtgtgaactgcagcctgaggagaagtgctgtgtggtgggcactctgttcaaggccatgccgctgcagccctccatcctgcgggaggtcagcgaggagcacaacctgctcccccagcctcctcggagtaaatacatacacccagatgacgagctggtcttggaagatgaactgcagcgtatcaaactaaaaggcaccattgacgtgtcaaagctggttacggggactgtcctggctgtgtttggctccgtgagagacgacgggaagtttctggtggaggactattgctttgctgaccttgctccccagaagcccgcacccccacttgacacagataggtttgtgctactggtgtccggcctgggcctgggtggcggtggaggcgagagcctgctgggcacccagctgctggtggatgtggtgacggggcagcttggggacgaaggggagcagtgcagcgccgcccacgtctcccgggttatcctcgctggcaacctcctcagccacagcacccagagcagggattctatcaataaggccaaatacctcaccaagaaaacccaggcagccagcgtggaggctgttaagatgctggatgagatcctcctgcagctgagcgcctcagtgcccgtggacgtgatgccaggcgagtttgatcccaccaattacacgctcccccagcagcccctccacccctgcatgttcccgctggccactgcctactccacgctccagctggtcaccaacccctaccaggccaccattgatggagtcagatttttggggacatcaggacagaacgtgagtgacattttccgatacagcagcatggaggatcacttggagatcctggagtggaccctgcgggtccgtcacatcagccccacagcccctgacactctaggttgttaccccttctacaaaactgacccgttcatcttcccagagtgcccgcatgtctacttttgtggcaacacccccagctttggctccaaaatcatccgaggtcctgaggaccagacagtgctgttggtgactgtccctgacttcagtgccacgcagaccgcctgccttgtgaacctgcgcagcctggcctgccagcccatcagcttctcgggcttcggggcagaggacgatgacctgggaggcctggggctgggcccctgactcaaaaaagtggttttgaccagagaggcccagatggaggctgttcattccctgcagtgtcggcattgtaaataaagcctgagcacttgctgatgcga

SEQ ID NO: 303288 - DNA, 2168 bp, Homo sapiens
  misc_feature (1707)..(1707): n is a, c, g, or t
aggccgtgggtaaatcggccgagggggattggcgggatgcggcgcgccgcgcgtgaacctccttggcctgggcgaagctgtgtggaccaagcaagtcaggagtgtggccatgttttctgagcaggctgcccagagggcccacactctactgtccccaccatcagccaacaatgccacctttgcccgggtgccagtggcaacctacaccaactcctcacaacccttccggctaggagagcgcagctttagccggcagtatgcccacatttatgccacccgcctcatccaaatgagacccttcctggagaaccgggcccagcagcactggggcagtggagtgggagtgaagaagctgtgtgaactgcagcctgaggagaagtgctgtgtggtgggcactctgttcaaggccatgccgctgcagccctccatcctgcgggaggtcagcgaggagcacaacctgctcccccagcctcctcggagtaaatacatacacccagatgacgagctggtcttggaagatgaactgcagcgtatcaaactaaaaggcaccattgacgtgtcaaagctggttacggggactgtcctggctgtgtttggctccgtgagagacgacgggaagtttctggtggaggactattgctttgctgaccttgctccccagaagcccgcacccccacttgacacagataggtttgtgctactggtgtccggcctgggcctgggtggcggtggaggcgagagcctgctgggcacccagctgctggtggatgtggtgacggggcagcttggggacgaaggggagcagtgcagcgccgcccacgtctcccgggttatcctcgctggcaacctcctcagccacagcacccagagcagggattctatcaataaggccaaatacctcaccaagaaaacccaggcagccagcgtggaggctgttaagatgctggatgagatcctcctgcagctgagcgcctcagtgcccgtggacgtgatgccaggcgagtttgatcccaccaattacacgctcccccagcagcccctccacccctgcatgttcccgctggccactgcctactccacgctccagctggtcaccaacccctaccaggccaccattgatggagtcagatttttggggacatcaggacagaacgtgagtgacattttccgatacagcagcatggaggatcacttggagatcctggagtggaccctgcgggtccgtcacatcagccccacagcccctgacactctaggttgttaccccttctacaaaactgacccgttcatcttcccagagtgcccgcatgtctacttttgtggcaacacccccagctttggctccaaaatcatccgaggtcctgaggaccagacagtgctgttggtgactgtccctgacttcagtgccacgcagaccgcctgccttgtgaacctgcgcagcctggcctgccagcccatcagcttctcgggcttcggggcagaggacgatgacctgggaggcctggggctgggcccctgactcaaaaaagtggttttgaccagagaggcccagatggaggctgttcattccctgcagtgtcggcattgtaaataaagcctgagcacttgctgatgcgaaaaaaaaaagtgccttcccctcccgggcccaggctccccgtgcgcgggccctgccctttcctcccgagccccaccggatccgacgcgcanacccgctcagcagtcacagaagcagggccagccacctgggtcttaacgaggagtccagggagtagggagaatgttcttcccggcaacatacctacgctaatactggtctggaaagggaatcttccatactggacaagttccaataatttccaaccgtggttcaaaagtggaatttggtcccattccaaccttcaacaaggagaagccttcccagcgccataagatcgggaaccgcgggaaaacccgcttcgtagaaccccagtattgaataccccgggaagaagcgcggtcaccgcaaacgaccacagactacatatcaggaagtggagacaccccacaagcaacgcgtgtgacatgacgaacgactacacagtatcacaattagacgacagcgcggatgacacaatcggcaagacaacaccactgatcacacagcttctaaccaagaagacgttacatcc

SEQ ID NO: 303289 - DNA, 1771 bp, Homo sapiens
ccacgcgtccgggcgggatgcggcgcgccgcgcgggtgagacatcggtatccaggcacgataaatttccaagtggacacaatgtctggtgtcaactacagctgttctccttcttttcccagtatcctttgggtgcagtgagacaccaggagagctgctgctttgggggatggacaggggcagcaggaatgcctttgtgttttcgcagtgaacctccttggcctgggcgaagctgtgtggaccaagcaagtcaggagtgtggccatgttttctgagcaggctgcccagagggcccacactctactgtccccaccatcagccaacaatgccacctttgcccgggtgccagtggcaacctacaccaactcctcacaacccttccggctaggagagcgcagctttagccggcagtatgcccacatttatgccacccgcctcatccaaatgagacccttcctggagaaccgggcccagcagcactggggcagtggagtgggagtgaagaagctgtgtgaactgcagcctgaggagaagtgctgtgtggtgggcactctgttcaaggccatgccgctgcagccctccatcctgcgggaggtcagcgaggagcacaacctgctcccccagcctcctcggagtaaatacatacacccagatgacgagctggtcttggaagatgaactgcagcgtatcaaactaaaaggcaccattgacgtgtcaaagctggttacggggactgtcctggctgtgtttggctccgtgagagacgacgggaagtttctggtggaggactattgctttgctgaccttgctccccagaagcccgcacccccacttgacacagataggtttgtgctactggtgtccggcctgggcctgggtggcggtggaggcgagagcctgctgggcacccagctgctggtggatgtggtgacggggcagcttggggacgaaggggagcagtgcagcgccgcccacgtctcccgggttatcctcgctggcaacctcctcagccacagcacccagagcagggattctatcaataaggccaaatacctcaccaagaaaacccaggcagccagcgtggaggctgttaagatgctggatgagatcctcctgcagctgagcgcctcagtgcccgtggacgtgatgccaggcgagtttgatcccaccaattacacgctcccccagcagcccctccacccctgcatgttcccgctggccactgcctactccacgctccagctggtcaccaacccctaccaggccaccattgatggagtcagatttttggggacatcaggacagaacgtgagtgacattttccgatacagcagcatggaggatcacttggagatcctggagtggaccctgcgggtccgtcacatcagccccacagcccctgacactctaggttgttaccccttctacaaaactgacccgttcatcttcccagagtgcccgcatgtctacttttgtggcaacacccccagctttggctccaaaatcatccgaggtcctgaggaccagacagtgctgttggtgactgtccctgacttcagtgccacgcagaccgcctgccttgtgaacctgcgcagcctggcctgccagcccatcagcttctcgggcttcggggcagaggacgatgacctgggaggcctggggctgggcccctgactcaaaaaagtggttttgaccagagaggcccagatggaggctgttcattccctgcagtgtcggcattgtaaataaagcctgagcacttgctgatgcga

SEQ ID NO: 303290 - DNA, 1762 bp, Homo sapiens
cttgtctggaaatgagacaggtgccggagagctggatggaggcagatcgggaattccatttggggcaaactgaacttgattgagaccctggtagttgtccagatggaacaggacacctgagtctagggttcgggaagaactccagatgggacaaacactcctagctttccttttctctttttggatgaccgctacaggtgaacctccttggcctgggcgaagctgtgtggaccaagcaagtcaggagtgtggccatgttttctgagcaggctgcccagagggcccacactctactgtccccaccatcagccaacaatgccacctttgcccgggtgccagtggcaacctacaccaactcctcacaacccttccggctaggagagcgcagctttagccggcagtatgcccacatttatgccacccgcctcatccaaatgagacccttcctggagaaccgggcccagcagcactggggcagtggagtgggagtgaagaagctgtgtgaactgcagcctgaggagaagtgctgtgtggtgggcactctgttcaaggccatgccgctgcagccctccatcctgcgggaggtcagcgaggagcacaacctgctcccccagcctcctcggagtaaatacatacacccagatgacgagctggtcttggaagatgaactgcagcgtatcaaactaaaaggcaccattgacgtgtcaaagctggttacggggactgtcctggctgtgtttggctccgtgagagacgacgggaagtttctggtggaggactattgctttgctgaccttgctccccagaagcccgcacccccacttgacacagataggtttgtgctactggtgtccggcctgggcctgggtggcggtggaggcgagagcctgctgggcacccagctgctggtggatgtggtgacggggcagcttggggacgaaggggagcagtgcagcgccgcccacgtctcccgggttatcctcgctggcaacctcctcagccacagcacccagagcagggattctatcaataaggccaaatacctcaccaagaaaacccaggcagccagcgtggaggctgttaagatgctggatgagatcctcctgcagctgagcgcctcagtgcccgtggacgtgatgccaggcgagtttgatcccaccaattacacgctcccccagcagcccctccacccctgcatgttcccgctggccactgcctactccacgctccagctggtcaccaacccctaccaggccaccattgatggagtcagatttttggggacatcaggacagaacgtgagtgacattttccgatacagcagcatggaggatcacttggagatcctggagtggaccctgcgggtccgtcacatcagccccacagcccctgacactctaggttgttaccccttctacaaaactgacccgttcatcttcccagagtgcccgcatgtctacttttgtggcaacacccccagctttggctccaaaatcatccgaggtcctgaggaccagacagtgctgttggtgactgtccctgacttcagtgccacgcagaccgcctgccttgtgaacctgcgcagcctggcctgccagcccatcagcttctcgggcttcggggcagaggacgatgacctgggaggcctggggctgggcccctgactcaaaaaagtggttttgaccagagaggcccagatggaggctgttcattccctgcagtgtcggcattgtaaataaagcctgagcacttgctgatgcga

SEQ ID NO: 303291 - DNA, 2432 bp, Homo sapiens
agcgggagttgcggcgatgggcggggcaggcgcgcggggattggcgggatgcggcgcgccgcgcggtgagtggggtccagggaaacggggtcagctgggggtggcagttccaggccgcgaggccgggctcctgggtcggtgggctggtgtcttggcggacgtcccgcagctgccgcgtggatccgagccggggcacccgccgtgactgggacagcccccagggcgctctcggccccatcccgagtagcgcggcctggctgctgccgccatcaagcacgttcgagccaaaagctcctaacgagtcactcgttagacacgtgtgcggagcctgtgtcccaggccagtgctgtcccgtggagatagattgcaagccgctagggaattttttaactttctagtaggtgtacgaaaaaagtaaaacgaaacaaatcaattggagtaaatccataaatatattcaaactattatttcaattgtatgtgaaaacaattattgggatattctttgtactattcttagaaatccattgtgtgtccaacccaaacatcacagttggactcaccacatctcctgtacttcgtagccctaggtggctagtggcataagacacaaaaatctcagctctcctggagcttatggtctagttggagcaggcagacaatacatttaaaatatacagtttgttagaaggtgccggagagctggatggaggcagatcgggaattccatttggggcaaactgaacttgattgagaccctggtagttgtccagatggaacaggacacctgagtctagggttcgggaagaactccagatgggacaaacactcctagctttccttttctctttttggatgaccgctacaggtgaacctccttggcctgggcgaagctgtgtggaccaagcaagtcaggagtgtggccatgttttctgagcaggctgcccagagggcccacactctactgtccccaccatcagccaacaatgccacctttgcccgggtgccagtggcaacctacaccaactcctcacaacccttccggctaggagagcgcagctttagccggcagtatgcccacatttatgccacccgcctcatccaaatgagacccttcctggagaaccgggcccagcagcactggggcagtggagtgggagtgaagaagctgtgtgaactgcagcctgaggagaagtgctgtgtggtgggcactctgttcaaggccatgccgctgcagccctccatcctgcgggaggtcagcgaggagcacaacctgctcccccagcctcctcggagtaaatacatacacccagatgacgagctggtcttggaagatgaactgcagcgtatcaaactaaaaggcaccattgacgtgtcaaagctggttacggggactgtcctggctgtgtttggctccgtgagagacgacgggaagtttctggtggaggactattgctttgctgaccttgctccccagaagcccgcacccccacttgacacagataggtttgtgctactggtgtccggcctgggcctgggtggcggtggaggcgagagcctgctgggcacccagctgctggtggatgtggtgacggggcagcttggggacgaaggggagcagtgcagcgccgcccacgtctcccgggttatcctcgctggcaacctcctcagccacagcacccagagcagggattctatcaataaggccaaatacctcaccaagaaaacccaggcagccagcgtggaggctgttaagatgctggatgagatcctcctgcagctgagcgcctcagtgcccgtggacgtgatgccaggcgagtttgatcccaccaattacacgctcccccagcagcccctccacccctgcatgttcccgctggccactgcctactccacgctccagctggtcaccaacccctaccaggccaccattgatggagtcagatttttggggacatcaggacagaacgtgagtgacattttccgatacagcagcatggaggatcacttggagatcctggagtggaccctgcgggtccgtcacatcagccccacagcccctgacactctaggttgttaccccttctacaaaactgacccgttcatcttcccagagtgcccgcatgtctacttttgtggcaacacccccagctttggctccaaaatcatccgaggtcctgaggaccagacagtgctgttggtgactgtccctgacttcagtgccacgcagaccgcctgccttgtgaacctgcgcagcctggcctgccagcccatcagcttctcgggcttcggggcagaggacgatgacctgggaggcctggggctgggcccctgactcaaaaaagtggttttgaccagagaggcccagatggaggctgttcattccctgcagtgtcggcattgtaaataaagcctgagcacttgctgatgcga

SEQ ID NO: 303292 - DNA, 1629 bp, Homo sapiens
agcgggagttgcggcgatgggcggggcaggcgcgcggggattggcgggatgcggcgcgccgcgcgtgaacctccttggcctgggcgaagctgtgtggaccaagcaagtcaggagtgtggccatgttttctgagcaggctgcccagagggcccacactctactgtccccaccatcagccaacaatgccacctttgcccgggtgccagtggcaacctacaccaactcctcacaacccttccggctaggagagcgcagctttagccggcagtatgcccacatttatgccacccgcctcatccaaatgagacccttcctggagaaccgggcccagcagcactggggcagtggagtgggagtgaagaagctgtgtgaactgcagcctgaggagaagtgctgtgtggtgggcactctgttcaaggccatgccgctgcagccctccatcctgcgggaggtcagcgaggagcacaacctgctcccccagcctcctcggagtaaatacatacacccagatgacgagctggtcttggaagatgaactgcagcgtatcaaactaaaaggcaccattgacgtgtcaaagctggttacggggactgtcctggctgtgtttggctccgtgagagacgacgggaagtttctggtggaggactattgctttgctgaccttgctccccagaagcccgcacccccacttgacacagataggtttgtgctactggtgtccggcctgggcctgggtggcggtggaggcgagagcctgctgggcacccagctgctggtggatgtggtgacggggcagcttggggacgaaggggagcagtgcagcgccgcccacgtctcccgggttatcctcgctggcaacctcctcagccacagcacccagagcagggattctatcaataaggccaaatacctcaccaagaaaacccaggcagccagcgtggaggctgttaagatgctggatgagatcctcctgcagctgagcgcctcagtgcccgtggacgtgatgccaggcgagtttgatcccaccaattacacgctcccccagcagcccctccacccctgcatgttcccgctggccactgcctactccacgctccagctggtcaccaacccctaccaggccaccattgatggagtcagatttttggggacatcaggacagaacgtgagtgacattttccgatacagcagcatggaggatcacttggagatcctggagtggaccctgcgggtccgtcacatcagccccacagcccctgacactctaggttgttaccccttctacaaaactgacccgttcatcttcccagagtgcccgcatgtctacttttgtggcaacacccccagctttggctccaaaatcatccgaggtcctgaggaccagacagtgctgttggtgactgtccctgacttcagtgccacgcagaccgcctgccttgtgaacctgcgcagcctggcctgccagcccatcagcttctcgggcttcggggcagaggacgatgacctgggaggcctggggctgggcccctgactcaaaaaagtggttttgaccagagaggcccagatggaggctgttcattccctgcagtgtcggcattgtaaataaagcctgagcacttgctgatgcga

SEQ ID NO: 303293 - DNA, 1716 bp, Homo sapiens
agcgggagttgcggcgatgggcggggcaggcgcgcggggattggcgggatgcggcgcgccgcgcggtatcctttgggtgcagtgagacaccaggagagctgctgctttgggggatggacaggggcagcaggaatgcctttgtgttttcgcagtgaacctccttggcctgggcgaagctgtgtggaccaagcaagtcaggagtgtggccatgttttctgagcaggctgcccagagggcccacactctactgtccccaccatcagccaacaatgccacctttgcccgggtgccagtggcaacctacaccaactcctcacaacccttccggctaggagagcgcagctttagccggcagtatgcccacatttatgccacccgcctcatccaaatgagacccttcctggagaaccgggcccagcagcactggggcagtggagtgggagtgaagaagctgtgtgaactgcagcctgaggagaagtgctgtgtggtgggcactctgttcaaggccatgccgctgcagccctccatcctgcgggaggtcagcgaggagcacaacctgctcccccagcctcctcggagtaaatacatacacccagatgacgagctggtcttggaagatgaactgcagcgtatcaaactaaaaggcaccattgacgtgtcaaagctggttacggggactgtcctggctgtgtttggctccgtgagagacgacgggaagtttctggtggaggactattgctttgctgaccttgctccccagaagcccgcacccccacttgacacagataggtttgtgctactggtgtccggcctgggcctgggtggcggtggaggcgagagcctgctgggcacccagctgctggtggatgtggtgacggggcagcttggggacgaaggggagcagtgcagcgccgcccacgtctcccgggttatcctcgctggcaacctcctcagccacagcacccagagcagggattctatcaataaggccaaatacctcaccaagaaaacccaggcagccagcgtggaggctgttaagatgctggatgagatcctcctgcagctgagcgcctcagtgcccgtggacgtgatgccaggcgagtttgatcccaccaattacacgctcccccagcagcccctccacccctgcatgttcccgctggccactgcctactccacgctccagctggtcaccaacccctaccaggccaccattgatggagtcagatttttggggacatcaggacagaacgtgagtgacattttccgatacagcagcatggaggatcacttggagatcctggagtggaccctgcgggtccgtcacatcagccccacagcccctgacactctaggttgttaccccttctacaaaactgacccgttcatcttcccagagtgcccgcatgtctacttttgtggcaacacccccagctttggctccaaaatcatccgaggtcctgaggaccagacagtgctgttggtgactgtccctgacttcagtgccacgcagaccgcctgccttgtgaacctgcgcagcctggcctgccagcccatcagcttctcgggcttcggggcagaggacgatgacctgggaggcctggggctgggcccctgactcaaaaaagtggttttgaccagagaggcccagatggaggctgttcattccctgcagtgtcggcattgtaaataaagcctgagcacttgctgatgcga

SEQ ID NO: 303294 - DNA, 1623 bp, Homo sapiens
aggccgtgggtaaatcggccgagggggattggcgggatgcggcgcgccgcgcgtgaacctccttggcctgggcgaagctgtgtggaccaagcaagtcaggagtgtggccatgttttctgagcaggctgcccagagggcccacactctactgtccccaccatcagccaacaatgccacctttgcccgggtgccagtggcaacctacaccaactcctcacaacccttccggctaggagagcgcagctttagccggcagtatgcccacatttatgccacccgcctcatccaaatgagacccttcctggagaaccgggcccagcagcactggggcagtggagtgggagtgaagaagctgtgtgaactgcagcctgaggagaagtgctgtgtggtgggcactctgttcaaggccatgccgctgcagccctccatcctgcgggaggtcagcgaggagcacaacctgctcccccagcctcctcggagtaaatacatacacccagatgacgagctggtcttggaagatgaactgcagcgtatcaaactaaaaggcaccattgacgtgtcaaagctggttacggggactgtcctggctgtgtttggctccgtgagagacgacgggaagtttctggtggaggactattgctttgctgaccttgctccccagaagcccgcacccccacttgacacagataggtttgtgctactggtgtccggcctgggcctgggtggcggtggaggcgagagcctgctgggcacccagctgctggtggatgtggtgacggggcagcttggggacgaaggggagcagtgcagcgccgcccacgtctcccgggttatcctcgctggcaacctcctcagccacagcacccagagcagggattctatcaataaggccaaatacctcaccaagaaaacccaggcagccagcgtggaggctgttaagatgctggatgagatcctcctgcagctgagcgcctcagtgcccgtggacgtgatgccaggcgagtttgatcccaccaattacacgctcccccagcagcccctccacccctgcatgttcccgctggccactgcctactccacgctccagctggtcaccaacccctaccaggccaccattgatggagtcagagtcagatttttggggacatcaggacagaacgtgagtgacattttccgatacagcagcatggaggatcacttggagatcctggagtggaccctgcgggtccgtcacatcagccccacagcccctgacactctaggttgttaccccttctacaaaactgacccgttcatcttcccagagtgcccgcatgtctacttttgtggcaacacccccagctttggctccaaaatcatccgaggtcctgaggaccagacagtgctgttggtgactgtccctgacttcagtgccacgcagaccgcctgccttgtgaacctgcgcagcctggcctgccagcccatcagcttctcgggcttcggggcagaggacgatgacctgggaggcctggggctgggcccctgactcaaaaaagtggttttgaccagagaggcccagatggaggctgttcattccctgcagtgtcggcattgtaaataaagcctgagcacttgctgatgcga

SEQ ID NO: 303295 - DNA, 1878 bp, Homo sapiens
ctgatacggtccgcaatccctgttgaggcgggatgcggcgcgccgcgcggtgccggagagctggatggaggcagatcgggaattccatttggggcaaactgaacttgattgagaccctggtagttgtccagatggaacaggacacctgagtctagggttcgggaagaactccagatgggacaaacactcctagctttccttttctctttttggatgaccgctacagggtatcctttgggtgcagtgagacaccaggagagctgctgctttgggggatggacaggggcagcaggaatgcctttgtgttttcgcagtgaacctccttggcctgggcgaagctgtgtggaccaagcaagtcaggagtgtggccatgttttctgagcaggctgcccagagggcccacactctactgtccccaccatcagccaacaatgccacctttgcccgggtgccagtggcaacctacaccaactcctcacaacccttccggctaggagagcgcagctttagccggcagtatgcccacatttatgccacccgcctcatccaaatgagacccttcctggagaaccgggcccagcagcactggggcagtggagtgggagtgaagaagctgtgtgaactgcagcctgaggagaagtgctgtgtggtgggcactctgttcaaggccatgccgctgcagccctccatcctgcgggaggtcagcgaggagcacaacctgctcccccagcctcctcggagtaaatacatacacccagatgacgagctggtcttggaagatgaactgcagcgtatcaaactaaaaggcaccattgacgtgtcaaagctggttacggggactgtcctggctgtgtttggctccgtgagagacgacgggaagtttctggtggaggactattgctttgctgaccttgctccccagaagcccgcacccccacttgacacagataggtttgtgctactggtgtccggcctgggcctgggtggcggtggaggcgagagcctgctgggcacccagctgctggtggatgtggtgacggggcagcttggggacgaaggggagcagtgcagcgccgcccacgtctcccgggttatcctcgctggcaacctcctcagccacagcacccagagcagggattctatcaataaggccaaatacctcaccaagaaaacccaggcagccagcgtggaggctgttaagatgctggatgagatcctcctgcagctgagcgcctcagtgcccgtggacgtgatgccaggcgagtttgatcccaccaattacacgctcccccagcagcccctccacccctgcatgttcccgctggccactgcctactccacgctccagctggtcaccaacccctaccaggccaccattgatggagtcagatttttggggacatcaggacagaacgtgagtgacattttccgatacagcagcatggaggatcacttggagatcctggagtggaccctgcgggtccgtcacatcagccccacagcccctgacactctaggttgttaccccttctacaaaactgacccgttcatcttcccagagtgcccgcatgtctacttttgtggcaacacccccagctttggctccaaaatcatccgaggtcctgaggaccagacagtgctgttggtgactgtccctgacttcagtgccacgcagaccgcctgccttgtgaacctgcgcagcctggcctgccagcccatcagcttctcgggcttcggggcagaggacgatgacctgggaggcctggggctgggcccctgactcaaaaaagtggttttgaccagagaggcccagatggaggctgttcattccctgcagtgtcggcattgtaaataaagcctgagcacttgctgatgcga

SEQ ID NO: 303296 - DNA, 1591 bp, Homo sapiens
cccgggggttatgggaggggggcggcgtgaacctccttggcctgggcgaagctgtgtggaccaagcaagtcaggagtgtggccatgttttctgagcaggctgcccagagggcccacactctactgtccccaccatcagccaacaatgccacctttgcccgggtgccagtggcaacctacaccaactcctcacaacccttccggctaggagagcgcagctttagccggcagtatgcccacatttatgccacccgcctcatccaaatgagacccttcctggagaaccgggcccagcagcactggggcagtggagtgggagtgaagaagctgtgtgaactgcagcctgaggagaagtgctgtgtggtgggcactctgttcaaggccatgccgctgcagccctccatcctgcgggaggtcagcgaggagcacaacctgctcccccagcctcctcggagtaaatacatacacccagatgacgagctggtcttggaagatgaactgcagcgtatcaaactaaaaggcaccattgacgtgtcaaagctggttacggggactgtcctggctgtgtttggctccgtgagagacgacgggaagtttctggtggaggactattgctttgctgaccttgctccccagaagcccgcacccccacttgacacagataggtttgtgctactggtgtccggcctgggcctgggtggcggtggaggcgagagcctgctgggcacccagctgctggtggatgtggtgacggggcagcttggggacgaaggggagcagtgcagcgccgcccacgtctcccgggttatcctcgctggcaacctcctcagccacagcacccagagcagggattctatcaataaggccaaatacctcaccaagaaaacccaggcagccagcgtggaggctgttaagatgctggatgagatcctcctgcagctgagcgcctcagtgcccgtggacgtgatgccaggcgagtttgatcccaccaattacacgctcccccagcagcccctccacccctgcatgttcccgctggccactgcctactccacgctccagctggtcaccaacccctaccaggccaccattgatggagtcagatttttggggacatcaggacagaacgtgagtgacattttccgatacagcagcatggaggatcacttggagatcctggagtggaccctgcgggtccgtcacatcagccccacagcccctgacactctaggttgttaccccttctacaaaactgacccgttcatcttcccagagtgcccgcatgtctacttttgtggcaacacccccagctttggctccaaaatcatccgaggtcctgaggaccagacagtgctgttggtgactgtccctgacttcagtgccacgcagaccgcctgccttgtgaacctgcgcagcctggcctgccagcccatcagcttctcgggcttcggggcagaggacgatgacctgggaggcctggggctgggcccctgactcaaaaaagtggttttgaccagagaggcccagatggaggctgttcattccctgcagtgtcggcattgtaaataaagcctgagcacttgctgatgcga

SEQ ID NO: 303297 - DNA, 1601 bp, Homo sapiens
ggacgcgtgggtcgacccacgcgtcgcgcgccgcgcgtgaacctccttggcctgggcgaagctgtgtggaccaagcaagtcaggagtgtggccatgttttctgagcaggctgcccagagggcccacactctactgtccccaccatcagccaacaatgccacctttgcccgggtgccagtggcaacctacaccaactcctcacaacccttccggctaggagagcgcagctttagccggcagtatgcccacatttatgccacccgcctcatccaaatgagacccttcctggagaaccgggcccagcagcactggggcagtggagtgggagtgaagaagctgtgtgaactgcagcctgaggagaagtgctgtgtggtgggcactctgttcaaggccatgccgctgcagccctccatcctgcgggaggtcagcgaggagcacaacctgctcccccagcctcctcggagtaaatacatacacccagatgacgagctggtcttggaagatgaactgcagcgtatcaaactaaaaggcaccattgacgtgtcaaagctggttacggggactgtcctggctgtgtttggctccgtgagagacgacgggaagtttctggtggaggactattgctttgctgaccttgctccccagaagcccgcacccccacttgacacagataggtttgtgctactggtgtccggcctgggcctgggtggcggtggaggcgagagcctgctgggcacccagctgctggtggatgtggtgacggggcagcttggggacgaaggggagcagtgcagcgccgcccacgtctcccgggttatcctcgctggcaacctcctcagccacagcacccagagcagggattctatcaataaggccaaatacctcaccaagaaaacccaggcagccagcgtggaggctgttaagatgctggatgagatcctcctgcagctgagcgcctcagtgcccgtggacgtgatgccaggcgagtttgatcccaccaattacacgctcccccagcagcccctccacccctgcatgttcccgctggccactgcctactccacgctccagctggtcaccaacccctaccaggccaccattgatggagtcagatttttggggacatcaggacagaacgtgagtgacattttccgatacagcagcatggaggatcacttggagatcctggagtggaccctgcgggtccgtcacatcagccccacagcccctgacactctaggttgttaccccttctacaaaactgacccgttcatcttcccagagtgcccgcatgtctacttttgtggcaacacccccagctttggctccaaaatcatccgaggtcctgaggaccagacagtgctgttggtgactgtccctgacttcagtgccacgcagaccgcctgccttgtgaacctgcgcagcctggcctgccagcccatcagcttctcgggcttcggggcagaggacgatgacctgggaggcctggggctgggcccctgactcaaaaaagtggttttgaccagagaggcccagatggaggctgttcattccctgcagtgtcggcattgtaaataaagcctgagcacttgctgatgcga

SEQ ID NO: 303298 - DNA, 2385 bp, Homo sapiens
agcgggagttgcggcgatgggcggggcaggcgcgcggggattggcgggatgcggcgcgccgcgcggtgagtggggtccagggaaacggggtcagctgggggtggcagttccaggccgcgaggccgggctcctgggtcggtgggctggtgtcttggcggacgtcccgcagctgccgcgtggatccgagccggggcacccgccgtgactgggacagcccccagggcgctctcggccccatcccgagtagcgcggcctggctgctgccgccatcaagcacgttcgagccaaaagctcctaacgagtcactcgttagacacgtgtgcggagcctgtgtcccaggccagtgctgtcccgtggagatagattgcaagccgctagggaattttttaactttctagtaggtgtacgaaaaaagtaaaacgaaacaaatcaattggagtaaatccataaatatattcaaactattatttcaattgtatgtgaaaacaattattgggatattctttgtactattcttagaaatccattgtgtgtccaacccaaacatcacagttggactcaccacatctcctgtacttcgtagccctaggtggctagtggcataagacacaaaaatctcagctctcctggagcttatggtctagttggagcaggcagacaatacatttaaaatatacagtttgttagaaggtaaatgttgtaaacaacaataacagttgaagtactggggagagttgcagttgtagaatcagatgggcagggcacaaggtaacatttgagtaaagatgtcagaacttgaaggagatgggcaagtgagctcttgaacctccttggcctgggcgaagctgtgtggaccaagcaagtcaggagtgtggccatgttttctgagcaggctgcccagagggcccacactctactgtccccaccatcagccaacaatgccacctttgcccgggtgccagtggcaacctacaccaactcctcacaacccttccggctaggagagcgcagctttagccggcagtatgcccacatttatgccacccgcctcatccaaatgagacccttcctggagaaccgggcccagcagcactggggcagtggagtgggagtgaagaagctgtgtgaactgcagcctgaggagaagtgctgtgtggtgggcactctgttcaaggccatgccgctgcagccctccatcctgcgggaggtcagcgaggagcacaacctgctcccccagcctcctcggagtaaatacatacacccagatgacgagctggtcttggaagatgaactgcagcgtatcaaactaaaaggcaccattgacgtgtcaaagctggttacggggactgtcctggctgtgtttggctccgtgagagacgacgggaagtttctggtggaggactattgctttgctgaccttgctccccagaagcccgcacccccacttgacacagataggtttgtgctactggtgtccggcctgggcctgggtggcggtggaggcgagagcctgctgggcacccagctgctggtggatgtggtgacggggcagcttggggacgaaggggagcagtgcagcgccgcccacgtctcccgggttatcctcgctggcaacctcctcagccacagcacccagagcagggattctatcaataaggccaaatacctcaccaagaaaacccaggcagccagcgtggaggctgttaagatgctggatgagatcctcctgcagctgagcgcctcagtgcccgtggacgtgatgccaggcgagtttgatcccaccaattacacgctcccccagcagcccctccacccctgcatgttcccgctggccactgcctactccacgctccagctggtcaccaacccctaccaggccaccattgatggagtcagatttttggggacatcaggacagaacgtgagtgacattttccgatacagcagcatggaggatcacttggagatcctggagtggaccctgcgggtccgtcacatcagccccacagcccctgacactctaggttgttaccccttctacaaaactgacccgttcatcttcccagagtgcccgcatgtctacttttgtggcaacacccccagctttggctccaaaatcatccgaggtcctgaggaccagacagtgctgttggtgactgtccctgacttcagtgccacgcagaccgcctgccttgtgaacctgcgcagcctggcctgccagcccatcagcttctcgggcttcggggcagaggacgatgacctgggaggcctggggctgggcccctgactcaaaaaagtggttttgaccagagaggcccagatggaggctgttcattccctgcagtgtcggcattgtaaataaagcctgagcacttgctgatgcga

SEQ ID NO: 303299 - DNA, 1649 bp, Homo sapiens
tctctgggcgtcccagggactgggcgcacagtggtcggcgggatgaggcgcctggtgacggacggggcgaggagggcagcgattgtgaacctccttggcctgggcgaagctgtgtggaccaagcaagtcaggagtgtggccatgttttctgagcaggctgcccagagggcccacactctactgtccccaccatcagccaacaatgccacctttgcccgggtgccagtggcaacctacaccaactcctcacaacccttccggctaggagagcgcagctttagccggcagtatgcccacatttatgccacccgcctcatccaaatgagacccttcctggagaaccgggcccagcagcactggggcagtggagtgggagtgaagaagctgtgtgaactgcagcctgaggagaagtgctgtgtggtgggcactctgttcaaggccatgccgctgcagccctccatcctgcgggaggtcagcgaggagcacaacctgctcccccagcctcctcggagtaaatacatacacccagatgacgagctggtcttggaagatgaactgcagcgtatcaaactaaaaggcaccattgacgtgtcaaagctggttacggggactgtcctggctgtgtttggctccgtgagagacgacgggaagtttctggtggaggactattgctttgctgaccttgctccccagaagcccgcacccccacttgacacagataggtttgtgctactggtgtccggcctgggcctgggtggcggtggaggcgagagcctgctgggcacccagctgctggtggatgtggtgacggggcagcttggggacgaaggggagcagtgcagcgccgcccacgtctcccgggttatcctcgctggcaacctcctcagccacagcacccagagcagggattctatcaataaggccaaatacctcaccaagaaaacccaggcagccagcgtggaggctgttaagatgctggatgagatcctcctgcagctgagcgcctcagtgcccgtggacgtgatgccaggcgagtttgatcccaccaattacacgctcccccagcagcccctccacccctgcatgttcccgctggccactgcctactccacgctccagctggtcaccaacccctaccaggccaccattgatggagtcagatttttggggacatcaggacagaacgtgagtgacattttccgatacagcagcatggaggatcacttggagatcctggagtggaccctgcgggtccgtcacatcagccccacagcccctgacactctaggttgttaccccttctacaaaactgacccgttcatcttcccagagtgcccgcatgtctacttttgtggcaacacccccagctttggctccaaaatcatccgaggtcctgaggaccagacagtgctgttggtgactgtccctgacttcagtgccacgcagaccgcctgccttgtgaacctgcgcagcctggcctgccagcccatcagcttctcgggcttcggggcagaggacgatgacctgggaggcctggggctgggcccctgactcaaaaaagtggttttgaccagagaggcccagatggaggctgttcattccctgcagtgtcggcattgtaaataaagcctgagcacttgctgatgcga

SEQ ID NO: 303300 - DNA, 2254 bp, Homo sapiens
agcgggagttgcggcgatgggcggggcaggcgcgcggggattggcgggatgcggcgcgccgcgcggtgagtggggtccagggaaacggggtcagctgggggtggcagttccaggccgcgaggccgggctcctgggtcggtgggctggtgtcttggcggacgtcccgcagctgccgcgtggatccgagccggggcacccgccgtgactgggacagcccccagggcgctctcggccccatcccgagtagcgcggcctggctgctgccgccatcaagcacgttcgagccaaaagctcctaacgagtcactcgttagacacgtgtgcggagcctgtgtcccaggccagtgctgtcccgtggagatagattgcaagccgctagggaattttttaactttctagtaggtgtacgaaaaaagtaaaacgaaacaaatcaattggagtaaatccataaatatattcaaactattatttcaattgtatgtgaaaacaattattgggatattctttgtactattcttagaaatccattgtgtgtccaacccaaacatcacagttggactcaccacatctcctgtacttcgtagccctaggtggctagtggcataagacacaaaaatctcagctctcctggagcttatggtctagttggagcaggcagacaatacatttaaaatatacagtttgttagaagtgaacctccttggcctgggcgaagctgtgtggaccaagcaagtcaggagtgtggccatgttttctgagcaggctgcccagagggcccacactctactgtccccaccatcagccaacaatgccacctttgcccgggtgccagtggcaacctacaccaactcctcacaacccttccggctaggagagcgcagctttagccggcagtatgcccacatttatgccacccgcctcatccaaatgagacccttcctggagaaccgggcccagcagcactggggcagtggagtgggagtgaagaagctgtgtgaactgcagcctgaggagaagtgctgtgtggtgggcactctgttcaaggccatgccgctgcagccctccatcctgcgggaggtcagcgaggagcacaacctgctcccccagcctcctcggagtaaatacatacacccagatgacgagctggtcttggaagatgaactgcagcgtatcaaactaaaaggcaccattgacgtgtcaaagctggttacggggactgtcctggctgtgtttggctccgtgagagacgacgggaagtttctggtggaggactattgctttgctgaccttgctccccagaagcccgcacccccacttgacacagataggtttgtgctactggtgtccggcctgggcctgggtggcggtggaggcgagagcctgctgggcacccagctgctggtggatgtggtgacggggcagcttggggacgaaggggagcagtgcagcgccgcccacgtctcccgggttatcctcgctggcaacctcctcagccacagcacccagagcagggattctatcaataaggccaaatacctcaccaagaaaacccaggcagccagcgtggaggctgttaagatgctggatgagatcctcctgcagctgagcgcctcagtgcccgtggacgtgatgccaggcgagtttgatcccaccaattacacgctcccccagcagcccctccacccctgcatgttcccgctggccactgcctactccacgctccagctggtcaccaacccctaccaggccaccattgatggagtcagatttttggggacatcaggacagaacgtgagtgacattttccgatacagcagcatggaggatcacttggagatcctggagtggaccctgcgggtccgtcacatcagccccacagcccctgacactctaggttgttaccccttctacaaaactgacccgttcatcttcccagagtgcccgcatgtctacttttgtggcaacacccccagctttggctccaaaatcatccgaggtcctgaggaccagacagtgctgttggtgactgtccctgacttcagtgccacgcagaccgcctgccttgtgaacctgcgcagcctggcctgccagcccatcagcttctcgggcttcggggcagaggacgatgacctgggaggcctggggctgggcccctgactcaaaaaagtggttttgaccagagaggcccagatggaggctgttcattccctgcagtgtcggcattgtaaataaagcctgagcacttgctgatgcga

SEQ ID NO: 303301 - DNA, 1877 bp, Homo sapiens
ctgatacggtccgcaatccctgttgaggcgggatgcggcgcgccgcgcggtgccggagagctggatggaggcagatcgggaattccatttggggcaaactgaacttgattgagaccctggtagttgtccagatggaacaggacacctgagtctagggttcgggaagaactccagatgggacaaacactcctagctttccttttctctttttggatgaccgctacaggggtgagacatcggtatccaggcacgataaatttccaagtggacacaatgtctggtgtcaactacagctgttctccttcttttcccatgaacctccttggcctgggcgaagctgtgtggaccaagcaagtcaggagtgtggccatgttttctgagcaggctgcccagagggcccacactctactgtccccaccatcagccaacaatgccacctttgcccgggtgccagtggcaacctacaccaactcctcacaacccttccggctaggagagcgcagctttagccggcagtatgcccacatttatgccacccgcctcatccaaatgagacccttcctggagaaccgggcccagcagcactggggcagtggagtgggagtgaagaagctgtgtgaactgcagcctgaggagaagtgctgtgtggtgggcactctgttcaaggccatgccgctgcagccctccatcctgcgggaggtcagcgaggagcacaacctgctcccccagcctcctcggagtaaatacatacacccagatgacgagctggtcttggaagatgaactgcagcgtatcaaactaaaaggcaccattgacgtgtcaaagctggttacggggactgtcctggctgtgtttggctccgtgagagacgacgggaagtttctggtggaggactattgctttgctgaccttgctccccagaagcccgcacccccacttgacacagataggtttgtgctactggtgtccggcctgggcctgggtggcggtggaggcgagagcctgctgggcacccagctgctggtggatgtggtgacggggcagcttggggacgaaggggagcagtgcagcgccgcccacgtctcccgggttatcctcgctggcaacctcctcagccacagcacccagagcagggattctatcaataaggccaaatacctcaccaagaaaacccaggcagccagcgtggaggctgttaagatgctggatgagatcctcctgcagctgagcgcctcagtgcccgtggacgtgatgccaggcgagtttgatcccaccaattacacgctcccccagcagcccctccacccctgcatgttcccgctggccactgcctactccacgctccagctggtcaccaacccctaccaggccaccattgatggagtcagatttttggggacatcaggacagaacgtgagtgacattttccgatacagcagcatggaggatcacttggagatcctggagtggaccctgcgggtccgtcacatcagccccacagcccctgacactctaggttgttaccccttctacaaaactgacccgttcatcttcccagagtgcccgcatgtctacttttgtggcaacacccccagctttggctccaaaatcatccgaggtcctgaggaccagacagtgctgttggtgactgtccctgacttcagtgccacgcagaccgcctgccttgtgaacctgcgcagcctggcctgccagcccatcagcttctcgggcttcggggcagaggacgatgacctgggaggcctggggctgggcccctgactcaaaaaagtggttttgaccagagaggcccagatggaggctgttcattccctgcagtgtcggcattgtaaataaagcctgagcacttgctgatgcga

SEQ ID NO: 303302 - DNA, 1572 bp, Homo sapiens
aggccgtgggtaaatcggccgagggggattggcgggatgcggcgcgccgcgcgtgaacctccttggcctgggcgaagctgtgtggaccaagcaagtcaggagtgtggccatgttttctgagcaggctgcccagagggcccacactctactgtccccaccatcagccaacaatgccacctttgcccgggtgccagtggcaacctacaccaactcctcacaacccttccggctaggagagcgcagctttagccggcagtatgcccacatttatgccacccgcctcatccaaatgagacccttcctggagaaccgggcccagcagcactggggcagtggagtgggagtgaagaagctgtgtgaactgcagcctgaggagaagtgctgtgtggtgggcactctgttcaaggccatgccgctgcagccctccatcctgcgggaggtcagcgaggagcacaacctgctcccccagcctcctcggagtaaatacatacacccagatgacgagctggtcttggaagatgaactgcagcgtatcaaactaaaaggcaccattgacgtgtcaaagctggttacggggactgtcctggctgtgtttggctccgtgagagacgacgggaagtttctggtggaggactattgctttgctgaccttgctccccagaagcccgcacccccacttgacacagataggtttgtgctactggtgtccggcctgggcctgggtggcggtggaggcgagagcctgctgggcacccagctgctggtggatgtggtgacggggcagcttggggacgaaggggagcagtgcagcgccgcccacgtctcccgggttatcctcgctggcaacctcctcagccacagcacccagagcagggattctatcaataaggccaaatacctcaccaagaaaacccaggcagccagcgtggaggctgttaagatgctggatgagatcctcctgcagctgagcgcctcagtgcccgtggacgtgatgccaggcgagtttgatcccaccaattacacgctcccccagcagcccctccacccctgcatgttcccgctggccactgcctactccacgctccagctggtcaccaacccctaccaggccaccattgatggagtcagatttttggggacatcaggacagaacgtgagtgacattttccgatacagcagcatggaggatcacttggagatcctggagtggaccctgcgggtccgtcacatcagccccacagcccctgacactctaggcccgcatgtctacttttgtggcaacacccccagctttggctccaaaatcatccgaggtcctgaggaccagacagtgctgttggtgactgtccctgacttcagtgccacgcagaccgcctgccttgtgaacctgcgcagcctggcctgccagcccatcagcttctcgggcttcggggcagaggacgatgacctgggaggcctggggctgggcccctgactcaaaaaagtggttttgaccagagaggcccagatggaggctgttcattccctgcagtgtcggcattgtaaataaagcctgagcacttgctgatgcga

SEQ ID NO: 303303 - DNA, 1515 bp, Homo sapiens
aggccgtgggtaaatcggccgagggggattggcgggatgcggcgcgccgcgcgtgaacctccttggcctgggcgaagctgtgtggaccaagcaagtcaggagtgtggccatgttttctgagcaggctgcccagagggcccacactctactgtccccaccatcagccaacaatgccacctttgcccgggtgccagtggcaacctacaccaactcctcacaacccttccggctaggagagcgcagctttagccggcagtatgcccacatttatgccacccgcctcatccaaatgagacccttcctggagaaccgggcccagcagcactggggcagtggagtgggagtgaagaagctgtgtgaactgcagcctgaggagaagtgctgtgtggtgggcactctgttcaaggccatgccgctgcagccctccatcctgcgggaggtcagcgaggagcacaacctgctcccccagcctcctcggagtaaatacatacacccagatgacgagctggtcttggaagatgaactgcagcgtatcaaactaaaaggcaccattgacgtgtcaaagctggttacggggactgtcctggctgtgtttggctccgtgagagacgacgggaagtttctggtggaggactattgctttgctgaccttgctccccagaagcccgcacccccacttgacacagataggtttgtgctactggtgtccggcctgggcctgggtggcggtggaggcgagagcctgctgggcacccagctgctggtggatgtggtgacggggcagcttggggacgaaggggagcagtgcagcgccgcccacgtctcccgggttatcctcgctggcaacctcctcagccacagcacccagagcagggattctatcaataaggccaaatacctcaccaagaaaacccaggcagccagcgtggaggctgttaagatgctggatgagatcctcctgcagctgagcgcctcagtgcccgtggacgtgatgccaggcgagtttgatcccaccaattacacgctcccccagcagcccctccacccctgcatgttcccgctggccactgcctactccacgctccagctggtcaccaacccctaccaggccaccattgatggagtcagatttttggggacatcaggacagaacgtgagtgacattttccgatacagcagcatggaggatcacttggagatcctggagtggaccctgcgggtccgtcacatcagccccacagcccctgacactctaggtcctgaggaccagacagtgctgttggtgactgtccctgacttcagtgccacgcagaccgcctgccttgtgaacctgcgcagcctggcctgccagcccatcagcttctcgggcttcggggcagaggacgatgacctgggaggcctggggctgggcccctgactcaaaaaagtggttttgaccagagaggcccagatggaggctgttcattccctgcagtgtcggcattgtaaataaagcctgagcacttgctgatgcga

SEQ ID NO: 303304 - DNA, 1554 bp, Homo sapiens
aggccgtgggtaaatcggccgagggggattggcgggatgcggcgcgccgcgcgtgaacctccttggcctgggcgaagctgtgtggaccaagcaagtcaggagtgtggccatgttttctgagcaggctgcccagagggcccacactctactgtccccaccatcagccaacaatgccacctttgcccgggtgccagtggcaacctacaccaactcctcacaacccttccggctaggagagcgcagctttagccggcagtatgcccacatttatgccacccgcctcatccaaatgagacccttcctggagaaccgggcccagcagcactggggcagtggagtgggagtgaagaagctgtgtgaactgcagcctgaggagaagtgctgtgtggtgggcactctgttcaaggccatgccgctgcagccctccatcctgcgggaggtcagcgaggagcacaacctgctcccccagcctcctcggagtaaatacatacacccagatgacgagctggtcttggaagatgaactgcagcgtatcaaactaaaaggcaccattgacgtgtcaaagctggttacggggactgtcctggctgtgtttggctccgtgagagacgacgggaagtttctggtggaggactattgctttgctgaccttgctccccagaagcccgcacccccacttgacacagataggtttgtgctactggtgtccggcctgggcctgggtggcggtggaggcgagagcctgctgggcacccagctgctggtggatgtggtgacggggcagcttggggacgaaggggagcagtgcagcgccgcccacgtctcccgggttatcctcgctggcaacctcctcagccacagcacccagagcagggattctatcaataaggccaaatacctcaccaagaaaacccaggcagccagcgtggaggctgttaagatgctggatgagatcctcctgcagctgagccagcccctccacccctgcatgttcccgctggccactgcctactccacgctccagctggtcaccaacccctaccaggccaccattgatggagtcagatttttggggacatcaggacagaacgtgagtgacattttccgatacagcagcatggaggatcacttggagatcctggagtggaccctgcgggtccgtcacatcagccccacagcccctgacactctaggttgttaccccttctacaaaactgacccgttcatcttcccagagtgcccgcatgtctacttttgtggcaacacccccagctttggctccaaaatcatccgaggtcctgaggaccagacagtgctgttggtgactgtccctgacttcagtgccacgcagaccgcctgccttgtgaacctgcgcagcctggcctgccagcccatcagcttctcgggcttcggggcagaggacgatgacctgggaggcctggggctgggcccctgactcaaaaaagtggttttgaccagagaggcccagatggaggctgttcattccctgcagtgtcggcattgtaaataaagcctgagcacttgctgatgcga

SEQ ID NO: 303305 - DNA, 1494 bp, Homo sapiens
aggccgtgggtaaatcggccgagggggattggcgggatgcggcgcgccgcgcgtgaacctccttggcctgggcgaagctgtgtggaccaagcaagtcaggagtgtggccatgttttctgagcaggctgcccagagggcccacactctactgtccccaccatcagccaacaatgccacctttgcccgggtgccagtggcaacctacaccaactcctcacaacccttccggctaggagagcgcagctttagccggcagtatgcccacatttatgccacccgcctcatccaaatgagacccttcctggagaaccgggcccagcagcactggggcagtggagtgggagtgaagaagctgtgtgaactgcagcctgaggagaagtgctgtgtggtgggcactctgttcaaggccatgccgctgcagccctccatcctgcgggaggtcagcgaggagcacaacctgctcccccagcctcctcggagtaaatacatacacccagatgacgagctggtcttggaagatgaactgcagcgtatcaaactaaaaggcaccattgacgtgtcaaagctggttacggggactgtcctggctgtgtttggctccgtgagagacgacgggaagtttctggtggaggactattgctttgctgaccttgctccccagaagcccgcacccccacttgacacagataggtttgtgctactggtgtccggcctgggcctgggtggcggtggaggcgagagcctgctgggcacccagctgctggtggatgtggtgacggggcagcttggggacgaaggggagcagtgcagcgccgcccacgtctcccgggttatcctcgctggcaacctcctcagccacagcacccagagcagggattctatcaataaggccaaatacctcaccaagaaaacccaggcagccagcgtggaggctgttaagatgctggatgagatcctcctgcagctgagcgcctcagtgcccgtggacgtgatgccaggcgagtttgatcccaccaattacacgctcccccagcagcccctccacccctgcatgttcccgctggccactgcctactccacgctccagctggtcaccaacccctaccaggccaccattgatggagtcagatttttggggacatcaggacagaacgtgagtgacattttccgatacagcagcccgcatgtctacttttgtggcaacacccccagctttggctccaaaatcatccgaggtcctgaggaccagacagtgctgttggtgactgtccctgacttcagtgccacgcagaccgcctgccttgtgaacctgcgcagcctggcctgccagcccatcagcttctcgggcttcggggcagaggacgatgacctgggaggcctggggctgggcccctgactcaaaaaagtggttttgaccagagaggcccagatggaggctgttcattccctgcagtgtcggcattgtaaataaagcctgagcacttgctgatgcga

SEQ ID NO: 303306 - DNA, 1300 bp, Homo sapiens
  misc_feature (1132)..(1134): n is a, c, g, or t
  misc_feature (1139)..(1139): n is a, c, g, or t
aggccgtgggtaaatcggccgagggggattggcgggatgcggcgcgccgcgcgtgaacctccttggcctgggcgaagctgtgtggaccaagcaagtcaggagtgtggccatgttttctgagcaggctgcccagagggcccacactctactgtccccaccatcagccaacaatgccacctttgcccgggtgccagtggcaacctacaccaactcctcacaacccttccggctaggagagcgcagctttagccggcagtatgcccacatttatgccacccgcctcatccaaatgagacccttcctggagaaccgggcccagcagcactggggcagtggagtgggagtgaagaagctgtgtgaactgcagcctgaggagaagtgctgtgtggtgggcactctgttcaaggccatgccgctgcagccctccatcctgcgggaggtcagcgaggagcacaacctgctcccccagcctcctcggagtaaatacatacacccagatgacgagctggtcttggaagatgaactgcagcgtatcaaactaaaaggcaccattgacgtgtcaaagctggttacggggactgtcctggctgtgtttggctccgtgagagacgacgggaagtttctggtggaggactattgctttgctgaccttgctccccagaagcccgcacccccacttgacacagataggtttgtgctactggtgtccggcctgggcctgggtggcggtggaggcgagagcctgctgggcacccagctgctggtggatgtggtgacggggcagcttggggacgaaggggagcagtgcagcgccgcccacgtctcccgggttatcctcgctggcaacctcctcagccacagcacccagagcagggattctatcaataaggccaaatacctcaccaagaaaacccaggcagccagcgtggaggctgttaagatgctggatgagatcctcctgcagctgagcgcctcagtgcccgtggacgtgatgccaggcgagtttgatcccaccaattacacgctcccccagcagcccctccacccctgcatgttcccgctggccactgcctactccacgctccagctggtcaccaacccctaccaggccaccattgatggagtcagcatnnnggggncgattggggcttccgcgaccggtgaattcgaaaggggggggcactggaccgggggcctggggcgataacaagcggacaggtggccttaaaagcggtcaagcgggtctggggcccgtggccaccggggaaagggggcgacgcgagaaaggccatggagaggg

SEQ ID NO: 303307 - DNA, 2021 bp, Homo sapiens
cagtcagagtcctcagaggttccaagctggcaaagttcaggttaacagtggcctgtgtggaaggatctcttgagaacagaagttcaagaccagcatgggcaacatagcgaggctccgtctctacaaaatatataaaattagctgtagtcccagctactcgggaggctgaggcaggagaatggcgtgaacccgggaggcggagcttgcagtgagctgagatcgcgccactgcactccagcctggatgacagcgagactccgcctcaaaacaaaaacaaaaacagaaacaacaataacagaaaaacacagacatttactctctggcagttctggaggccagaagttgaaatccagatgtcagcaggattggctccttctgaaggcccgaggggagggtccttcctggcctcctccctggtgttcctgggcttgtggccgcatcactccgctctgcccgtcttcacactccctcttgtctgtgtgtctgtctctctgttctcatgaggacacttggcatccagggcccaaccacacccagagtccctggtctcctgtggctgactcactttttactgtcaccgtgaagtccagggggtccttgtacttgatgttctctcctggcaagggccagggccctgtgattggcctctcatggagtgctgggcagggcctccatggcctctgtcgggcgggggggctacttcatctctgagtctgtacccctcgtgtcccaggcagtggagtgggagtgaagaagctgtgtgaactgcagcctgaggagaagtgctgtgtggtgggcactctgttcaaggccatgccgctgcagccctccatcctgcgggaggtcagcgaggagcacaacctgctcccccagcctcctcggagtaaatacatacacccagatgacgagctggtcttggaagatgaactgcagcgtatcaaactaaaaggcaccattgacgtgtcaaagctggttacggggactgtcctggctgtgtttggctccgtgagagacgacgggaagtttctggtggaggactattgctttgctgaccttgctccccagaagcccgcacccccacttgacacagataggtttgtgctactggtgtccggcctgggcctgggtggcggtggaggcgagagcctgctgggcacccagctgctggtggatgtggtgacggggcagcttggggacgaaggggagcagtgcagcgccgcccacgtctcccgggttatcctcgctggcaacctcctcagccacagcacccagagcagggattctatcaataaggccaaatacctcaccaagaaaacccaggcagccagcgtggaggctgttaagatgctggatgagatcctcctgcagctgagcgcctcagtgcccgtggacgtgatgccaggcgagtttgatcccaccaattacacgctcccccagcagcccctccacccctgcatgttcccgctggccactgcctactccacgctccagctggtcaccaacccctaccaggccaccattgatggagtcagatttttggggacatcaggacagaacgtgagtgacattttccgatacagcagcatggaggatcacttggagatcctggagtggaccctgcgggtccgtcacatcagccccacagcccctgacactctaggttgttaccccttctacaaaactgacccgttcatcttcccagagtgcccgcatgtctacttttgtggcaacacccccagctttggctccaaaatcatccgaggtcctgaggaccagacagtgctgttggtgactgtccctgacttcagtgccacgcagaccgcctgccttgtgaacctgcgcagcctggcctgccagcccatcagcttctcgggcttcggggcagaggacgatgacctgggaggcctggggctgggcccctgactcaaaaaagtggttttgaccagagaggcccagatggaggctgttcattccctgcagtgtcggcattgtaaataaagcctgagcacttgctgatgcga

SEQ ID NO: 303308 - DNA, 1190 bp, Homo sapiens
atacctcctgtctctgcattccagcacaacctgctcccccagcctcctcggagtaaatacatacacccagatgacgagctggtcttggaagatgaactgcagcgtatcaaactaaaaggcaccattgacgtgtcaaagctggttacggggactgtcctggctgtgtttggctccgtgagagacgacgggaagtttctggtggaggactattgctttgctgaccttgctccccagaagcccgcacccccacttgacacagataggtttgtgctactggtgtccggcctgggcctgggtggcggtggaggcgagagcctgctgggcacccagctgctggtggatgtggtgacggggcagcttggggacgaaggggagcagtgcagcgccgcccacgtctcccgggttatcctcgctggcaacctcctcagccacagcacccagagcagggattctatcaataaggccaaatacctcaccaagaaaacccaggcagccagcgtggaggctgttaagatgctggatgagatcctcctgcagctgagcgcctcagtgcccgtggacgtgatgccaggcgagtttgatcccaccaattacacgctcccccagcagcccctccacccctgcatgttcccgctggccactgcctactccacgctccagctggtcaccaacccctaccaggccaccattgatggagtcagatttttggggacatcaggacagaacgtgagtgacattttccgatacagcagcatggaggatcacttggagatcctggagtggaccctgcgggtccgtcacatcagccccacagcccctgacactctaggttgttaccccttctacaaaactgacccgttcatcttcccagagtgcccgcatgtctacttttgtggcaacacccccagctttggctccaaaatcatccgaggtcctgaggaccagacagtgctgttggtgactgtccctgacttcagtgccacgcagaccgcctgccttgtgaacctgcgcagcctggcctgccagcccatcagcttctcgggcttcggggcagaggacgatgacctgggaggcctggggctgggcccctgactcaaaaaagtggttttgaccagagaggcccagatggaggctgttcattccctgcagtgtcggcattgtaaataaagcctgagcacttgctgatgcga

SEQ ID NO: 303309 - DNA, 1202 bp, Homo sapiens
aggccgtgggtaaatcggccgagggggattggcgggatgcggcgcgccgcgcgtgaacctccttggcctgggcgaagctgtgtggaccaagcaagtcaggagtgtggccatgttttctgagcaggctgcccagagggcccacactctactgtccccaccatcagccaacaatgccacctttgcccgggtgccagtggcaacctacaccaactcctcacaacccttccggctaggagagcgcagctttagccggcagtatgcccacatttatgccacccgcctcatccaaatgagacccttcctggagaaccgggcccagcagcactggggcagtggagtgggagtgaagaagctgtgtgaactgcagcctgaggagaagtgctgtgtggtgggcactctgttcaaggccatgccgctgcagccctccatcctgcgggaggtcagcgaggagcacaacctgctcccccagcctcctcggagtaaatacatacacccagatgacgagctggtcttggaagatgaactgcagcgtatcaaactaaaaggcaccattgacgtgtcaaagctggttacggggactgtcctggctgtgtttggctccgtgagagacgacgggaagtttctggtggaggactattgctttgctgaccttgctccccagaagcccgcacccccacttgacacagataggtttgtgctactggtgtccggcctgggcctgggtggcggtggaggcgagagcctgctgggcacccagctgctggtggatgtggtgacggggcagcttggggacgaaggggagcagtgcagcgccgcccacgtctcccgggttatcctcgctggcaacctcctcagccacagcacccagagcagggattctatcaataaggccaaatacctcaccaagaaaacccaggcagctttggctccaaaatcatccgaggtcctgaggaccagacagtgctgttggtgactgtccctgacttcagtgccacgcagaccgcctgccttgtgaacctgcgcagcctggcctgccagcccatcagcttctcgggcttcggggcagaggacgatgacctgggaggcctggggctgggcccctgactcaaaaaagtggttttgaccagagaggcccagatggaggctgttcattccctgcagtgtcggcattgtaaataaagcctgagcacttgctgatgcga

SEQ ID NO: 303310 - DNA, 1192 bp, Homo sapiens
gtgacagctgattcttgagggtaaaccgacgctcagccagctggcccagattgctctgggccatacacccagatgacgagctggtcttggaagatgaactgcagcgtatcaaactaaaaggcaccattgacgtgtcaaagctggttacggggactgtcctggctgtgtttggctccgtgagagacgacgggaagtttctggtggaggactattgctttgctgaccttgctccccagaagcccgcacccccacttgacacagataggtttgtgctactggtgtccggcctgggcctgggtggcggtggaggcgagagcctgctgggcacccagctgctggtggatgtggtgacggggcagcttggggacgaaggggagcagtgcagcgccgcccacgtctcccgggttatcctcgctggcaacctcctcagccacagcacccagagcagggattctatcaataaggccaaatacctcaccaagaaaacccaggcagccagcgtggaggctgttaagatgctggatgagatcctcctgcagctgagcgcctcagtgcccgtggacgtgatgccaggcgagtttgatcccaccaattacacgctcccccagcagcccctccacccctgcatgttcccgctggccactgcctactccacgctccagctggtcaccaacccctaccaggccaccattgatggagtcagatttttggggacatcaggacagaacgtgagtgacattttccgatacagcagcatggaggatcacttggagatcctggagtggaccctgcgggtccgtcacatcagccccacagcccctgacactctaggttgttaccccttctacaaaactgacccgttcatcttcccagagtgcccgcatgtctacttttgtggcaacacccccagctttggctccaaaatcatccgaggtcctgaggaccagacagtgctgttggtgactgtccctgacttcagtgccacgcagaccgcctgccttgtgaacctgcgcagcctggcctgccagcccatcagcttctcgggcttcggggcagaggacgatgacctgggaggcctggggctgggcccctgactcaaaaaagtggttttgaccagagaggcccagatggaggctgttcattccctgcagtgtcggcattgtaaataaagcctgagcacttgctgatgcga

SEQ ID NO: 303311 - DNA, 1664 bp, Homo sapiens
agcgggagttgcggcgatgggcggggcaggcgcgcggggattggcgggatgcggcgcgccgcgcgtgaacctccttggcctgggcgaagctgtgtggaccaagcaagtcaggagtgtggccatgttttctgagcaggctgcccagagggcccacactctactgtccccaccatcagccaacaatgccacctttgcccgggtgccagtggcaacctacaccaactcctcacaacccttccggctaggagagcgcagctttagccggcagtatgcccacatttatgccacccgcctcatccaaatgagacccttcctggagaaccgggcccagcagcactggggcagtggagtgggagtgaagaagctgtgtgaactgcagcctgaggagaagtgctgtgtggtgggcactctgttcaaggccatgccgctgcagccctccatcctgcgggaggtcagcgaggagcacaacctgctcccccagcctcctcggagtaaatacatacacccagatgacgagctggtcttggaagatgaactgcagcgtatcaaactaaaaggcaccattgacgtgtcaaagctggttacgggtagggagcccaatgagaggatgtgggtgatgcagggactgtcctggctgtgtttggctccgtgagagacgacgggaagtttctggtggaggactattgctttgctgaccttgctccccagaagcccgcacccccacttgacacagataggtttgtgctactggtgtccggcctgggcctgggtggcggtggaggcgagagcctgctgggcacccagctgctggtggatgtggtgacggggcagcttggggacgaaggggagcagtgcagcgccgcccacgtctcccgggttatcctcgctggcaacctcctcagccacagcacccagagcagggattctatcaataaggccaaatacctcaccaagaaaacccaggcagccagcgtggaggctgttaagatgctggatgagatcctcctgcagctgagcgcctcagtgcccgtggacgtgatgccaggcgagtttgatcccaccaattacacgctcccccagcagcccctccacccctgcatgttcccgctggccactgcctactccacgctccagctggtcaccaacccctaccaggccaccattgatggagtcagatttttggggacatcaggacagaacgtgagtgacattttccgatacagcagcatggaggatcacttggagatcctggagtggaccctgcgggtccgtcacatcagccccacagcccctgacactctaggttgttaccccttctacaaaactgacccgttcatcttcccagagtgcccgcatgtctacttttgtggcaacacccccagctttggctccaaaatcatccgaggtcctgaggaccagacagtgctgttggtgactgtccctgacttcagtgccacgcagaccgcctgccttgtgaacctgcgcagcctggcctgccagcccatcagcttctcgggcttcggggcagaggacgatgacctgggaggcctggggctgggcccctgactcaaaaaagtggttttgaccagagaggcccagatggaggctgttcattccctgcagtgtcggcattgtaaataaagcctgagcacttgctgatgcga

SEQ ID NO: 303312 - DNA, 2056 bp, Homo sapiens
cagtcagagtcctcagaggttccaagctggcaaagttcaggttaacagtggcctgtgtggaaggatctcttgagaacagaagttcaagaccagcatgggcaacatagcgaggctccgtctctacaaaatatataaaattagctgtagtcccagctactcgggaggctgaggcaggagaatggcgtgaacccgggaggcggagcttgcagtgagctgagatcgcgccactgcactccagcctggatgacagcgagactccgcctcaaaacaaaaacaaaaacagaaacaacaataacagaaaaacacagacatttactctctggcagttctggaggccagaagttgaaatccagatgtcagcaggattggctccttctgaaggcccgaggggagggtccttcctggcctcctccctggtgttcctgggcttgtggccgcatcactccgctctgcccgtcttcacactccctcttgtctgtgtgtctgtctctctgttctcatgaggacacttggcatccagggcccaaccacacccagagtccctggtctcctgtggctgactcactttttactgtcaccgtgaagtccagggggtccttgtacttgatgttctctcctggcaagggccagggccctgtgattggcctctcatggagtgctgggcagggcctccatggcctctgtcgggcgggggggctacttcatctctgagtctgtacccctcgtgtcccaggcagtggagtgggagtgaagaagctgtgtgaactgcagcctgaggagaagtgctgtgtggtgggcactctgttcaaggccatgccgctgcagccctccatcctgcgggaggtcagcgaggagcacaacctgctcccccagcctcctcggagtaaatacatacacccagatgacgagctggtcttggaagatgaactgcagcgtatcaaactaaaaggcaccattgacgtgtcaaagctggttacgggtagggagcccaatgagaggatgtgggtgatgcagggactgtcctggctgtgtttggctccgtgagagacgacgggaagtttctggtggaggactattgctttgctgaccttgctccccagaagcccgcacccccacttgacacagataggtttgtgctactggtgtccggcctgggcctgggtggcggtggaggcgagagcctgctgggcacccagctgctggtggatgtggtgacggggcagcttggggacgaaggggagcagtgcagcgccgcccacgtctcccgggttatcctcgctggcaacctcctcagccacagcacccagagcagggattctatcaataaggccaaatacctcaccaagaaaacccaggcagccagcgtggaggctgttaagatgctggatgagatcctcctgcagctgagcgcctcagtgcccgtggacgtgatgccaggcgagtttgatcccaccaattacacgctcccccagcagcccctccacccctgcatgttcccgctggccactgcctactccacgctccagctggtcaccaacccctaccaggccaccattgatggagtcagatttttggggacatcaggacagaacgtgagtgacattttccgatacagcagcatggaggatcacttggagatcctggagtggaccctgcgggtccgtcacatcagccccacagcccctgacactctaggttgttaccccttctacaaaactgacccgttcatcttcccagagtgcccgcatgtctacttttgtggcaacacccccagctttggctccaaaatcatccgaggtcctgaggaccagacagtgctgttggtgactgtccctgacttcagtgccacgcagaccgcctgccttgtgaacctgcgcagcctggcctgccagcccatcagcttctcgggcttcggggcagaggacgatgacctgggaggcctggggctgggcccctgactcaaaaaagtggttttgaccagagaggcccagatggaggctgttcattccctgcagtgtcggcattgtaaataaagcctgagcacttgctgatgcga

SEQ ID NO: 303313 - DNA, 1032 bp, Homo sapiens
aggccgtgggtaaatcggccgagggggattggcgggatgcggcgcgccgcgcgtgaacctccttggcctgggcgaagctgtgtggaccaagcaagtcaggagtgtggccatgttttctgagcaggctgcccagagggcccacactctactgtccccaccatcagccaacaatgccacctttgcccgggtgccagtggcaacctacaccaactcctcacaacccttccggctaggagagcgcagctttagccggcagtatgcccacatttatgccacccgcctcatccaaatgagacccttcctggagaaccgggcccagcagcactggggcagtggagtgggagtgaagaagctgtgtgaactgcagcctgaggagaagtgctgtgtggtgggcactctgttcaaggccatgccgctgcagccctccatcctgcgggaggtcagcgaggagcacaacctgctcccccagcctcctcggagtaaatacatacacccagatgacgagctggtcttggaagatgaactgcagcgtatcaaactaaaaggcaccattgacgtgtcaaagctggttacggggactgtcctggctgtgtttggctccgtgagagacgacgggaagtttctggtggaggactattgctttgctgaccttgctccccagaagcccgcacccccacttgacacagataggtttgtgctactggtgtccggcctgggcctgggtggcggtggaggcgagagcctgctgggcacccagctgctggtggatgtggtgacggggcagcttggggacgaaggggagcagtgcagcgccgcccacgtctcccgggttatcctcgctggcaacctcctcagccacagcacccagagcagggattctatcaataagcaaatacctcacaagaaaccgagcagcagggtggaggtgtaagatgcggatgaatccccggggtgaggccccagtgccgggacgtatgccgcgagttggccccataaagtcccagagaccccccggtgtcccgggaccggaac

SEQ ID NO: 303314 - DNA, 1521 bp, Homo sapiens
ccacgcgtccgggcgggatgcggcgcgccgcgcgggtgagacatcggtatccaggcacgataaatttccaagtggacacaatgtctggtgtcaactacagctgttctccttcttttcccagtatcctttgggtgcagtgagacaccaggagagctgctgctttgggggatggacaggggcagcaggaatgcctttgtgttttcgcagtgaacctccttggcctgggcgaagctgtgtggaccaagcaagtcaggagtgtggccatgttttctgagcaggctgcccagagggcccacactctactgtccccaccatcagccaacaatgccacctttgcccgggtgccagtggcaacctacaccaactcctcacaacccttccggctaggagagcgcagctttagccggcagtatgcccacatttatgccacccgcctcatccaaatgagacccttcctggagaaccgggcccagcagcactggggcagtggagtgggagtgaagaagctgtgtgaactgcagcctgaggagaagtgctgtgtggtgggcactctgttcaaggccatgccgctgcagccctccatcctgcgggaggtcagcgaggagcacaacctgctcccccagcctcctcggagtaaatacatacacccagatgacgagctggtcttggaagatgaactgcagcgtatcaaactaaaaggcaccattgacgtgtcaaagctggttacggggactgtcctggctgtgtttggctccgtgagagacgacgggaagtttctggtggaggactattggccaaatacctcaccaagaaaacccaggcagccagcgtggaggctgttaagatgctggatgagatcctcctgcagctgagcgcctcagtgcccgtggacgtgatgccaggcgagtttgatcccaccaattacacgctcccccagcagcccctccacccctgcatgttcccgctggccactgcctactccacgctccagctggtcaccaacccctaccaggccaccattgatggagtcagatttttggggacatcaggacagaacgtgagtgacattttccgatacagcagcatggaggatcacttggagatcctggagtggaccctgcgggtccgtcacatcagccccacagcccctgacactctaggttgttaccccttctacaaaactgacccgttcatcttcccagagtgcccgcatgtctacttttgtggcaacacccccagctttggctccaaaatcatccgaggtcctgaggaccagacagtgctgttggtgactgtccctgacttcagtgccacgcagaccgcctgccttgtgaacctgcgcagcctggcctgccagcccatcagcttctcgggcttcggggcagaggacgatgacctgggaggcctggggctgggcccctgactcaaaaaagtggttttgaccagagaggcccagatggaggctgttcattccctgcagtgtcggcattgtaaataaagcctgagcacttgctgatgcga

SEQ ID NO: 303315 - DNA, 922 bp, Homo sapiens
cgacccacgcgtcggacccacgcgtcgcccacgcgtcgggcgagagcctgctgggcacccagctgctggtggatgtggtgacggggcagcttggggacgaaggggagcagtgcagcgccgcccacgtctcccgggttatcctcgctggcaacctcctcagccacagcacccagagcagggattctatcaataaggccaaatacctcaccaagaaaacccaggcagccagcgtggaggctgttaagatgctggatgagatcctcctgcagctgagcgcctcagtgcccgtggacgtgatgccaggcgagtttgatcccaccaattacacgctcccccagcagcccctccacccctgcatgttcccgctggccactgcctactccacgctccagctggtcaccaacccctaccaggccaccattgatggagtcagatttttggggacatcaggacagaacgtgagtgacattttccgatacagcagcatggaggatcacttggagatcctggagtggaccctgcgggtccgtcacatcagccccacagcccctgacactctaggttgttaccccttctacaaaactgacccgttcatcttcccagagtgcccgcatgtctacttttgtggcaacacccccagctttggctccaaaatcatccgaggtcctgaggaccagacagtgctgttggtgactgtccctgacttcagtgccacgcagaccgcctgccttgtgaacctgcgcagcctggcctgccagcccatcagcttctcgggcttcggggcagaggacgatgacctgggaggcctggggctgggcccctgactcaaaaaagtggttttgaccagagaggcccagatggaggctgttcattccctgcagtgtcggcattgtaaataaagcctgagcacttgctgatgcga

SEQ ID NO: 303316 - DNA, 1402 bp, Homo sapiens
ccacgcgtccgggcgggatgcggcgcgccgcgcgggtgagacatcggtatccaggcacgataaatttccaagtggacacaatgtctggtgtcaactacagctgttctccttcttttcccagtatcctttgggtgcagtgagacaccaggagagctgctgctttgggggatggacaggggcagcaggaatgcctttgtgttttcgcagtgaacctccttggcctgggcgaagctgtgtggaccaagcaagtcaggagtgtggccatgttttctgagcaggctgcccagagggcccacactctactgtccccaccatcagccaacaatgccacctttgcccgggtgccagtggcaacctacaccaactcctcacaacccttccggctaggagagcgcagctttagccggcagtatgcccacatttatgccacccgcctcatccaaatgagacccttcctggagaaccgggcccagcagcactggggcagtggagtgggagtgaagaagctgtgtgaactgcagcctgaggagaagtgctgtgtggtgggcactctgttcaaggccatgccgctgcagccctccatcctgcgggaggtcagcgaggagcacaacctgctcccccagcctcctcggagtaaatacatacacccagatgacgagctggtcttggaagatgaactgcagcgtatcaaactaaaaggcaccattgacgtgtcaaagctggttacggggactgtcctggctgtgtttggctccgtgagagacgacgggaagtttctggtggaggactattgctttgctgaccttgctccccagaagcccgcacccccacttgacacagataggctggccactgcctactccacgctccagctggtcaccaacccctaccaggccaccattgatggagtcagatttttggggacatcaggacagaacgtgagtgacattttccgatacagcagcatggaggatcacttggagatcctggagtggaccctgcgggtccgtcacatcagccccacagcccctgacactctaggttgttaccccttctacaaaactgacccgttcatcttcccagagtgcccgcatgtctacttttgtggcaacacccccagctttggctccaaaatcatccgaggtcctgaggaccagacagtgctgttggtgactgtccctgacttcagtgccacgcagaccgcctgccttgtgaacctgcgcagcctggcctgccagcccatcagcttctcgggcttcggggcagaggacgatgacctgggaggcctggggctgggcccctgactcaaaaaagtggttttgaccagagaggcccagatggaggctgttcattccctgcagtgtcggcattgtaaataaagcctgagcacttgctgatgcga

SEQ ID NO: 303317 - DNA, 1458 bp, Homo sapiens
ccacgcgtccgggcgggatgcggcgcgccgcgcgggtgagacatcggtatccaggcacgataaatttccaagtggacacaatgtctggtgtcaactacagctgttctccttcttttcccagtatcctttgggtgcagtgagacaccaggagagctgctgctttgggggatggacaggggcagcaggaatgcctttgtgttttcgcagtgaacctccttggcctgggcgaagctgtgtggaccaagcaagtcaggagtgtggccatgttttctgagcaggctgcccagagggcccacactctactgtccccaccatcagccaacaatgccacctttgcccgggtgccagtggcaacctacaccaactcctcacaacccttccggctaggagagcgcagctttagccggcagtatgcccacatttatgccacccgcctcatccaaatgagacccttcctggagaaccgggcccagcagcactggggcagtggagtgggagtgaagaagctgtgtgaactgcagcctgaggagaagtgctgtgtggtgggcactctgttcaaggccatgccgctgcagccctccatcctgcgggaggtcagcgaggagcacaacctgctcccccagcctcctcggagtaaatacatacacccagatgacgagctggtcttggaagatgaactgcagcgtatcaaactaaaaggcaccattgacgtgtcaaagctggttacggggactgtcctggctgtgtttggctccgtgagagacgacgggaagtttctggtggaggactattggccaaatacctcaccaagaaaacccaggcagccagcgtggaggctgttaagatgctggatgagatcctcctgcagctgagccagcccctccacccctgcatgttcccgctggccactgcctactccacgctccagctggtcaccaacccctaccaggccaccattgatggagtcagatttttggggacatcaggacagaacgtgagtgacattttccgatacagcagcatggaggatcacttggagatcctggagtggaccctgcgggtccgtcacatcagccccacagcccctgacactctaggttgttaccccttctacaaaactgacccgttcatcttcccagagtgcccgcatgtctacttttgtggcaacacccccagctttggctccaaaatcatccgaggtcctgaggaccagacagtgctgttggtgactgtccctgacttcagtgccacgcagaccgcctgccttgtgaacctgcgcagcctggcctgccagcccatcagcttctcgggcttcggggcagaggacgatgacctgggaggcctggggctgggcccctgactcaaaaaagtggttttgaccagagaggcccagatggaggctgttcattccctgcagtgtcggcattgtaaataaagcctgagcacttgctgatgcga

SEQ ID NO: 303318 - DNA, 943 bp, Homo sapiens
gaggtctcgcaggtcggtgggaagcgccctgcagtgactctggggcctcctgcaatggggctcctcatgcccaggccctcgctgaggatggtgggaggcttgaagggagtgagggtctatgggacaacaactgcatcttccagctggtggggctctactctcctctgagcctgggactcgcctgggcctgatggccttctgggcttctattccaggccaaatacctcaccaagaaaacccaggcagccagcgtggaggctgttaagatgctggatgagatcctcctgcagctgagcgcctcagtgcccgtggacgtgatgccaggcgagtttgatcccaccaattacacgctcccccagcagcccctccacccctgcatgttcccgctggccactgcctactccacgctccagctggtcaccaacccctaccaggccaccattgatggagtcagatttttggggacatcaggacagaacgtgagtgacattttccgatacagcagcatggaggatcacttggagatcctggagtggaccctgcgggtccgtcacatcagccccacagcccctgacactctaggttgttaccccttctacaaaactgacccgttcatcttcccagagtgcccgcatgtctacttttgtggcaacacccccagctttggctccaaaatcatccgaggtcctgaggaccagacagtgctgttggtgactgtccctgacttcagtgccacgcagaccgcctgccttgtgaacctgcgcagcctggcctgccagcccatcagcttctcgggcttcggggcagaggacgatgacctgggaggcctggggctgggcccctgactcaaaaaagtggttttgaccagagaggcccagatggaggctgttcattccctgcagtgtcggcattgtaaataaagcctgagcacttgctgatgcga

SEQ ID NO: 303319 - DNA, 991 bp, Homo sapiens
ggacgcgtgggcggggcagcttggggacgaaggggagcagtgcagcgccgtcaccacatccaccagcagctgggtgcccagcaggctctcgcctccaccgccacccaggcccaggccggacacagctgctggtggatgtggtgacggggcagcttggggacgaaggggagcagtgcagcgccgcccacgtctcccgggttatcctcgctggcaacctcctcagccacagcacccagagcagggattctatcaataaggccaaatacctcaccaagaaaacccaggcagccagcgtggaggctgttaagatgctggatgagatcctcctgcagctgagcgcctcagtgcccgtggacgtgatgccaggcgagtttgatcccaccaattacacgctcccccagcagcccctccacccctgcatgttcccgctggccactgcctactccacgctccagctggtcaccaacccctaccaggccaccattgatggagtcagagtcagatttttggggacatcaggacagaacgtgagtgacattttccgatacagcagcatggaggatcacttggagatcctggagtggaccctgcgggtccgtcacatcagccccacagcccctgacactctaggttgttaccccttctacaaaactgacccgttcatcttcccagagtgcccgcatgtctacttttgtggcaacacccccagctttggctccaaaatcatccgaggtcctgaggaccagacagtgctgttggtgactgtccctgacttcagtgccacgcagaccgcctgccttgtgaacctgcgcagcctggcctgccagcccatcagcttctcgggcttcggggcagaggacgatgacctgggaggcctggggctgggcccctgactcaaaaaagtggttttgaccagagaggcccagatggaggctgttcattccctgcagtgtcggcattgtaaataaagcctgagcacttgctgatgcga

SEQ ID NO: 303320 - DNA, 1520 bp, Homo sapiens
agcgggagttgcggcgatgggcggggcaggcgcgcggggattggcgggatgcggcgcgccgcgcggtgagtggggtccagggaaacggggtcagctgggggtggcagttccaggccgcgaggccgggctcctgggtcggtgggctggtgtcttggcggacgtcccgcagctgccgcgtggatccgagccggggcacccgccgtgactgggacagcccccagggcgctctcggccccatcccgagtagcgcggcctggctgctgccgccatcaagcacgttcgagccaaaagctcctaacgagtcactcgttagacacgtgtgcggagcctgtgtcccaggccagtgctgtcccgtggagatagattgcaagccgctagggaattttttaactttctagtaggtgtacgaaaaaagtaaaacgaaacaaatcaattggagtaaatccataaatatattcaaactattatttcaattgtatgtgaaaacaattattgggatattctttgtactattcttagaaatccattgtgtgtccaacccaaacatcacagttggactcaccacatctcctgtacttcgtagccctaggtggctagtggcataagacacaaaaatctcagctctcctggagcttatggtctagttggagcaggcagacaatacatttaaaatatacagtttgttagaaggtgccggagagctggatggaggcagatcgggaattccatttggggcaaactgaacttgattgagaccctggtagttgtccagatggaacaggacacctgagtctagggttcgggaagaactccagatgggacaaacactcctagctttccttttctctttttggatgaccgctacaggtgaacctccttggcctgggcgaagctgtgtggaccaagcaagtcaggagtgtggccatgttttctgagcaggctgcccagagggcccacactctactgtccccaccatcagccaacaatgccacctttgcccgggtgccagtggcaacctacaccaaagtcagatttttggggacatcaggacagaacgtgagtgacattttccgatacagcagcatggaggatcacttggagatcctggagtggaccctgcgggtccgtcacatcagccccacagcccctgacactctaggttgttaccccttctacaaaactgacccgttcatcttcccagagtgcccgcatgtctacttttgtggcaacacccccagctttggctccaaaatcatccgaggtcctgaggaccagacagtgctgttggtgactgtccctgacttcagtgccacgcagaccgcctgccttgtgaacctgcgcagcctggcctgccagcccatcagcttctcgggcttcggggcagaggacgatgacctgggaggcctggggctgggcccctgactcaaaaaagtggttttgaccagagaggcccagatggaggctgttcattccctgcagtgtcggcattgtaaataaagcctgagcacttgctgatgcga

SEQ ID NO: 303321 - DNA, 914 bp, Homo sapiens
ccacgcgtccgggcgggatgcggcgcgccgcgcgggtgagacatcggtatccaggcacgataaatttccaagtggacacaatgtctggtgtcaactacagctgttctccttcttttcccagtatcctttgggtgcagtgagacaccaggagagctgctgctttgggggatggacaggggcagcaggaatgcctttgtgttttcgcagtgaacctccttggcctgggcgaagctgtgtggaccaagcaagtcaggagtgtggccatgttttctgagcaggctgcccagagggcccacactctactgtccccaccatcagccaacaatgccacctttgcccgggtgccagtggcaacctacaccaactcctcacaacccttccggctaggagagcgcagctttagccggcagtatgcccacatttatgccacccgcctcatccaaatgagacccttcctggagaaccgggcccagcagcactggggcagtggagtgggagtgaagaagctgtgtgaactgcagcctgaggagaagtgctgtgtggtgggcactctgttcaaggccatgccgctgcagccctccatcctgcgggaggtcagcgaggagcacaacctgctcccccagcctcctcggagtaaatacatacacccagatgacgagctggtcttggaagatgaactgcagcgtatcaaactaaaaggcaccattgacgtgtcaaagctggttacggggactgtcctggctgtgtttggctccgtgagagacgacgggaagtttctggtggaggactattgctttgctgaccttgctccccagaagcccgcacccccacttgacacagataggtgagcagcagttctcgggagctggaaccagctcatggtcagtggaatctttgagttgcacctaggaggg

SEQ ID NO: 303322 - DNA, 692 bp, Homo sapiens
agcgggagttgcggcgatgggcggggcaggcgcgcggggattggcgggatgcggcgcgccgcgcgtgaacctccttggcctgggcgaagctgtgtggaccaagcaagtcaggagtgtggccatgttttctgagcaggctgcccagagggcccacactctactgtccccaccatcagccaacaatgccacctttgcccgggtgccagtggcaacctacaccaactcctcacaacccttccggctaggagagcgcagctttagccggcagtatgcccacatttatgccacccgcctcatccaaatgagacccttcctggagaaccgggcccagcagcactggggcagtggagtgggagtgaagaagctgtgtgaactgcagcctgaggagaagtgctgtgtggtgggcactctgttcaaggccatgccgctgcagccctccatcctgcgggaggtcagcgaggagcacaacctgctcccccagcctcctcggagtaaatacatacacccagatgacgagctggtcttggaagatgaactgcagcgtatcaaactaaaaggcaccattgacgtgtcaaagctggttacgggtagggagcccaatgagaggatgtgggtgatgcaggtgaagagcccagcggtggtgtgttagggatggtgtgagtggggagcctggggggagtgggggggtgtgg

SEQ ID NO: 303323 - DNA, 814 bp, Homo sapiens
agcgggagttgcggcgatgggcggggcaggcgcgcggggattggcgggatgcggcgcgccgcgcgtgaacctccttggcctgggcgaagctgtgtggaccaagcaagtcaggagtgtggccatgttttctgagcaggctgcccagagggcccacactctactgtccccaccatcagccaacaatgccacctttgcccgggtgccagtggcaacctacaccaactcctcacaacccttccggctaggagagcgcagctttagccggcagtatgcccacatttatgccacccgcctcatccaaatgagacccttcctggagaaccgggcccagcagcactggggcagtggagtgggagtgaagaagctgtgtgaactgcagcctgaggagaagtgctgtgtggtgggcactctgttcaaggccatgccgctgcagccctccatcctgcgggaggtcagcgaggagcacaacctgctcccccagcctcctcggagtaaatagcccgcatgtctacttttgtggcaacacccccagctttggctccaaaatcatccgaggtcctgaggaccagacagtgctgttggtgactgtccctgacttcagtgccacgcagaccgcctgccttgtgaacctgcgcagcctggcctgccagcccatcagcttctcgggcttcggggcagaggacgatgacctgggaggcctggggctgggcccctgactcaaaaaagtggttttgaccagagaggcccagatggaggctgttcattccctgcagtgtcggcattgtaaataaagcctgagcacttgctgatgcga

SEQ ID NO: 303324 - DNA, 656 bp, Homo sapiens
agcgggagttgcggcgatgggcggggcaggcgcgcggggattggcgggatgcggcgcgccgcgcgtgaacctccttggcctgggcgaagctgtgtggaccaagcaagtcagcagcccctccacccctgcatgttcccgctggccactgcctactccacgctccagctggtcaccaacccctaccaggccaccattgatggagtcagagtcagatttttggggacatcaggacagaacgtgagtgacattttccgatacagcagcatggaggatcacttggagatcctggagtggaccctgcgggtccgtcacatcagccccacagcccctgacactctaggcccgcatgtctacttttgtggcaacacccccagctttggctccaaaatcatccgaggtcctgaggaccagacagtgctgttggtgactgtccctgacttcagtgccacgcagaccgcctgccttgtgaacctgcgcagcctggcctgccagcccatcagcttctcgggcttcggggcagaggacgatgacctgggaggcctggggctgggcccctgactcaaaaaagtggttttgaccagagaggcccagatggaggctgttcattccctgcagtgtcggcattgtaaataaagcctgagcacttgctgatgcga

SEQ ID NO: 303325 - DNA, 781 bp, Homo sapiens
aaatacttactggtccagtgagttatgcaggtattccagtgtgttgacattatacaacaccagaaaaaccacattcatgaacatcactaccagacccatagaaacgggtttaagcattggaaagctttcaagctcccagtggctgatacaaattttccaaaattctagtttttcttgaaagctctaattttatcatttgtttttcttgaaggacaggctcacttcattttctagaaaatgtctggcaaattcccaagtctgaatgtctgaatagctttagtttgtctgccattctttcaagtaaaaacagtgttctgtgagaaaagcagctggttcatcttgtttctcagttgcacaagtgcttttccttaaggacagccgtgacagtgaagtgtgtatacagcagaagcactttatgaatacttaccatttagtcatacagaagactagaaagattagtacttaagggttgaagtttttaaaaattaatttgggctacgtgattcaaggacatagttgaaactttttgtgtgttttttaaaactgcaaaagtgtggtggtgaaaaatatagggactgctagtatagtttgatgccactgctttgatttactctaaagtacaagaagaatttgtttgtttatagtttagtaatttttagtaacttaactgagtgatataaccatcacaagtcagttttagaacatttttattgccccagtaagaaccatcatgcctgtggaactattttctttgaacagaaacagcctgtggaaaagaaaa

SEQ ID NO: 303326 - DNA, 940 bp, Homo sapiens
tgtaattgtctccaaatcccctttgcgccccttcttccgtaattttgaaggagagaatagcacacatccacaactgaatagctctcgggtccgggcctgtagggcttaagcattccgaatgtcttcctttatttcgtcccattatctctgtttcctttagtcccaactggcagtgtttctcctggtataatcccatttctagtcatggtttgtgttgagatgtttgattaagcctgtggttcacacccatattaatcaaatcagtaagggtccgaaacactcttcatgttctcttcagaacacactttctcactttttttgcaatatggacaggctgagaatttcccagatcttaaattatggttactttttccttaacaattccatcttcaaacctttttctttttctacatttgactctacggattcagaaggaaccaagctgctgcttctacatgttgctgagaaatctgctgggttaaatgtccaatttcactgcacacaagttccaccttccgcaaaacacaagagcatgaatacaattcaaagaagtttgtttccacttttcaacatggattgcttttgctccattttccaataacattttcatttccatttgagactccaacagaatgacctttactgtccatattttatcaatattctgttcatgattatttaattattttctgagaagacagcgttttcttctatatttctttccgagccctcacgagaattggcttttaaatttcttccacagtaatctagcattttgcataaaacctcatcaatctctgccaatcactgagcccaaaaccattttcactttgttttaggtatttataataacagcactcccacttctcatgatcaatttccatcttcagcggttcaggctgctttaataaagttccataacctgagtggcttttaaata

SEQ ID NO: 303327 - DNA, 585 bp, Homo sapiens
  misc_feature (487)..(487): n is a, c, g, or t
  misc_feature (496)..(496): n is a, c, g, or t
  misc_feature (504)..(504): n is a, c, g, or t
  misc_feature (526)..(526): n is a, c, g, or t
  misc_feature (543)..(543): n is a, c, g, or t
  misc_feature (559)..(559): n is a, c, g, or t
tacgggcacctggagttgattcagctgcagctggccgcccagtttgagaattggtgtaagacatcacaatcccattattcagagcgcgtatggagtggaaacgcttgtaaggcttcaccaggatccacctctgatgttcagtgaagaggaccggaaaagtctgctagagcagtgccatctgggtctggatcaaaaacgcagaaaatacgtggttggagagctcatctggaattttgccgatttcatgactaaccagtggctggtgaattaccagatctccgtcaagtgcattcccaacttattgtttcatcagctaaagcattacagcattgtgaagaactgattcagcagtacaaccgtgctgaggacagcatatgcttagctgacagtaagcctctgcctcaccagaatgtaactaaccatgtaggcaaagcagtggaggactgcatgagggccacatcggggtgttgcttaatttaactaatgntaatgagtnggggcagnaccaaaaccaggagagcaggancggtctcattggcacancgcctgaactggtgtncttccagggttccaaagtcctacctc

SEQ ID NO: 303328 - DNA, 1312 bp, Homo sapiens
tacgggcacctggagttgattcagctgcagctggccgcccagtttgagaattggtgtaagacatcacaatcccattattcagagcgcgtatggagtggaaacgcttgtaaggcttcaccaggatccacctctgatgttcagtgaagaggaccggaaaagtctgctagagcagtgccatctgggtctggatcaaaaacgcagaaaatacgtggttggagagctcatctggaattttgccgatttcatgactaaccagtgtaagtggcagtttagcgcatgggataatgtacccgtcctcattttttcaggttgccttgcccattctggacattttggctgtaagaatattggaaacaaaggggggaacctggtttaatccatgtaggttgtgttgagaatttcctaggaaaagtaagttgtgcttaggaagtaggaaagcagtcaggcccccgcttcccacgtacggtcaaaaagcaaacatgagagtctgctatagtgagatggaaatggctagcttgcctttttcttgtctatttcatagccaaggatgaaggaaaaactggacctcattatggatttacttttgggatacactcattattccagaggagggtaaaaggctgagaagcttaaggtatttcagtctgttttatgttactcatttgcgaaaagcaggctcatcgaatacaggtgagtttcaacgcgtcttgaatatggcagcatttaaaagtcttcagaccaggcatggtggctcatgcctgtcatcccagcactttgggaggccaaggtgggaggattgcttgaggccaggagttcgagaccagcctgttcagcatagcaggacccccatctctacaaaaactaaacagattagctaggtgtggtggtgtgtgcctgtagtcctagctgcttgggaggctgaggcaggcggatagcctgagcacaggagttggaggctgcagtaagccatgattacaccactgcacttgagcctgggcagcagagtgagacctgtctttaaaaaaaaaaaggagctgggcacggtggctcatgcctgtaatcccagcactttgggaggccgaggcaggcagatcacgaggtcaggagatcgagaccatcctggctaacagtgaaaccctgtctctactgaaaatacaaaaaaaatcagccgggcgtggtggcgggtgcctgtagtcccagctgctcgggaggctgaggcaggagaatggcatgaacccaggagttggagcttgcagtgagccgagattgtgccactgcactccagcctgggcgacagtgagactgcttctca

SEQ ID NO: 303329 - DNA, 1028 bp, Homo sapiens
tacgggcacctggagttgattcagctgcagctggccgcccagtttgagaattggtgtaagacatcacaatcccattattcagagcgcgtatggagtggaaacgcttgtaaggcttcaccaggatccacctctgatgttcagtgaagaggaccggaaaagtctgctagagcagtgccatctgggtctggatcaaaaacgcagaaaatacgtggttggagagctcatctggaattttgccgatttcatgactaaccagtccaaggatgaaggaaaaactggacctcattatggatttacttttgggatacactcattattccagaggagggtaaaaggctgagaagcttaaggtatttcagtctgttttatgttactcatttgcgaaaagcaggctcatcgaatacaggtgagtttcaacgcgtcttgaatatggcagcatttaaaagtcttcagaccaggcatggtggctcatgcctgtcatcccagcactttgggaggccaaggtgggaggattgcttgaggccaggagttcgagaccagcctgttcagcatagcaggacccccatctctacaaaaactaaacagattagctaggtgtggtggtgtgtgcctgtagtcctagctgcttgggaggctgaggcaggcggatagcctgagcacaggagttggaggctgcagtaagccatgattacaccactgcacttgagcctgggcagcagagtgagacctgtctttaaaaaaaaaaaggagctgggcacggtggctcatgcctgtaatcccagcactttgggaggccgaggcaggcagatcacgaggtcaggagatcgagaccatcctggctaacagtgaaaccctgtctctactgaaaatacaaaaaaaatcagccgggcgtggtggcgggtgcctgtagtcccagctgctcgggaggctgaggcaggagaatggcatgaacccaggagttggagcttgcagtgagccgagattgtgccactgcactccagcctgggcgacagtgagactgcttctca

SEQ ID NO: 303330 - DNA, 183 bp, Homo sapiens
ctggagttgattcagctgcagctggccgcccagtttgagaattggtgtaagacatcacaatcccattattcagagcgcgtatggagtggaaacgcttgtaaggcttcaccaggtaagcggtgttgaactttctgcttgtgtattctctctgggcagagatgccacttgcctcccccaccctgc

SEQ ID NO: 303331 - DNA, 3416 bp, Homo sapiens
ggggccacagataggctaggtacgaggcctggtgttaatcggcacgagggcggaaggcgcgggagcttgcgtgctgctgggcctgagctgtctgtctcgtttctgtccgcgcgccctgcatcccggccccgggcgcccgctggaggtcgccgaggagccacagggctgactggtctgctgcccgggcccaggagtgcctggtgtagcagtcgcggagccatcccggcgtctgctgccatgaccgactctcccctcagaggagactcttcctcagcggtggctgcagagacagatgagcggcggctcctggccgcgggaccgtgagacgggttcgtggccggccatttagggggacgctgcgaccaccgcctgcgcccctccggactggttccttgggccccggaagctcgcggcgggccctgcgggaggcggcatgctcccgcggaggctgctggccgcctggctggcggggacgcggggcgggggcctgctggcgcttctggccaatcagtgccgcttcgtcacgggcctgcgcgtgcggcgcgcgcagcagatcgcgcagctctacggccgcctctactccgagagctcacgccgcgttctcctcggccgcctctggcgccggctgcacggccgtcctggccatgcctctgccttgatggcggcgttagccggcgtcttcgtttgggacgaggagaggatccaggaggaggagttgcagagatctattaatgagatgaagcggttggaagaaatgtcaaatatgtttcagagctctggagtccagcaccaccctccagaaccaaaagcccaaacagaagggaatgaagattcagagggcaaagagcaacgttgggaaatggtgatggataagaaacactttaagctgtggcggcgcccaattacaggcacccacctttaccagtaccgagtttttggaacctacacagatgtgacacctcggcagttcttcaatgttcagctggacacagagtatagaaaaaaatgggatgccctggtaatcaagctggaggtgattgagagggatgtggttagtggttccgaggttcttcactgggtaacccattttccttatccaatgtactcacgggattatgtttatgttcggcggtatagtgtggatcaggaaaacaacatgatggtgttggtgtcgcgtgctgtggagcatccgagtgtgccagagtctccagaattcgtcagggtcagatcatatgaatcccaaatggttatccgtccccacaagtcatttgatgagaatggctttgactacttactaacatacagtgacaatccccaaacggtgtttcctcgctactgtgttagttggatggtttccagtggcatgccagatttcctggagaagctgcacatggccactctgaaagccaagaatatggagattaaagtaaaggactacatctcagctaagcctctggaaatgagtagtgaagccaaggccaccagccagtcctctgagcgaaagaacgagggcagctgtggccctgctcggattgagtatgcttgacaggctttgggataagaagggacaaggtgcttctagccctgtctcagtccgttatcactctgctgtagaagggggacatgccacatgtattagaaggcatctgctgtaacttccagtgcaagataattcaataactgatgtcccatttcattcagagcccttattgctcttatcaaaacagaagaaggctacatttgtgggagtgttgtcatattctcaggccaactgttttgaaattcggtatctcactgagctaatctggaacaaacctctcacctcaggccagaaggggatgacctccatttgcttctctgagtagtttcctctgctgacattccaaatcccaccatcgattgtgcagcgctttggatttccttcagttctccaggtccacctggaaagtatagttggccagttgagtctctcaaatgaggggctactgggagtgctcttggtaacaatcatgatgtgaatgggtgtgaacgatacttggctatgttaagtgccttgtccgcaccttgcttttatctctagagacatgaagttattattaattttttttttttttaagtagagatggagtttcactctgtttcccaggctggtcttgaactcctgggccatgcctggccagggacatgaatttgtacaaagaaatttccctccctgcctgcacaatatcacccattgactcaccttatccaaagcaagtttcctgtgaatcggccagttcttctatattcattggatcattgcctccttcctaaccttccccatttaccaagaacactgggagactaatccttttagatagtagctttttgatgctcaaaacatcacatttaaatttagtttaaaaattttttaacttttgtgtcaaataggagttgaggaattgagcaggattctaccctagtccgattgtatagaaaacaccattttgattcaggtattatttttcatatttcaggtttgacttgttcttttcagaaggctaaagtcagaggaatgggggctgggccactcccttggagctctcagatctacagacaagctgtgtgaatgcatagatgtaatcttgtctcaaatactaatacagtggagatttggtttatgttaccattaagttcctctaaaaagtttttcttcctctcttcagagccaaaataaaagtgaactacactgttcagataaggtcacaatctgatgctgtcagtttgaccgagctggttttgcttatggtcatgctgcaatttgttagaataatagggatcaagttttaaatcctcctccttcccttttttctggagtcttgagggccagagtttttgtttttgttttgttttttttttcctgcttgctactgttttgtggtgttgaaaagtggtttaaacctgagactaacttaaacacttccttgaccttcttgttgcctgttcatttttgtgccaaggaagtagctgccccagtgtatgtcttgccttctccgcgtcattgttggaagaggagagatgcatcgagcagtcccagctgcttttcatttattacttcttctttccaggacctgacagaagtcagggaagagtccctgggttatgtccaaacttagcacctgcaattgttgggatgtggatggatgtgtgcataagagagagagagaatatgtgtgtgtgtgtgtgcgtctgcgagcgcacacacatgcacaagtgcgaaggagttgcggttgctccatgttctgacttagggcaatttgattctgcacttggggtctgtctgtacagttactcatgtcattgtaatgatttcactcctaactgtgacatttttatcaaatgtgtgaataaatacataaagattggtacaaaaaaaa

SEQ ID NO: 303332 - DNA, 847 bp, Homo sapiens
tcgcggaaggcgcgggagcttggaaggcgcgggagcttgcgtgctgctgggcctgagctgtctgtctcgtttctgtccgcgcgccctgcatcccggccccgggcgcccgctggaggtcgccgaggagccacagggctgactggtctgctgcccgggcccaggagtgcctggtgtagcagtcgcggagccatcccggcgtctgctgccatgaccgactctcccctcagaggagactcttcctcagcggtggctgcagagacagatgagcggcggctcctggccgcgggaccgtgagacgggttcgtggccggccatttagggggacgctgcgaccaccgcctgcgcccctccggactggttccttgggccccggaagctcgcggcgggccctgcgggaggcggcatgctcccgcggaggctgctggccgcctggctggcggggacgcggggcgggggcctgctggcgcttctggccaatcagtgccgcttcgtcacgggcctgcgcgtgcggcgcgcgcagcagatcgcgcagctctacggccgcctctactccgagagctcacgccgcgttctcctcggccgcctctggcgccggctgcacggccgtcctggccatgcctctgccttgatggcggcgttagccggcgtcttcgtttgggacgaggagaggatccaggaggaggagttgcagagatctatcactgcagatgacccgcgcgcacagaactgtcaactatgtaccagcagctctggagtccagcaccaaccctccagaaccaccgcccaacccgaagggcactgaccatccgcaggccccaccagcacgcccgcgccccgctgacgccca

SEQ ID NO: 303333 - DNA, 3201 bp, Homo sapiens
ggggccacagataggctaggtacgaggcctggtgttaatcggcacgagggcggaaggcgcgggagcttgcgtgctgctgggcctgagctgtctgtctcgtttctgtccgcgcgccctgcatcccggccccgggcgcccgctggaggtcgccgaggagccacagggctgactggttccttgggccccggaagctcgcggcgggccctgcgggaggcggcatgctcccgcggaggctgctggccgcctggctggcggggacgcggggcgggggcctgctggcgcttctggccaatcagtgccgcttcgtcacgggcctgcgcgtgcggcgcgcgcagcagatcgcgcagctctacggccgcctctactccgagagctcacgccgcgttctcctcggccgcctctggcgccggctgcacggccgtcctggccatgcctctgccttgatggcggcgttagccggcgtcttcgtttgggacgaggagaggatccaggaggaggagttgcagagatctattaatgagatgaagcggttggaagaaatgtcaaatatgtttcagagctctggagtccagcaccaccctccagaaccaaaagcccaaacagaagggaatgaagattcagagggcaaagagcaacgttgggaaatggtgatggataagaaacactttaagctgtggcggcgcccaattacaggcacccacctttaccagtaccgagtttttggaacctacacagatgtgacacctcggcagttcttcaatgttcagctggacacagagtatagaaaaaaatgggatgccctggtaatcaagctggaggtgattgagagggatgtggttagtggttccgaggttcttcactgggtaacccattttccttatccaatgtactcacgggattatgtttatgttcggcggtatagtgtggatcaggaaaacaacatgatggtgttggtgtcgcgtgctgtggagcatccgagtgtgccagagtctccagaattcgtcagggtcagatcatatgaatcccaaatggttatccgtccccacaagtcatttgatgagaatggctttgactacttactaacatacagtgacaatccccaaacggtgtttcctcgctactgtgttagttggatggtttccagtggcatgccagatttcctggagaagctgcacatggccactctgaaagccaagaatatggagattaaagtaaaggactacatctcagctaagcctctggaaatgagtagtgaagccaaggccaccagccagtcctctgagcgaaagaacgagggcagctgtggccctgctcggattgagtatgcttgacaggctttgggataagaagggacaaggtgcttctagccctgtctcagtccgttatcactctgctgtagaagggggacatgccacatgtattagaaggcatctgctgtaacttccagtgcaagataattcaataactgatgtcccatttcattcagagcccttattgctcttatcaaaacagaagaaggctacatttgtgggagtgttgtcatattctcaggccaactgttttgaaattcggtatctcactgagctaatctggaacaaacctctcacctcaggccagaaggggatgacctccatttgcttctctgagtagtttcctctgctgacattccaaatcccaccatcgattgtgcagcgctttggatttccttcagttctccaggtccacctggaaagtatagttggccagttgagtctctcaaatgaggggctactgggagtgctcttggtaacaatcatgatgtgaatgggtgtgaacgatacttggctatgttaagtgccttgtccgcaccttgcttttatctctagagacatgaagttattattaattttttttttttttaagtagagatggagtttcactctgtttcccaggctggtcttgaactcctgggccatgcctggccagggacatgaatttgtacaaagaaatttccctccctgcctgcacaatatcacccattgactcaccttatccaaagcaagtttcctgtgaatcggccagttcttctatattcattggatcattgcctccttcctaaccttccccatttaccaagaacactgggagactaatccttttagatagtagctttttgatgctcaaaacatcacatttaaatttagtttaaaaattttttaacttttgtgtcaaataggagttgaggaattgagcaggattctaccctagtccgattgtatagaaaacaccattttgattcaggtattatttttcatatttcaggtttgacttgttcttttcagaaggctaaagtcagaggaatgggggctgggccactcccttggagctctcagatctacagacaagctgtgtgaatgcatagatgtaatcttgtctcaaatactaatacagtggagatttggtttatgttaccattaagttcctctaaaaagtttttcttcctctcttcagagccaaaataaaagtgaactacactgttcagataaggtcacaatctgatgctgtcagtttgaccgagctggttttgcttatggtcatgctgcaatttgttagaataatagggatcaagttttaaatcctcctccttcccttttttctggagtcttgagggccagagtttttgtttttgttttgttttttttttcctgcttgctactgttttgtggtgttgaaaagtggtttaaacctgagactaacttaaacacttccttgaccttcttgttgcctgttcatttttgtgccaaggaagtagctgccccagtgtatgtcttgccttctccgcgtcattgttggaagaggagagatgcatcgagcagtcccagctgcttttcatttattacttcttctttccaggacctgacagaagtcagggaagagtccctgggttatgtccaaacttagcacctgcaattgttgggatgtggatggatgtgtgcataagagagagagagaatatgtgtgtgtgtgtgtgcgtctgcgagcgcacacacatgcacaagtgcgaaggagttgcggttgctccatgttctgacttagggcaatttgattctgcacttggggtctgtctgtacagttactcatgtcattgtaatgatttcactcctaactgtgacatttttatcaaatgtgtgaataaatacataaagattggtacaaaaaaaa

SEQ ID NO: 303334 - DNA, 3401 bp, Homo sapiens
ggggccacagataggctaggtacgaggcctggtgttaatcggcacgagggcggaaggcgcgggagcttgcgtgctgctgggcctgagctgtctgtctcgtttctgtccgcgcgccctgcatcccggccccgggcgcccgctggaggtcgccgaggagccacagggctgactggtctgctgcccgggcccaggagtgcctggtgtagcagtcgcggagccatcccggcgtctgctgccatgaccgactctcccctcagaggagactcttcctcagcggtggctgcagagacagatgagcggcggctcctggccgcgggaccgtgagacgggttcgtggccggccatttagggggacgctgcgaccaccgcctgcgcccctccggactggttccttgggccccggaagctcgcggcgggccctgcgggaggcggcatgctcccgcggaggctgctggccgcctggctggcggggacgcggggcgggggcctgctggcgcttctggccaatcagtgccgcttcgtcacgggcctgcgcgtgcggcgcgcgcagcagatcgcgcagctctacggccgcctctactccgagagctcacgccgcgttctcctcggccgcctctggcgccggctgcacggccgtcctggccatgcctctgccttgatggcggcgttagccggcgtcttcgtttgggacgaggagaggatccaggaggaggagttgcagagatctattaatgagatgaagcggttggaagaaatgtcaaatatgtttcagagctctggagtccagcaccaccctccagaaccaaaagcccaaacagaagggaatgaagattcagagggcaaagagcaacgttgggaaatggtgatggataagaaacactttaagctgtggcggcgcccaattacaggcacccacctttaccagtaccgagtttttggaacctacacagatgtgacacctcggcagttcttcaatgttcagctggacacagagtatagaaaaaaatgggatgccctggtaatcaagctggaggtttgtgtgatgcagaacactaatcctgcccctccatttctttagtatccaatgtactcacgggattatgtttatgttcggcggtatagtgtggatcaggaaaacaacatgatggtgttggtgtcgcgtgctgtggagcatccgagtgtgccagagtctccagaattcgtcagggtcagatcatatgaatcccaaatggttatccgtccccacaagtcatttgatgagaatggctttgactacttactaacatacagtgacaatccccaaacggtgtttcctcgctactgtgttagttggatggtttccagtggcatgccagatttcctggagaagctgcacatggccactctgaaagccaagaatatggagattaaagtaaaggactacatctcagctaagcctctggaaatgagtagtgaagccaaggccaccagccagtcctctgagcgaaagaacgagggcagctgtggccctgctcggattgagtatgcttgacaggctttgggataagaagggacaaggtgcttctagccctgtctcagtccgttatcactctgctgtagaagggggacatgccacatgtattagaaggcatctgctgtaacttccagtgcaagataattcaataactgatgtcccatttcattcagagcccttattgctcttatcaaaacagaagaaggctacatttgtgggagtgttgtcatattctcaggccaactgttttgaaattcggtatctcactgagctaatctggaacaaacctctcacctcaggccagaaggggatgacctccatttgcttctctgagtagtttcctctgctgacattccaaatcccaccatcgattgtgcagcgctttggatttccttcagttctccaggtccacctggaaagtatagttggccagttgagtctctcaaatgaggggctactgggagtgctcttggtaacaatcatgatgtgaatgggtgtgaacgatacttggctatgttaagtgccttgtccgcaccttgcttttatctctagagacatgaagttattattaattttttttttttttaagtagagatggagtttcactctgtttcccaggctggtcttgaactcctgggccatgcctggccagggacatgaatttgtacaaagaaatttccctccctgcctgcacaatatcacccattgactcaccttatccaaagcaagtttcctgtgaatcggccagttcttctatattcattggatcattgcctccttcctaaccttccccatttaccaagaacactgggagactaatccttttagatagtagctttttgatgctcaaaacatcacatttaaatttagtttaaaaattttttaacttttgtgtcaaataggagttgaggaattgagcaggattctaccctagtccgattgtatagaaaacaccattttgattcaggtattatttttcatatttcaggtttgacttgttcttttcagaaggctaaagtcagaggaatgggggctgggccactcccttggagctctcagatctacagacaagctgtgtgaatgcatagatgtaatcttgtctcaaatactaatacagtggagatttggtttatgttaccattaagttcctctaaaaagtttttcttcctctcttcagagccaaaataaaagtgaactacactgttcagataaggtcacaatctgatgctgtcagtttgaccgagctggttttgcttatggtcatgctgcaatttgttagaataatagggatcaagttttaaatcctcctccttcccttttttctggagtcttgagggccagagtttttgtttttgttttgttttttttttcctgcttgctactgttttgtggtgttgaaaagtggtttaaacctgagactaacttaaacacttccttgaccttcttgttgcctgttcatttttgtgccaaggaagtagctgccccagtgtatgtcttgccttctccgcgtcattgttggaagaggagagatgcatcgagcagtcccagctgcttttcatttattacttcttctttccaggacctgacagaagtcagggaagagtccctgggttatgtccaaacttagcacctgcaattgttgggatgtggatggatgtgtgcataagagagagagagaatatgtgtgtgtgtgtgtgcgtctgcgagcgcacacacatgcacaagtgcgaaggagttgcggttgctccatgttctgacttagggcaatttgattctgcacttggggtctgtctgtacagttactcatgtcattgtaatgatttcactcctaactgtgacatttttatcaaatgtgtgaataaatacataaagattggtacaaaaaaaa

SEQ ID NO: 303335 - DNA, 3361 bp, Homo sapiens
ggggccacagataggctaggtacgaggcctggtgttaatcggcacgagggcggaaggcgcgggagcttgcgtgctgctgggcctgagctgtctgtctcgtttctgtccgcgcgccctgcatcccggccccgggcgcccgctggaggtcgccgaggagccacagggctgactggtctgctgccatgaccgactctcccctcagaggagactcttcctcagcggtggctgcagagacagatgagcggcggctcctggccgcgggaccgtgagacgggttcgtggccggccatttagggggacgctgcgaccaccgcctgcgcccctccggactggttccttgggccccggaagctcgcggcgggccctgcgggaggcggcatgctcccgcggaggctgctggccgcctggctggcggggacgcggggcgggggcctgctggcgcttctggccaatcagtgccgcttcgtcacgggcctgcgcgtgcggcgcgcgcagcagatcgcgcagctctacggccgcctctactccgagagctcacgccgcgttctcctcggccgcctctggcgccggctgcacggccgtcctggccatgcctctgccttgatggcggcgttagccggcgtcttcgtttgggacgaggagaggatccaggaggaggagttgcagagatctattaatgagatgaagcggttggaagaaatgtcaaatatgtttcagagctctggagtccagcaccaccctccagaaccaaaagcccaaacagaagggaatgaagattcagagggcaaagagcaacgttgggaaatggtgatggataagaaacactttaagctgtggcggcgcccaattacaggcacccacctttaccagtaccgagtttttggaacctacacagatgtgacacctcggcagttcttcaatgttcagctggacacagagtatagaaaaaaatgggatgccctggtaatcaagctggaggtgattgagagggatgtggttagtggttccgaggttcttcactgggtaacccattttccttatccaatgtactcacgggattatgtttatgttcggcggtatagtgtggatcaggaaaacaacatgatggtgttggtgtcgcgtgctgtggagcatccgagtgtgccagagtctccagaattcgtcagggtcagatcatatgaatcccaaatggttatccgtccccacaagtcatttgatgagaatggctttgactacttactaacatacagtgacaatccccaaacggtgtttcctcgctactgtgttagttggatggtttccagtggcatgccagatttcctggagaagctgcacatggccactctgaaagccaagaatatggagattaaagtaaaggactacatctcagctaagcctctggaaatgagtagtgaagccaaggccaccagccagtcctctgagcgaaagaacgagggcagctgtggccctgctcggattgagtatgcttgacaggctttgggataagaagggacaaggtgcttctagccctgtctcagtccgttatcactctgctgtagaagggggacatgccacatgtattagaaggcatctgctgtaacttccagtgcaagataattcaataactgatgtcccatttcattcagagcccttattgctcttatcaaaacagaagaaggctacatttgtgggagtgttgtcatattctcaggccaactgttttgaaattcggtatctcactgagctaatctggaacaaacctctcacctcaggccagaaggggatgacctccatttgcttctctgagtagtttcctctgctgacattccaaatcccaccatcgattgtgcagcgctttggatttccttcagttctccaggtccacctggaaagtatagttggccagttgagtctctcaaatgaggggctactgggagtgctcttggtaacaatcatgatgtgaatgggtgtgaacgatacttggctatgttaagtgccttgtccgcaccttgcttttatctctagagacatgaagttattattaattttttttttttttaagtagagatggagtttcactctgtttcccaggctggtcttgaactcctgggccatgcctggccagggacatgaatttgtacaaagaaatttccctccctgcctgcacaatatcacccattgactcaccttatccaaagcaagtttcctgtgaatcggccagttcttctatattcattggatcattgcctccttcctaaccttccccatttaccaagaacactgggagactaatccttttagatagtagctttttgatgctcaaaacatcacatttaaatttagtttaaaaattttttaacttttgtgtcaaataggagttgaggaattgagcaggattctaccctagtccgattgtatagaaaacaccattttgattcaggtattatttttcatatttcaggtttgacttgttcttttcagaaggctaaagtcagaggaatgggggctgggccactcccttggagctctcagatctacagacaagctgtgtgaatgcatagatgtaatcttgtctcaaatactaatacagtggagatttggtttatgttaccattaagttcctctaaaaagtttttcttcctctcttcagagccaaaataaaagtgaactacactgttcagataaggtcacaatctgatgctgtcagtttgaccgagctggttttgcttatggtcatgctgcaatttgttagaataatagggatcaagttttaaatcctcctccttcccttttttctggagtcttgagggccagagtttttgtttttgttttgttttttttttcctgcttgctactgttttgtggtgttgaaaagtggtttaaacctgagactaacttaaacacttccttgaccttcttgttgcctgttcatttttgtgccaaggaagtagctgccccagtgtatgtcttgccttctccgcgtcattgttggaagaggagagatgcatcgagcagtcccagctgcttttcatttattacttcttctttccaggacctgacagaagtcagggaagagtccctgggttatgtccaaacttagcacctgcaattgttgggatgtggatggatgtgtgcataagagagagagagaatatgtgtgtgtgtgtgtgcgtctgcgagcgcacacacatgcacaagtgcgaaggagttgcggttgctccatgttctgacttagggcaatttgattctgcacttggggtctgtctgtacagttactcatgtcattgtaatgatttcactcctaactgtgacatttttatcaaatgtgtgaataaatacataaagattggtacaaaaaaaa

SEQ ID NO: 303336 - DNA, 3377 bp, Homo sapiens
ggggccacagataggctaggtacgaggcctggtgttaatcggcacgagggcggaaggcgcgggagcttgcgtgctgctgggcctgagctgtctgtctcgtttctgtccgcgcgccctgcatcccggccccgggcgcccgctggaggtcgccgaggagccacagggctgactggtctgctgcccgggcccaggagtgcctggtgtagcagtcgcggagccatcccggcgtctgctgccatgaccgactctcccctcagaggagactcttcctcagcggtggctgcagagacagatgagcggcggctcctggccgcgggaccgtgagacgggttcgtggccggccatttagggggacgctgcgaccaccgcctgcgcccctccggactggttccttgggccccggaagctcgcggcgggccctgcgggaggcggcatgctcccgcggaggctgctggcgcttctggccaatcagtgccgcttcgtcacgggcctgcgcgtgcggcgcgcgcagcagatcgcgcagctctacggccgcctctactccgagagctcacgccgcgttctcctcggccgcctctggcgccggctgcacggccgtcctggccatgcctctgccttgatggcggcgttagccggcgtcttcgtttgggacgaggagaggatccaggaggaggagttgcagagatctattaatgagatgaagcggttggaagaaatgtcaaatatgtttcagagctctggagtccagcaccaccctccagaaccaaaagcccaaacagaagggaatgaagattcagagggcaaagagcaacgttgggaaatggtgatggataagaaacactttaagctgtggcggcgcccaattacaggcacccacctttaccagtaccgagtttttggaacctacacagatgtgacacctcggcagttcttcaatgttcagctggacacagagtatagaaaaaaatgggatgccctggtaatcaagctggaggtgattgagagggatgtggttagtggttccgaggttcttcactgggtaacccattttccttatccaatgtactcacgggattatgtttatgttcggcggtatagtgtggatcaggaaaacaacatgatggtgttggtgtcgcgtgctgtggagcatccgagtgtgccagagtctccagaattcgtcagggtcagatcatatgaatcccaaatggttatccgtccccacaagtcatttgatgagaatggctttgactacttactaacatacagtgacaatccccaaacggtgtttcctcgctactgtgttagttggatggtttccagtggcatgccagatttcctggagaagctgcacatggccactctgaaagccaagaatatggagattaaagtaaaggactacatctcagctaagcctctggaaatgagtagtgaagccaaggccaccagccagtcctctgagcgaaagaacgagggcagctgtggccctgctcggattgagtatgcttgacaggctttgggataagaagggacaaggtgcttctagccctgtctcagtccgttatcactctgctgtagaagggggacatgccacatgtattagaaggcatctgctgtaacttccagtgcaagataattcaataactgatgtcccatttcattcagagcccttattgctcttatcaaaacagaagaaggctacatttgtgggagtgttgtcatattctcaggccaactgttttgaaattcggtatctcactgagctaatctggaacaaacctctcacctcaggccagaaggggatgacctccatttgcttctctgagtagtttcctctgctgacattccaaatcccaccatcgattgtgcagcgctttggatttccttcagttctccaggtccacctggaaagtatagttggccagttgagtctctcaaatgaggggctactgggagtgctcttggtaacaatcatgatgtgaatgggtgtgaacgatacttggctatgttaagtgccttgtccgcaccttgcttttatctctagagacatgaagttattattaattttttttttttttaagtagagatggagtttcactctgtttcccaggctggtcttgaactcctgggccatgcctggccagggacatgaatttgtacaaagaaatttccctccctgcctgcacaatatcacccattgactcaccttatccaaagcaagtttcctgtgaatcggccagttcttctatattcattggatcattgcctccttcctaaccttccccatttaccaagaacactgggagactaatccttttagatagtagctttttgatgctcaaaacatcacatttaaatttagtttaaaaattttttaacttttgtgtcaaataggagttgaggaattgagcaggattctaccctagtccgattgtatagaaaacaccattttgattcaggtattatttttcatatttcaggtttgacttgttcttttcagaaggctaaagtcagaggaatgggggctgggccactcccttggagctctcagatctacagacaagctgtgtgaatgcatagatgtaatcttgtctcaaatactaatacagtggagatttggtttatgttaccattaagttcctctaaaaagtttttcttcctctcttcagagccaaaataaaagtgaactacactgttcagataaggtcacaatctgatgctgtcagtttgaccgagctggttttgcttatggtcatgctgcaatttgttagaataatagggatcaagttttaaatcctcctccttcccttttttctggagtcttgagggccagagtttttgtttttgttttgttttttttttcctgcttgctactgttttgtggtgttgaaaagtggtttaaacctgagactaacttaaacacttccttgaccttcttgttgcctgttcatttttgtgccaaggaagtagctgccccagtgtatgtcttgccttctccgcgtcattgttggaagaggagagatgcatcgagcagtcccagctgcttttcatttattacttcttctttccaggacctgacagaagtcagggaagagtccctgggttatgtccaaacttagcacctgcaattgttgggatgtggatggatgtgtgcataagagagagagagaatatgtgtgtgtgtgtgtgcgtctgcgagcgcacacacatgcacaagtgcgaaggagttgcggttgctccatgttctgacttagggcaatttgattctgcacttggggtctgtctgtacagttactcatgtcattgtaatgatttcactcctaactgtgacatttttatcaaatgtgtgaataaatacataaagattggtacaaaaaaaa

SEQ ID NO: 303337 - DNA, 3591 bp, Homo sapiens
ggggccacagataggctaggtacgaggcctggtgttaatcggcacgagggcggaaggcgcgggagcttgcgtgctgctgggcctgagctgtctgtctcgtttctgtccgcgcgccctgcatcccggccccgggcgcccgctggaggtcgccgaggagccacagggctgactggtctgctgcccgggcccaggagtgcctggtgtagcagtcgcggagccatcccggcgtctgctgccatgaccgactctcccctcagaggagactcttcctcagcggtggctgcagagacagatgagcggcggctcctggccgcgggaccgtgagacgggttcgtggccggccatttagggggacgctgcgaccaccgcctgcgcccctccggactggttccttgggccccggaagctcgcggcgggccctgcgggaggcggcatgctcccgcggaggctgctggccgcctggctggcggggacgcggggcgggggcctgctggcgcttctggccaatcagtgccgcttcgtcacgggcctgcgcgtgcggcgcgcgcagcagatcgcgcagctctacggccgcctctactccgagagctcacgccgcgttctcctcggccgcctctggcgccggctgcacggccgtcctggccatgcctctgccttgatggcggcgttagccggcgtcttcgtttgggacgaggagaggatccaggaggaggagttgcagagatctattaatgagatgaagcggttggaagaaatgtcaaatatgtttcagagctctggagtccagcaccaccctccagaaccaaaagcccaaacagaagggaatgaagattcagagggcaaagagcaacgttgggaaatggtgatggataagaaacactttaagctgtggcggcgcccaattacaggcacccacctttaccagtaccgagtttttggaacctacacagatgtgacacctcggcagttcttcaatgttcagctggacacagagtatagaaaaaaatgggatgccctggtaatcaagctggaggtgattgagagggatgtggttagtggttccgaggttcttcactgggtaacccattttccttatccaatgtactcacgggattatgtttatgttcggcggtatagtgtggatcaggaaaacaacatgatggtgttggtgtcgcgtgctgtggagcatccgagtgtgccagagtctccagaattcgtcagggtcagatcatatgaatcccaaatggttatccgtccccacaagtcatttgatgagaatggctttgactacttactaacatacagtgacaatccccaaacggtgtttcctcgctactgtgttagttggatggtttccagtggcatgccagatttcctggagaagctgcacatggccactctgaaagccaagaatatggagattaaagtaaaggactacatctcagctaagcctctggaaatgagtagtgaagccaaggccaccagccagtcctctgagcgaaagaacgagggcagctgtggccctgctcggattgagtatgcttgacaggctttgggataagaagggacaaggtgcttctagccctgtctcagtccgttatcactctgctgtagaagggggacatgccacatgtattagaaggcatctgctgtaacttccagtgcaagataattcaataactgatgtcccatttcattcagagcccttattgctcttatcaaaacagaagaaggctacatttgtgggagtgttgtcatattctcaggccaactgttttgaaattcggtatctcactgagctaatctggaacaaacctctcacctcaggccagaaggggatgacctccatttgcttctctgagtagtttcctctgctgacattccaaatcccaccatcgattgtgcagcgctttggatttccttcagttctccaggtccacctggaaagtatagttggccagttgagtctctcaaatgaggggctactgggagtgctcttggtaacaatcatgatgtgaatgggtgtgaacgatacttggctatgttaagtgccttgtccgcaccttgcttttatctctagagacatgaagttattattaattttttttttttttaagtagagatggagtttcactctgtttcccaggctggtcttgaactcctgggccatgcctggccagggacatgaatttgtacaaagaaatttccctccctgcctgcacaatatcacccattgactcaccttatccaaagcaagtttcctgtgaatcggccagttcttctatattcattggatcattgcctccttcctaaccttccccatttaccaagaacactgggagactaatccttttagatagtagctttttgatgctcaaaacatcacatttaaatttagtttaaaaattttttaacttttgtgtcaaataggagttgaggaattgagcaggattctaccctagtccgattgtatagaaaacaccattttgattcaggtattatttttcatatttcaggtttgacttgttcttttcagaaggctaaagtcagaggaatgggggctgggccactcccttggagctctcagatctacagacaagctgtgtgaatgcatagatgtaatcttgtctcaaatactaatacagtggagatttggtttatgttaccattaagttcctctaaaaagtttttcttcctctcttcagagccaaaataaaagtgaactacactgttcagataaggtcacaatctgatgctgtcagtttgaccgagctggttttgcttatggtcatgctgcaatttgttagaataatagggatcaagttttaaatcctcctccttcccttttttctggagtcttgagggccagagtttttgtttttgttttgttttttttttcctgcttgctactgttttgtggtgttgaaaagtggtttaaacctgagactaacttaaacacttccttgaccttcttgttgcctgttcatttttgtgccaaggaagtagctgccccagtgtatgtcttgccttctccgcgtcattgttggaagaggagagatgcatcgagcagtcccagctgcttttcatttattacttcttctttccaggacctgacagaagtcagggaagagtccctgggttatgtccaaacttagcacctgcaattgttgggatgtggatggatgtgtgcataagagagagagagaatatgtgtgtgtgtgtgtgcgtctgcgagcgcacacacatgcacaagtgcgaaggagttgcggttgctccatgttctgacttagggcaatttgattctgcacttggggtctgtctgtacagttactcatgtcattgtaatgatttcactcctaactgtgacatttttatcaaatgtgtgaataaatacataaagattggtacaaaaaaaaaacaaacaagaaaaacaagaaaacaaaacaaagcaaaaaacagagcgcggtcgaccgcaagcaaaagcacccagcaaggtccacccaacacaacgcacccaccacacgcacgaaaacacaataggcgcccacaaggaaccaaaacaaaacgccagggccacccggcctaaaaaag

SEQ ID NO: 303338 - DNA, 3455 bp, Homo sapiens
ggggccacagataggctaggtacgaggcctggtgttaatcggcacgagggcggaaggcgcgggagcttgcgtgctgctgggcctgagctgtctgtctcgtttctgtccgcgcgccctgcatcccggccccgggcgcccgctggaggtcgccgaggagccacagggctgactggtctgctgcccgggcccaggagtgcctggtgtagcagtcgcggagccatcccggcgtctgctgccatgaccgactctcccctcagaggagactcttcctcagcggtggctgcagagacagatgagcggcggctcctggccgcgggaccgtgagacgggttcgtggccggccatttagggggacgctgcgaccaccgcctgcgcccctccggactggttccttgggccccggaagctcgcggcgggccctgcgggaggcggcatgctcccgcggaggctgctggccgcctggctggcggggacgcggggcgggggcctgctggcgcttctggccaatcagtgccgcttcgtcacgggcctgcgcgtgcggcgcgcgcagcagatcgcgcagctctacggccgcctctactccgagagctcacgccgcgttctcctcggccgcctctggcgccggctgcacggccgtcctggccatgcctctgccttgatggcggcgttagccggcgtcttcgtttgggacgaggagaggatccaggaggaggagttgcagagatctattaatgagatgaagcggttggaagaaatgtcaaatatgtttcagagctctggagtccagcaccaccctccagaaccaaaagcccaaacagaagggaatgaagattcagagggcaaagagcaacgttgggaaatggtgatggataagaaacactttaagctgtggcggcgcccaattacaggcacccacctttaccagtaccgagtttttggaacctacacagatgtgacacctcggcagttcttcaatgttcagctggacacagagtatagaaaaaaatgggatgccctggtaatcaagctggaggtgattgagagggatgtggttagtggttccgaggttcttcactgggtaacccattttccttatccaatgtactcacgggattatgtttatgttcggcggtatagtgtggatcaggaaaacaacatgatggtgttggtgtcgcgtgctgtggagcatccgagtgtgccagagtctccagaattcgtcagggtcagatcatatgaatcccaaatggttatccgtccccacaagtcatttgatgagaatggctttgactacttactaacatacagtgacaatccccaaacggtgtttcctcgctactgtgttagttggatggtttccagtggcatgccagatttcctggagaagctgcacatggccactctgaaagccaagaatatggagattaaagtaaaggactacatctcagctaagcctctggaaatgagtagtgaagccaaggccaccagccagtcctctgagcgaaagaacgagggcagctgtggccctgctcggattgagtatgcttgacaggctttgggataagaagggacaaggtgcttctagccctgtctcagtccgttatcactctgctgtagaagggggacatgccacatgtattagaaggcatctgctgtaacttccagtgcaagataattcaataactgatgtcccatttcattcagagcccttattgctcttatcaaaacagaagaaggctacatttgtgggagtgttgtcatattctcaggccaactgttttgaaattcggtatctcactgagctaatctggaacaaacctctcacctcaggccagaaggggatgacctccatttgcttctctgagtagtttcctctgctgacattccaaatcccaccatcgattgtgcagcgctttggatttccttcagttctccaggtccacctggaaagtatagttggccagttgagtctctcaaatgaggggctactgggagtgctcttggtaacaatcatgatgtgaatgggtgtgaacgatacttggctatgttaagtgccttgtccgcaccttgcttttatctctagagacatgaagttattattaattttttttttttttaagtagagatggagtttcactctgtttcccaggctggtcttgaactcctgggccatgcctggccagggacatgaatttgtacaaagaaatttccctccctgcctgcacaatatcacccattgactcaccttatccaaagcaagtttcctgtgaatcggccagttcttctatattcattggatcattgcctccttcctaaccttccccatttaccaagaacactgggagactaatccttttagatagtagctttttgatgctcaaaacatcacatttaaatttagtttaaaaattttttaacttttgtgtcaaataggagttgaggaattgagcaggattctaccctagtccgattgtatagaaaacaccattttgattcaggtattatttttcatatttcaggtttgacttgttcttttcagaaggctaaagtcagaggaatgggggctgggccactcccttggagctctcagatctacagacaagctgtgtgaatgcatagatgtaatcttgtctcaaatactaatacagtggagatttggtttatgttaccattaagttcctctaaaaagtttttcttcctctcttcagagccaaaataaaagtgaactacactgttcagataaggtcacaatctgatgctgtcagtttgaccgagctggttttgcttatggtcatgctgcaatttgttagaataatagggatcaagttttaaatcctcctccttcccttttttctggagtcttgagggccagagtttttgtttttgttttgttttttttttcctgcttgctactgttttgtggtgttgaaaagtggtttaaacctgagactaacttaaacacttccttgaccttcttgttgcctgttcatttttgtgccaaggaagtagctgccccagtgtatgtcttgccttctccgcgtcattgttggaagaggagagatgcatcgagcagtcccagctgcttttcatttattacttcttctttccaggacctgacagaagtcagggaagagtccctgggttatgtccaaacttagcacctgcaattgttgggatgtggatggatgtgtgcataagagagagagagaatatgtgtgtgtgtgtgtgcgtctgcgagcgcacacacatgcacaagtgcgaaggagttgcggttgctccatgttctgacttagggcaatttgattctgcacttggggtctgtctgtacagttactcatgtcattgtaatgatttcactcctaactgtgacatttttatcaaatgtgtgaataaatacataaagattggtacaaaaaaaaaaaagtcgacgcggccgcgaatttagtagtagtagacga

SEQ ID NO: 303339 - DNA, 3945 bp, Homo sapiens
ggggccacagataggctaggtacgaggcctggtgttaatcggcacgagggcggaaggcgcgggagcttgcgtgctgctgggcctgagctgtctgtctcgtttctgtccgcgcgccctgcatcccggccccgggcgcccgctggaggtcgccgaggagccacagggctgactggtctgctgcccgggcccaggagtgcctggtgtagcagtcgcggagccatcccggcgtctgctgccatgaccgactctcccctcagaggagactcttcctcagcggtggctgcagagacagatgagcggcggctcctggccgcgggaccgtgagacgggttcgtggccggccatttagggggacgctgcgaccaccgcctgcgcccctccggactggttccttgggccccggaagctcgcggcgggccctgcgggaggcggcatgctcccgcggaggctgctggccgcctggctggcggggacgcggggcgggggcctgctggcgcttctggccaatcagtgccgcttcgtcacgggcctgcgcgtgcggcgcgcgcagcagatcgcgcagctctacggccgcctctactccgagagctcacgccgcgttctcctcggccgcctctggcgccggctgcacggccgtcctggccatgcctctgccttgatggcggcgttagccggcgtcttcgtttgggacgaggagaggatccaggaggaggagttgcagagatctattaatgagatgaagcggttggaagaaatgtcaaatatgtttcagagctctggagtccagcaccaccctccagaaccaaaagcccaaacagaagggaatgaagattcagagggcaaagagcaacgttgggaaatggtgatggataagaaacactttaagctgtggcggcgcccaattacaggcacccacctttaccagtaccgagtttttggaacctacacagatgtgacacctcggcagttcttcaatgttcagctggacacagagtatagaaaaaaatgggatgccctggtaatcaagctggaggtgattgagagggatgtggttagtggttccgaggttcttcactgggtaacccattttccttatccaatgtactcacgggattatgtttatgttcggcggtatagtgtggatcaggaaaacaacatgatggtgttggtgtcgcgtgctgtggagcatccgagtgtgccagagtctccagaattcgtcagggtcagatcatatgaatcccaaatggttatccgtccccacaagtcatttgatgagaatggctttgactacttactaacatacagtgacaatccccaaacggtgtttcctcgctactgtgttagttggatggtttccagtggcatgccagatttcctggagaagctgcacatggccactctgaaagccaagaatatggagattaaagtaaaggactacatctcagctaagcctctggaaatgagtagtgaagccaaggccaccagccagtcctctgagcgaaagaacgagggcagctgtggccctgctcggattgagtatgcttgacaggctttgggataagaagggacaaggtgcttctagccctgtctcagtccgttatcactctgctgtagaagggggacatgccacatgtattagaaggcatctgctgtaacttccagtgcaagataattcaataactgatgtcccatttcattcagagcccttattgctcttatcaaaacagaagaaggctacatttgtgggagtgttgtcatattctcaggccaactgttttgaaattcggtatctcactgagctaatctggaacaaacctctcacctcaggccagaaggggatgacctccatttgcttctctgagtagtttcctctgctgacattccaaatcccaccatcgattgtgcagcgctttggatttccttcagttctccaggtccacctggaaagtatagttggccagttgagtctctcaaatgaggggctactgggagtgctcttggtaacaatcatgatgtgaatgggtgtgaacgatacttggctatgttaagtgccttgtccgcaccttgcttttatctctagagacatgaagttattattaattttttttttttttaagtagagatggagtttcactctgtttcccaggctggtcttgaactcctgggccatgcctggccagggacatgaatttgtacaaagaaatttccctccctgcctgcacaatatcacccattgactcaccttatccaaagcaagtttcctgtgaatcggccagttcttctatattcattggatcattgcctccttcctaaccttccccatttaccaagaacactgggagactaatccttttagatagtagctttttgatgctcaaaacatcacatttaaatttagtttaaaaattttttaacttttgtgtcaaataggagttgaggaattgagcaggattctaccctagtccgattgtatagaaaacaccattttgattcaggtattatttttcatatttcaggtttgacttgttcttttcagaaggctaaagtcagaggaatgggggctgggccactcccttggagctctcagatctacagacaagctgtgtgaatgcatagatgtaatcttgtctcaaatactaatacagtggagatttggtttatgttaccattaagttcctctaaaaagtttttcttcctctcttcagagccaaaataaaagtgaactacactgttcagataaggtcacaatctgatgctgtcagtttgaccgagctggttttgcttatggtcatgctgcaatttgttagaataatagggatcaagttttaaatcctcctccttcccttttttctggagtcttgagggccagagtttttgtttttgttttgttttttttttcctgcttgctactgttttgtggtgttgaaaagtggtttaaacctgagactaacttaaacacttccttgaccttcttgttgcctgttcatttttgtgccaaggaagtagctgccccagtgtatgtcttgccttctccgcgtcattgttggaagaggagagatgcatcgagcagtcccagctgcttttcatttattacttcttctttccaggacctgacagaagtcagggaagagtccctgggttatgtccaaacttagcacctgcaattgttgggatgtggatggatgtgtgcataagagagagagagaatatgtgtgtgtgtgtgtgcgtctgcgagcgcacacacatgcacaagtgcgaaggagttgcggttgctccatgttctgacttagggcaatttgattctgcacttggggtctgtctgtacagttactcatgtcattgtaatgatttcactcctaactgtgacatttttatcaaatgtgtgaataaatacataaagattggtacaaaaaaaaaaaaaaaaaaaaaaaaaaaaaaaaaaaaaaaaaaaaaaaaaaaaaaaaagaaacaaaatgacaaaaaataaaaaaaaataaacagagatcacacaaaaaaaagaggggcggcgcgcggtaagttgaataatattcttgaacgcgggcgacgctactttttttagtataccacagcgatgactttgttctacaaggaggcaggcggcgccttcataatgatagggtggtgatttatgtaataaagtagacccgcggcgctgttgttttataaaaaccacgctagttaggcagtgaatgaaacattgtggcactataccaccctaatttctgtgtggagcgcaccataccacttctatgtgttgcgcgaaccctccatattacatgtaaagcaactccccccgccataatagtaagattgccaatacgcgcgaatactattctaaatgtgccaaaaaatatgttaatattacacgacgtagtaaatatggtcgtaagagaaagattctttcgcagattatttataacgaca

SEQ ID NO: 303340 - DNA, 2977 bp, Homo sapiens
tcgcggaaggcgcgggagcttggaaggcgcgggagcttgcgtgctgctgggcctgagctgtctgtctcgtttctgtccgcgcgccctgcatcccggccccgggcgcccgctggaggtcgccgaggagccacagggctgactggtctgctgcccgggcccaggagtgcctggtgtagcagtcgcggagccatcccggcgtctgctgccatgaccgactctcccctcagaggagactcttcctcagcggtggctgcagagacagatgagcggcggctcctggccgcgggaccgtgagacggatctattaatgagatgaagcggttggaagaaatgtcaaatatgtttcagagctctggagtccagcaccaccctccagaaccaaaagcccaaacagaagggaatgaagattcagagggcaaagagcaacgttgggaaatggtgatggataagaaacactttaagctgtggcggcgcccaattacaggcacccacctttaccagtaccgagtttttggaacctacacagatgtgacacctcggcagttcttcaatgttcagctggacacagagtatagaaaaaaatgggatgccctggtaatcaagctggaggtttgtgtgatgcagaacactaatcctgcccctccatttctttagtatccaatgtactcacgggattatgtttatgttcggcggtatagtgtggatcaggaaaacaacatgatggtgttggtgtcgcgtgctgtggagcatccgagtgtgccagagtctccagaattcgtcagggtcagatcatatgaatcccaaatggttatccgtccccacaagtcatttgatgagaatggctttgactacttactaacatacagtgacaatccccaaacggtgtttcctcgctactgtgttagttggatggtttccagtggcatgccagatttcctggagaagctgcacatggccactctgaaagccaagaatatggagattaaagtaaaggactacatctcagctaagcctctggaaatgagtagtgaagccaaggccaccagccagtcctctgagcgaaagaacgagggcagctgtggccctgctcggattgagtatgcttgacaggctttgggataagaagggacaaggtgcttctagccctgtctcagtccgttatcactctgctgtagaagggggacatgccacatgtattagaaggcatctgctgtaacttccagtgcaagataattcaataactgatgtcccatttcattcagagcccttattgctcttatcaaaacagaagaaggctacatttgtgggagtgttgtcatattctcaggccaactgttttgaaattcggtatctcactgagctaatctggaacaaacctctcacctcaggccagaaggggatgacctccatttgcttctctgagtagtttcctctgctgacattccaaatcccaccatcgattgtgcagcgctttggatttccttcagttctccaggtccacctggaaagtatagttggccagttgagtctctcaaatgaggggctactgggagtgctcttggtaacaatcatgatgtgaatgggtgtgaacgatacttggctatgttaagtgccttgtccgcaccttgcttttatctctagagacatgaagttattattaattttttttttttttaagtagagatggagtttcactctgtttcccaggctggtcttgaactcctgggccatgcctggccagggacatgaatttgtacaaagaaatttccctccctgcctgcacaatatcacccattgactcaccttatccaaagcaagtttcctgtgaatcggccagttcttctatattcattggatcattgcctccttcctaaccttccccatttaccaagaacactgggagactaatccttttagatagtagctttttgatgctcaaaacatcacatttaaatttagtttaaaaattttttaacttttgtgtcaaataggagttgaggaattgagcaggattctaccctagtccgattgtatagaaaacaccattttgattcaggtattatttttcatatttcaggtttgacttgttcttttcagaaggctaaagtcagaggaatgggggctgggccactcccttggagctctcagatctacagacaagctgtgtgaatgcatagatgtaatcttgtctcaaatactaatacagtggagatttggtttatgttaccattaagttcctctaaaaagtttttcttcctctcttcagagccaaaataaaagtgaactacactgttcagataaggtcacaatctgatgctgtcagtttgaccgagctggttttgcttatggtcatgctgcaatttgttagaataatagggatcaagttttaaatcctcctccttcccttttttctggagtcttgagggccagagtttttgtttttgttttgttttttttttcctgcttgctactgttttgtggtgttgaaaagtggtttaaacctgagactaacttaaacacttccttgaccttcttgttgcctgttcatttttgtgccaaggaagtagctgccccagtgtatgtcttgccttctccgcgtcattgttggaagaggagagatgcatcgagcagtcccagctgcttttcatttattacttcttctttccaggacctgacagaagtcagggaagagtccctgggttatgtccaaacttagcacctgcaattgttgggatgtggatggatgtgtgcataagagagagagagaatatgtgtgtgtgtgtgtgcgtctgcgagcgcacacacatgcacaagtgcgaaggagttgcggttgctccatgttctgacttagggcaatttgattctgcacttggggtctgtctgtacagttactcatgtcattgtaatgatttcactcctaactgtgacatttttatcaaatgtgtgaataaatacataaagattggtacaaaaaaaa

SEQ ID NO: 303341 - DNA, 2564 bp, Homo sapiens
ctggtaaaggtgggtgcctgtaattgggcgccgccacagcttaaagtgtttcttatccatcaccatttcccagtaccgagtttttggaacctacacagatgtgacacctcggcagttcttcaatgttcagctggacacagagtatagaaaaaaatgggatgccctggtaatcaagctggaggtgattgagagggatgtggttagtggttccgaggttcttcactgggtaacccattttccttatccaatgtactcacgggattatgtttatgttcggcggtatagtgtggatcaggaaaacaacatgatggtgttggtgtcgcgtgctgtggagcatccgagtgtgccagagtctccagaattcgtcagggtcagatcatatgaatcccaaatggttatccgtccccacaagtcatttgatgagaatggctttgactacttactaacatacagtgacaatccccaaacggtgtttcctcgctactgtgttagttggatggtttccagtggcatgccagatttcctggagaagctgcacatggccactctgaaagccaagaatatggagattaaagtaaaggactacatctcagctaagcctctggaaatgagtagtgaagccaaggccaccagccagtcctctgagcgaaagaacgagggcagctgtggccctgctcggattgagtatgcttgacaggctttgggataagaagggacaaggtgcttctagccctgtctcagtccgttatcactctgctgtagaagggggacatgccacatgtattagaaggcatctgctgtaacttccagtgcaagataattcaataactgatgtcccatttcattcagagcccttattgctcttatcaaaacagaagaaggctacatttgtgggagtgttgtcatattctcaggccaactgttttgaaattcggtatctcactgagctaatctggaacaaacctctcacctcaggccagaaggggatgacctccatttgcttctctgagtagtttcctctgctgacattccaaatcccaccatcgattgtgcagcgctttggatttccttcagttctccaggtccacctggaaagtatagttggccagttgagtctctcaaatgaggggctactgggagtgctcttggtaacaatcatgatgtgaatgggtgtgaacgatacttggctatgttaagtgccttgtccgcaccttgcttttatctctagagacatgaagttattattaattttttttttttttaagtagagatggagtttcactctgtttcccaggctggtcttgaactcctgggccatgcctggccagggacatgaatttgtacaaagaaatttccctccctgcctgcacaatatcacccattgactcaccttatccaaagcaagtttcctgtgaatcggccagttcttctatattcattggatcattgcctccttcctaaccttccccatttaccaagaacactgggagactaatccttttagatagtagctttttgatgctcaaaacatcacatttaaatttagtttaaaaattttttaacttttgtgtcaaataggagttgaggaattgagcaggattctaccctagtccgattgtatagaaaacaccattttgattcaggtattatttttcatatttcaggtttgacttgttcttttcagaaggctaaagtcagaggaatgggggctgggccactcccttggagctctcagatctacagacaagctgtgtgaatgcatagatgtaatcttgtctcaaatactaatacagtggagatttggtttatgttaccattaagttcctctaaaaagtttttcttcctctcttcagagccaaaataaaagtgaactacactgttcagataaggtcacaatctgatgctgtcagtttgaccgagctggttttgcttatggtcatgctgcaatttgttagaataatagggatcaagttttaaatcctcctccttcccttttttctggagtcttgagggccagagtttttgtttttgttttgttttttttttcctgcttgctactgttttgtggtgttgaaaagtggtttaaacctgagactaacttaaacacttccttgaccttcttgttgcctgttcatttttgtgccaaggaagtagctgccccagtgtatgtcttgccttctccgcgtcattgttggaagaggagagatgcatcgagcagtcccagctgcttttcatttattacttcttctttccaggacctgacagaagtcagggaagagtccctgggttatgtccaaacttagcacctgcaattgttgggatgtggatggatgtgtgcataagagagagagagaatatgtgtgtgtgtgtgtgcgtctgcgagcgcacacacatgcacaagtgcgaaggagttgcggttgctccatgttctgacttagggcaatttgattctgcacttggggtctgtctgtacagttactcatgtcattgtaatgatttcactcctaactgtgacatttttatcaaatgtgtgaataaatacataaagattggtacaaaaaaaa

SEQ ID NO: 303342 - DNA, 2370 bp, Homo sapiens
  misc_feature (34)..(34): n is a, c, g, or t
  misc_feature (45)..(45): n is a, c, g, or t
actgctgtacttccagtgcaagataattcaatanctgatgtcccntttatccaatgtactcacgggattatgtttatgttcggcggtatagtgtggatcaggaaaacaacatgatggtgttggtgtcgcgtgctgtggagcatccgagtgtgccagagtctccagaattcgtcagggtcagatcatatgaatcccaaatggttatccgtccccacaagtcatttgatgagaatggctttgactacttactaacatacagtgacaatccccaaacggtgtttcctcgctactgtgttagttggatggtttccagtggcatgccagatttcctggagaagctgcacatggccactctgaaagccaagaatatggagattaaagtaaaggactacatctcagctaagcctctggaaatgagtagtgaagccaaggccaccagccagtcctctgagcgaaagaacgagggcagctgtggccctgctcggattgagtatgcttgacaggctttgggataagaagggacaaggtgcttctagccctgtctcagtccgttatcactctgctgtagaagggggacatgccacatgtattagaaggcatctgctgtaacttccagtgcaagataattcaataactgatgtcccatttcattcagagcccttattgctcttatcaaaacagaagaaggctacatttgtgggagtgttgtcatattctcaggccaactgttttgaaattcggtatctcactgagctaatctggaacaaacctctcacctcaggccagaaggggatgacctccatttgcttctctgagtagtttcctctgctgacattccaaatcccaccatcgattgtgcagcgctttggatttccttcagttctccaggtccacctggaaagtatagttggccagttgagtctctcaaatgaggggctactgggagtgctcttggtaacaatcatgatgtgaatgggtgtgaacgatacttggctatgttaagtgccttgtccgcaccttgcttttatctctagagacatgaagttattattaattttttttttttttaagtagagatggagtttcactctgtttcccaggctggtcttgaactcctgggccatgcctggccagggacatgaatttgtacaaagaaatttccctccctgcctgcacaatatcacccattgactcaccttatccaaagcaagtttcctgtgaatcggccagttcttctatattcattggatcattgcctccttcctaaccttccccatttaccaagaacactgggagactaatccttttagatagtagctttttgatgctcaaaacatcacatttaaatttagtttaaaaattttttaacttttgtgtcaaataggagttgaggaattgagcaggattctaccctagtccgattgtatagaaaacaccattttgattcaggtattatttttcatatttcaggtttgacttgttcttttcagaaggctaaagtcagaggaatgggggctgggccactcccttggagctctcagatctacagacaagctgtgtgaatgcatagatgtaatcttgtctcaaatactaatacagtggagatttggtttatgttaccattaagttcctctaaaaagtttttcttcctctcttcagagccaaaataaaagtgaactacactgttcagataaggtcacaatctgatgctgtcagtttgaccgagctggttttgcttatggtcatgctgcaatttgttagaataatagggatcaagttttaaatcctcctccttcccttttttctggagtcttgagggccagagtttttgtttttgttttgttttttttttcctgcttgctactgttttgtggtgttgaaaagtggtttaaacctgagactaacttaaacacttccttgaccttcttgttgcctgttcatttttgtgccaaggaagtagctgccccagtgtatgtcttgccttctccgcgtcattgttggaagaggagagatgcatcgagcagtcccagctgcttttcatttattacttcttctttccaggacctgacagaagtcagggaagagtccctgggttatgtccaaacttagcacctgcaattgttgggatgtggatggatgtgtgcataagagagagagagaatatgtgtgtgtgtgtgtgcgtctgcgagcgcacacacatgcacaagtgcgaaggagttgcggttgctccatgttctgacttagggcaatttgattctgcacttggggtctgtctgtacagttactcatgtcattgtaatgatttcactcctaactgtgacatttttatcaaatgtgtgaataaatacataaagattggtacaaaaaaaa

SEQ ID NO: 303343 - DNA, 3406 bp, Homo sapiens
ggggccacagataggctaggtacgaggcctggtgttaatcggcacgagggcggaaggcgcgggagcttgcgtgctgctgggcctgagctgtctgtctcgtttctgtccgcgcgccctgcatcccggccccgggcgcccgctggaggtcgccgaggagccacagggctgactggtctgctgcccgggcccaggagtgcctggtgtagcagtcgcggagccatcccggcgtctgctgccatgaccgactctcccctcagaggagactcttcctcagcggtggctgcagagacagatgagcggcggctcctggccgcgggaccgtgagacgggttcgtggccggccatttagggggacgctgcgaccaccgcctgcgcccctccggactggttccttgggccccggaagctcgcggcgggccctgcgggaggcggcatgctcccgcggaggctgctggccgcctggctggcggggacgcggggcgggggcctgctggcgcttctggccaatcagtgccgcttcgtcacgggcctgcgcgtgcggcgcgcgcagcagatcgcgcagctctacggccgcctctactccgagagctcacgccgcgttctcctcggccgcctctggcgccggctgcacggccgtcctggccatgcctctgccttgatggcggcgttagccggcgtcttcgtttgggacgaggagaggatccaggaggaggagttgcagagatctattaatgagatgaagcggttggaagaaatgtcaaatatgtttcagagctctggagtccagcaccaccctccagaaccaaaagcccaaacagaagggaatgaagattcagagggcaaagagcaacgttgggaaatggtgatggataagaaacactttaagctgtggcggcgcccaattacaggcacccacctttaccagtaccgagtttttggaacctacacagatgtgacacctcggcagttcttcaatgttcagctggacacagagtatagaaaaaaatgggatgccctggtaatcaagctggaggtgattgagagggatgtggttagtggttccgaggttcttcactgggtaacccattttccttatccaatgtactcacgggattatgtttatgttcggcggtatagtgtggatcaggaaaacaacatgatggtgttggtgtcgcgtgctgtggagcatccgagtgtgccagagtctccagaattcgtcagggtcagatcatatgaatcccaaatggttatccgtccccacaagtcatttgatgagaatggctttgactacttactaacatacagtgacaatccccaaacggtgtttcctcgctactgtgttagttggatggtttccagtggcatgccagatttcctggagaagctgcacatggccactctgaaagccaagaatatggagattaaagtaaaggactacatctcagctaagcctctggaaatgagtagtgaagccaaggccaccagccagtcctctgagcgaaagaacgagggcagctgtggccctgctcggattgagtatgcttgacaggctttgggataagaagggacaaggtgcttctagccctgtctcagtccgttatcactctgctgtagaagggggacatgccacatgtattagaaggcatctgctgtaacttccagtgcaagataattcaataactgatgtcccatttcattcagagcccttattgctcttatcaaaacagaagaaggctacatttgtgggagtgttgtcatattctcaggccaactgttttgaaattcggtatctcactgagctaatctggaacaaacctctcacctcaggccagaaggggatgacctccatttgcttctctgagtagtttcctctgctgacattccaaatcccaccatcgattgtgcagcgctttggatttccttcagttctccaggtccacctggaaagtatagttggccagttgagtctctcaaatgaggggctactgggagtgctcttggtaacaatcatgatgtgaatgggtgtgaacgatacttggctatgttaagtgccttgtccgcaccttgcttttatctctagagacatgaagttattattaattttttttttttttaagtagagatggagtttcactctgtttcccaggctggtcttgaactcctgggccatgcctggccagggacatgaatttgtacaaagaaatttccctccctgcctgcacaatatcacccattgactcaccttatccaaagcaagtttcctgtgaatcggccagttcttctatattcattggatcattgcctccttcctaaccttccccatttaccaagaacactgggagactaatccttttagatagtagctttttgatgctcaaaacatcacatttaaatttagtttaaaaattttttaacttttgtgtcaaataggagttgaggaattgagcaggattctaccctagtccgattgtatagaaaacaccattttgattcaggtattatttttcatatttcaggtttgacttgttcttttcagaaggctaaagtcagaggaatgggggctgggccactcccttggagctctcagatctacagacaagctgtgtgaatgcatagatgtaatcttgtctcaaatactaatacagtggagatttggtttatgttaccattaagttcctctaaaaagtttttcttcctctcttcagagccaaaataaaagtgaactacactgttcagataaggtcacaatctgatgctgtcagtttgaccgagctggttttgcttatggtcatgctgcaatttgttagaataatagggatcaagttttaaatcctcctccttcccttttttctggagtcttgagggccagagtttttgtttttgttttgttttttttttcctgcttgctactgttttgtggtgttgaaaagtggtttaaacctgagactaacttaaacacttccttgaccttcttgttgcctgttcatttttgtgccaaggaagtagctgccccagtgtatgtcttgccttctccgcgtcattgttggaagaggagagatgcatcgagcagtcccagctgcttttcatttattacttcttctttccagtccccaccacaaagttgtcagtaatacaggtcttattccttgagatagcacaaggcatatgtggcatcaagatcaatggaccccaagacagggagagagttttcatgagggaggggccctaagccattgtggagagacgtcccattagcatgtatgaggggccagcccttagtgcattcagggtaaggcccatggggagggatgccacccttgctcctttggaggacgtgccctcacccctcactggtccactggcttgagactcaccccgtgtgcccagtaaaagcctttgtgcagca

SEQ ID NO: 303344 - DNA, 2566 bp, Homo sapiens
cgcagctagtgggtgtgctttgagctgaactatatacagttatcgtagcaggaatctgtcagcatgttccatagccagaccagcggcgagctattgcacagacacagtagttgcctgcctcagtatacatcatgtcgagttcaagatgacaccggacaaggtgaccgttgcatacaatagagactgctgtgaccgttcgttaccagttgggttaacctgactagtgccttagtccaactgataactaccagctccattatagctggggtcgttcggtctgtacatagtgtggatcaggaaaacaacatgatggtgttggtgtcgcgtgctgtggagcatccgagtgtgccagagtctccagaattcgtcagggtcagatcatatgaatcccaaatggttatccgtccccacaagtcatttgatgagaatggctttgactacttactaacatacagtgacaatccccaaacggtgtttcctcgctactgtgttagttggatggtttccagtggcatgccagatttcctggagaagctgcacatggccactctgaaagccaagaatatggagattaaagtaaaggactacatctcagctaagcctctggaaatgagtagtgaagccaaggccaccagccagtcctctgagcgaaagaacgagggcagctgtggccctgctcggattgagtatgcttgacaggctttgggataagaagggacaaggtgcttctagccctgtctcagtccgttatcactctgctgtagaagggggacatgccacatgtattagaaggcatctgctgtaacttccagtgcaagataattcaataactgatgtcccatttcattcagagcccttattgctcttatcaaaacagaagaaggctacatttgtgggagtgttgtcatattctcaggccaactgttttgaaattcggtatctcactgagctaatctggaacaaacctctcacctcaggccagaaggggatgacctccatttgcttctctgagtagtttcctctgctgacattccaaatcccaccatcgattgtgcagcgctttggatttccttcagttctccaggtccacctggaaagtatagttggccagttgagtctctcaaatgaggggctactgggagtgctcttggtaacaatcatgatgtgaatgggtgtgaacgatacttggctatgttaagtgccttgtccgcaccttgcttttatctctagagacatgaagttattattaattttttttttttttaagtagagatggagtttcactctgtttcccaggctggtcttgaactcctgggccatgcctggccagggacatgaatttgtacaaagaaatttccctccctgcctgcacaatatcacccattgactcaccttatccaaagcaagtttcctgtgaatcggccagttcttctatattcattggatcattgcctccttcctaaccttccccatttaccaagaacactgggagactaatccttttagatagtagctttttgatgctcaaaacatcacatttaaatttagtttaaaaattttttaacttttgtgtcaaataggagttgaggaattgagcaggattctaccctagtccgattgtatagaaaacaccattttgattcaggtattatttttcatatttcaggtttgacttgttcttttcagaaggctaaagtcagaggaatgggggctgggccactcccttggagctctcagatctacagacaagctgtgtgaatgcatagatgtaatcttgtctcaaatactaatacagtggagatttggtttatgttaccattaagttcctctaaaaagtttttcttcctctcttcagagccaaaataaaagtgaactacactgttcagataaggtcacaatctgatgctgtcagtttgaccgagctggttttgcttatggtcatgctgcaatttgttagaataatagggatcaagttttaaatcctcctccttcccttttttctggagtcttgagggccagagtttttgtttttgttttgttttttttttcctgcttgctactgttttgtggtgttgaaaagtggtttaaacctgagactaacttaaacacttccttgaccttcttgttgcctgttcatttttgtgccaaggaagtagctgccccagtgtatgtcttgccttctccgcgtcattgttggaagaggagagatgcatcgagcagtcccagctgcttttcatttattacttcttctttccaggacctgacagaagtcagggaagagtccctgggttatgtccaaacttagcacctgcaattgttgggatgtggatggatgtgtgcataagagagagagagaatatgtgtgtgtgtgtgtgcgtctgcgagcgcacacacatgcacaagtgcgaaggagttgcggttgctccatgttctgacttagggcaatttgattctgcacttggggtctgtctgtacagttactcatgtcattgtaatgatttcactcctaactgtgacatttttatcaaatgtgtgaataaatacataaagattggtacaaaaaaaa

SEQ ID NO: 303345 - DNA, 2112 bp, Homo sapiens
  misc_feature (38)..(38): n is a, c, g, or t
gctcgactctcgaggatacaaccgcgagacgaccttgngttagttggatgtccagtggcatgccagatttcctggagaagctgcacatggccactctgaaagccaagaatatggagattaaagtaaaggactacatctcagctaagcctctggaaatgagtagtgaagccaaggccaccagccagtcctctgagcgaaagaacgagggcagctgtggccctgctcggattgagtatgcttgacaggctttgggataagaagggacaaggtgcttctagccctgtctcagtccgttatcactctgctgtagaagggggacatgccacatgtattagaaggcatctgctgtaacttccagtgcaagataattcaataactgatgtcccatttcattcagagcccttattgctcttatcaaaacagaagaaggctacatttgtgggagtgttgtcatattctcaggccaactgttttgaaattcggtatctcactgagctaatctggaacaaacctctcacctcaggccagaaggggatgacctccatttgcttctctgagtagtttcctctgctgacattccaaatcccaccatcgattgtgcagcgctttggatttccttcagttctccaggtccacctggaaagtatagttggccagttgagtctctcaaatgaggggctactgggagtgctcttggtaacaatcatgatgtgaatgggtgtgaacgatacttggctatgttaagtgccttgtccgcaccttgcttttatctctagagacatgaagttattattaattttttttttttttaagtagagatggagtttcactctgtttcccaggctggtcttgaactcctgggccatgcctggccagggacatgaatttgtacaaagaaatttccctccctgcctgcacaatatcacccattgactcaccttatccaaagcaagtttcctgtgaatcggccagttcttctatattcattggatcattgcctccttcctaaccttccccatttaccaagaacactgggagactaatccttttagatagtagctttttgatgctcaaaacatcacatttaaatttagtttaaaaattttttaacttttgtgtcaaataggagttgaggaattgagcaggattctaccctagtccgattgtatagaaaacaccattttgattcaggtattatttttcatatttcaggtttgacttgttcttttcagaaggctaaagtcagaggaatgggggctgggccactcccttggagctctcagatctacagacaagctgtgtgaatgcatagatgtaatcttgtctcaaatactaatacagtggagatttggtttatgttaccattaagttcctctaaaaagtttttcttcctctcttcagagccaaaataaaagtgaactacactgttcagataaggtcacaatctgatgctgtcagtttgaccgagctggttttgcttatggtcatgctgcaatttgttagaataatagggatcaagttttaaatcctcctccttcccttttttctggagtcttgagggccagagtttttgtttttgttttgttttttttttcctgcttgctactgttttgtggtgttgaaaagtggtttaaacctgagactaacttaaacacttccttgaccttcttgttgcctgttcatttttgtgccaaggaagtagctgccccagtgtatgtcttgccttctccgcgtcattgttggaagaggagagatgcatcgagcagtcccagctgcttttcatttattacttcttctttccaggacctgacagaagtcagggaagagtccctgggttatgtccaaacttagcacctgcaattgttgggatgtggatggatgtgtgcataagagagagagagaatatgtgtgtgtgtgtgtgcgtctgcgagcgcacacacatgcacaagtgcgaaggagttgcggttgctccatgttctgacttagggcaatttgattctgcacttggggtctgtctgtacagttactcatgtcattgtaatgatttcactcctaactgtgacatttttatcaaatgtgtgaataaatacataaagattggtacaaaaaaaa

SEQ ID NO: 303346 - DNA, 1752 bp, Homo sapiens
cgagctcggtaccgggcactctaaatacatgcagaggcggtatggcatcttagtgaaatgggcggcagggctacatttgtgggagtgttgtcatattctcaggccaactgttttgaaattcggtatctcactgagctaatctggaacaaacctctcacctcaggccagaaggggatgacctccatttgcttctctgagtagtttcctctgctgacattccaaatcccaccatcgattgtgcagcgctttggatttccttcagttctccaggtccacctggaaagtatagttggccagttgagtctctcaaatgaggggctactgggagtgctcttggtaacaatcatgatgtgaatgggtgtgaacgatacttggctatgttaagtgccttgtccgcaccttgcttttatctctagagacatgaagttattattaattttttttttttttaagtagagatggagtttcactctgtttcccaggctggtcttgaactcctgggccatgcctggccagggacatgaatttgtacaaagaaatttccctccctgcctgcacaatatcacccattgactcaccttatccaaagcaagtttcctgtgaatcggccagttcttctatattcattggatcattgcctccttcctaaccttccccatttaccaagaacactgggagactaatccttttagatagtagctttttgatgctcaaaacatcacatttaaatttagtttaaaaattttttaacttttgtgtcaaataggagttgaggaattgagcaggattctaccctagtccgattgtatagaaaacaccattttgattcaggtattatttttcatatttcaggtttgacttgttcttttcagaaggctaaagtcagaggaatgggggctgggccactcccttggagctctcagatctacagacaagctgtgtgaatgcatagatgtaatcttgtctcaaatactaatacagtggagatttggtttatgttaccattaagttcctctaaaaagtttttcttcctctcttcagagccaaaataaaagtgaactacactgttcagataaggtcacaatctgatgctgtcagtttgaccgagctggttttgcttatggtcatgctgcaatttgttagaataatagggatcaagttttaaatcctcctccttcccttttttctggagtcttgagggccagagtttttgtttttgttttgttttttttttcctgcttgctactgttttgtggtgttgaaaagtggtttaaacctgagactaacttaaacacttccttgaccttcttgttgcctgttcatttttgtgccaaggaagtagctgccccagtgtatgtcttgccttctccgcgtcattgttggaagaggagagatgcatcgagcagtcccagctgcttttcatttattacttcttctttccaggacctgacagaagtcagggaagagtccctgggttatgtccaaacttagcacctgcaattgttgggatgtggatggatgtgtgcataagagagagagagaatatgtgtgtgtgtgtgtgcgtctgcgagcgcacacacatgcacaagtgcgaaggagttgcggttgctccatgttctgacttagggcaatttgattctgcacttggggtctgtctgtacagttactcatgtcattgtaatgatttcactcctaactgtgacatttttatcaaatgtgtgaataaatacataaagattggtacaaaaaaaa

SEQ ID NO: 303347 - DNA, 1209 bp, Homo sapiens
taccccctggctctgaacttaggagatgagaatgagtcaacgacctgggacctgtgggttgaatgtctgctgaaagcagtaagaagagtatttaccaaggaaagacatgttattttggaggaactggaaggcagtattattattattattttgtagctttttgatgctcaaaacatcacatttaaatttagtttaaaaattttttaacttttgtgtcaaataggagttgaggaattgagcaggattctaccctagtccgattgtatagaaaacaccattttgattcaggtattatttttcatatttcaggtttgacttgttcttttcagaaggctaaagtcagaggaatgggggctgggccactcccttggagctctcagatctacagacaagctgtgtgaatgcatagatgtaatcttgtctcaaatactaatacagtggagatttggtttatgttaccattaagttcctctaaaaagtttttcttcctctcttcagagccaaaataaaagtgaactacactgttcagataaggtcacaatctgatgctgtcagtttgaccgagctggttttgcttatggtcatgctgcaatttgttagaataatagggatcaagttttaaatcctcctccttcccttttttctggagtcttgagggccagagtttttgtttttgttttgttttttttttcctgcttgctactgttttgtggtgttgaaaagtggtttaaacctgagactaacttaaacacttccttgaccttcttgttgcctgttcatttttgtgccaaggaagtagctgccccagtgtatgtcttgccttctccgcgtcattgttggaagaggagagatgcatcgagcagtcccagctgcttttcatttattacttcttctttccaggacctgacagaagtcagggaagagtccctgggttatgtccaaacttagcacctgcaattgttgggatgtggatggatgtgtgcataagagagagagagaatatgtgtgtgtgtgtgtgcgtctgcgagcgcacacacatgcacaagtgcgaaggagttgcggttgctccatgttctgacttagggcaatttgattctgcacttggggtctgtctgtacagttactcatgtcattgtaatgatttcactcctaactgtgacatttttatcaaatgtgtgaataaatacataaagattggtacaaaaaaaa

SEQ ID NO: 303348 - DNA, 1070 bp, Homo sapiens
ggggccacagataggctaggtacgaggcctggtgttaatcggcacgagggcggaaggcgcgggagcttgcgtgctgctgggcctgagctgtctgtctcgtttctgtccgcgcgccctgcatcccggccccgggcgcccgctggaggtcgccgaggagccacagggctgactggtctgctgcccgggcccaggagtgcctggtgtagcagtcgcggagccatcccggcgtctgctgccatgaccgactctcccctcagaggagactcttcctcagcggtggctgcagagacagatgagcggcggctcctggccgcgggaccgtgagacgggttcgtggccggccatttagggggacgctgcgaccaccgcctgcgcccctccggactggttccttgggccccggaagctcgcggcgggccctgcgggaggcggcatgctcccgcggaggctgctggccgcctggctggcggggacgcggggcgggggcctgctggcgcttctggccaatcagtgccgcttcgtcacgggcctgcgcgtgcggcgcgcgcagcagatcgcgcagctctacggccgcctctactccgagagctcacgccgcgttctcctcggccgcctctggcgccggctgcacggccgtcctggccatgcctctgccttgatggcggcgttagccggcgtcttcgtttgggacgaggagaggatccaggaggaggagttgcagagatctattaatgagatgaagcggttggaagaaatgtcaaatatgtttcagagctctggagtccagcaccaccctccagaaccaaaagcccaaacagaagggaatgaagattcagagggcaaagagcaacgttgggaaatggtgatggataagaaacactttaagctgtggcggcgcccaattacaggcacccacctttaccagtaccgaggtgagcccagtgtggctatcttttgggttccatagttgcacaggtgcatgggatttctgttcttcatacttctctaaactgttctggttgtttctcagaaaatttgccgtagttttttgtttattgtttttcttctcc

SEQ ID NO: 303349 - DNA, 555 bp, Homo sapiens
tgccaggttcaagcaattctcctgcttcagcctcccaagtagctgggattacagatgtgcaccaccacgcctagctaatttttgtatttttattagagacagggcttcaccatgttggccaggctggtctcgaactcctgacttcaagtgatccgcccgcctcggccttctccgcgtcattgttggaagaggagagatgcatcgagcagtcccagctgcttttcatttattacttcttctttccaggacctgacagaagtcagggaagagtccctgggttatgtccaaacttagcacctgcaattgttgggatgtggatggatgtgtgcataagagagagagagaatatgtgtgtgtgtgtgtgcgtctgcgagcgcacacacatgcacaagtgcgaaggagttgcggttgctccatgttctgacttagggcaatttgattctgcacttggggtctgtctgtacagttactcatgtcattgtaatgatttcactcctaactgtgacatttttatcaaatgtgtgaataaatacataaagattggtacaaaaaaaa

SEQ ID NO: 303350 - DNA, 991 bp, Homo sapiens
ggggccacagataggctaggtacgaggcctggtgttaatcggcacgagggcggaaggcgcgggagcttgcgtgctgctgggcctgagctgtctgtctcgtttctgtccgcgcgccctgcatcccggccccgggcgcccgctggaggtcgccgaggagccacagggctgactggtctgctgcccgggcccaggagtgcctggtgtagcagtcgcggagccatcccggcgtctgctgccatgaccgactctcccctcagaggagactcttcctcagcggtggctgcagagacagatgagcggcggctcctggccgcgggaccgtgagacgggttcgtggccggccatttagggggacgctgcgaccaccgcctgcgcccctccggactggttccttgggccccggaagctcgcggcgggccctgcgggaggcggcatgctcccgcggaggctgctggccgcctggctggcggggacgcggggcgggggcctgctggcgcttctggccaatcagtgccgcttcgtcacgggcctgcgcgtgcggcgcgcgcagcagatcgcgcagctctacggccgcctctactccgagagctcacgccgcgttctcctcggccgcctctggcgccggctgcacggccgtcctggccatgcctctgccttgatggcggcgttagccggcgtcttcgtttgggacgaggagaggatccaggaggaggagttgcagaggagatctattatgagatgaacggtggaagaaattcaatatgtttcgagctctgagtcagacacctcagaacaagcccaaagagggatgggattctggggacagcactggatggtggggtagaacctttacggggggccattgtggcccttcaacagtttggctccaatgaacccgggtttgttgggggagaataaaaaggcggttagggtgagaggtggcggcggtgaacacataagcaggttgggtggaaacatggttgtgagtaac

SEQ ID NO: 303351 - DNA, 856 bp, Homo sapiens
ggggccacagataggctaggtacgaggcctggtgttaatcggcacgagggcggaaggcgcgggagcttgcgtgctgctgggcctgagctgtctgtctcgtttctgtccgcgcgccctgcatcccggccccgggcgcccgctggaggtcgccgaggagccacagggctgactggtctgctgcccgggcccaggagtgcctggtgtagcagtcgcggagccatcccggcgtctgctgccatgaccgactctcccctcagaggagactcttcctcagcggtggctgcagagacagatgagcggcggctcctggccgcgggaccgtgagacgggttcgtggccggccatttagggggacgctgcgaccaccgcctgcgcccctccggactggttccttgggccccggaagctcgcggcgggccctgcgggaggcggcatgctcccgcggaggctgctggccgcctggctggcggggacgcggggcgggggcctgctggcgcttctggccaatcagtgccgcttcgtcacgggcctgcgcgtgcggcgcgcgcagcagatcgcgcagctctacggccgcctctactccgagagctcacgccgcgttctcctcggccgcctctggcgccggctgcacggccgtcctggccatgcctctgccttgatggcggcgttagccggcgtcttcgtttgggacgaggagaggatccaggaggaggagttgcagagggtgggcgctgcggcgagctctttctgggccgtggggtgggggggcttgtgaaccctggggcctgccctgtggtcgttggcccttgtttacccggtggtcttttaattggcaatacagtcgattgaacctgct

SEQ ID NO: 303352 - DNA, 877 bp, Homo sapiens
ggggccacagataggctaggtacgaggcctggtgttaatcggcacgagggcggaaggcgcgggagcttgcgtgctgctgggcctgagctgtctgtctcgtttctgtccgcgcgccctgcatcccggccccgggcgcccgctggaggtcgccgaggagccacagggctgactggtctgctgcccgggcccaggagtgcctggtgtagcagtcgcggagccatcccggcgtctgctgccatgaccgactctcccctcagaggagactcttcctcagcggtggctgcagagacagatgagcggcggctcctggccgcgggaccgtgagacgggttcgtggccggccatttagggggacgctgcgaccaccgcctgcgcccctccggactggttccttgggccccggaagctcgcggcgggccctgcgggaggcggcatgctcccgcggaggctgctggccgcctggctggcggggacgcggggcgggggcctgctggcgcttctggccaatcagtgccgcttcgtcacgggcctgcgcgtgcggcgcgcgcagcagatcgcgcagctctacggccgcctctactccgagagctcacgccgcgttctcctcggccgcctctggcgccggctgcacggccgtcctggccatgcctctgccttgatggcggcgttagccggcgtcttcgtttgggacgaggagaggatccaggaggaggagttgcagagatctatcactgcagatgacccgcgcgcacagaactgtcaactatgtaccagcagctctggagtccagcaccaaccctccagaaccaccgcccaacccgaagggcactgaccatccgcaggccccaccagcacgcccgcgccccgctgacgccca

SEQ ID NO: 303353 - DNA, 352 bp, Homo sapiens
ggaaaacaacatgatggtgttggtgtcgcggtatgtatggctgcctgtggctgttgccgagttcctttagctgtggccttcattcctacgtacctgagtttgtatattcttagtgtcctatgagtctcccacaggcttccctgcagccagtgccccttccatccagctagaagatgagggactctgactgtctagaaagaatggagagatacaagcttttagttaaactgtttttttgggttctttaatgttggtaatcaaaagaagtgctgttgtttttgacccacagcctagtgagccgtaaattaccaaaggaactcacttcatttttaattaattcatttgtttgttg

SEQ ID NO: 303354 - DNA, 4366 bp, Homo sapiens
agcggagcagctgcagcgggtcgcacggctccggcccatctcggggggcgggcgggggaggcgaggtgcgcgagccgagtccggggcacgatgtccgacgcgggcggcggaaagaagccgcctgtggacccgcaggcaggacccggtccggggccggggcgcgcagctggggaaaggggcctgtcggggtccttccccctggtcctgaagaagctgatggagaaccccccgcgcgaggcgcgcctcgataaggaaaaggggaaggaaaagctggaggaggacgaggccgcagccgccagcaccatggctgtctcagcctccctcatgccacccatctgggacaagaccatcccatatgatggcgaatctttccacctggagtacatggacctggatgagttcctgctggagaatggcatccccgccagccccacccacctggcccacaacctgctgctgcctgtagcagagctagaagggaaggagtctgccagctcttccacagcatccccaccatcctcctccactgccatctttcagccctctgaaaccgtgtccagcacagaatcttccctggagaaggagagggagactcccagtcccatcgaccccaattgtgtggaagtggatgtgaacttcaatccggaccccgccgacctggtgctctccagtgtgccaggcggggagctcttcaaccctcggaagcacaagtttgctgaggaggacctgaagccccagcctatgatcaaaaaggccaagaaggtctttgtccccgacgagcagaaggatgaaaagtactggacaagacgcaagaagaacaacgtggcagctaaacggtcacgggatgcccggcgcctgaaagagaatcagatcaccatccgggcagccttcctggagaaggagaacacagccctgcggacggaggtggccgagctacgcaaggaggtgggcaagtgcaagaccatcgtgtccaagtatgagaccaaatacgggcccttgtaacccgtgccccccgcccgggcggggtactgcctgcacctcagacctctgcctgggggctccctgtaacccctcacacgcgtggagacttatgactcgtcgtgggcgcatggcggcgcacctgctgcaggagcggccacgtctcagcttcattataccatggcctgcgcacgtggcgacgtccctgaggggccagtctcctcactggtggggaacgcaagagaatctgcgtagatgggtgactcagccttagtttctattcttggatgtcccagttgaatcagaaggggacctctggagtacacacctctctcctgggcgctcagggtccctggactctccctcagtctccagcctgggctgccgagggctatctctgcagaatgagttgtgatcattgtcaccctatgtcttctcaggtagcagggcgcgtttccacttaaggtgtgtctgtcacgcacctcattctccccagacagtctttgagtaacatctgttcccatcttccttggaagcaggacacaccagctcctccgtcagtgtctgcatgggtagcaggctgcaggagtggggtctctgcacagcctgggatggggcttggggctggggcctgcagcagaagtgtgcccagcgtttctcagctcccgcaccccttttcccttatggctctgaggccatcggctgtctctgcatttcattggctgtggaggagagactcctaggatggctgctgtctgagccatgagtgccaggctgagagaggcctcttcatttcctctccaggctactcagaggccatgtgaagctcgtttgtcccactagaccaggcctctgggcctgctctttctttccacccaatgtccagtcttggatcatagatttaaaaggaaaacccctcttatctaggaggctttaacttcctggaccccaggattcaccttcctagtggtgtttagaaaatgcctccacagcccccttccaccatgggcatgagagctggggtgtgtttcttgagaagctcccttttttcttgctctgctcaccggtgtggcctgggctggagtgcactctccctgggggcagctggggcctcgcaattcttgcttcaggatctctcccatgcgagctgcccggagggtgtcagcagggcaagacacctagtctagagtcaccaaggtcacagtgccactttcacgggatagcaggctcttgggacttttacacaggcctagggtcccctcagtcttggtcccaggagatgggggccactcgtgaggctggccatgctgtggcttctcacagctgtggtctcccctgcctcacaacgactcctttctcttgtgtggcgggactcgcccttttgctgtgctcagaagattcactgaggaaactcatggaagcctctgctcatttgggtcactgggacacccctgagatgggtgtgtttatttgctcagggcgggcagcctatggtgaagaggagacagaggcgatgggcgtgcttcgtcctccgtaacactggctttatttaccgtggtggttcagagtcccaggccctgacctctaaagacttttcataacagacgttaagaccaagccgtggacctcaccccagggaatgccacggccctttggggacctgcacacccacctctccgggggacttgacaaggggccctgaggccaagggaggtcactcctccctccaggcccctgacttttactttgtggttctctaaaaaccatgtacacactttcactctattgtaaccacacagggcaggcgcatccagcatgtcagtgtcctgccccgggcagctctccctcccgggcacgctccctctggcctggtggatcaccaagagggcggttctcattttgttattagtggaagagccttgagcttaaaagctcttcattttctttgccggaaagtatatggtttgtgtttttgcagttttatttttttaaggatggacactaaatctctggtgtccatgttccgagcccggtggctgggatggtggctcgatgtgtctcctctttatcccgccctctgcctgtttggtgccctcccttctttcccccaggcagtgggtatcgggttctttcccaaagtgcttacttggaaagagtgtggctgctggactcttttcgaaatgcccctctgagtcaggagcctggtggggacaagatggaggatgtccacagaggctgacctgtgggggaaaagaagtgctcaggtaaggttgtctcctctcctgtcctaaaaaaatccatgcttgcaggagagggttggtgcctgctcagtttctgtcgagggaatgggagtctcctcggctccctcctgggccctctgcttcttggaggccgaccgctggagactgcggctcctgtgcttggatctttgacatctgtcagtcactggaggctagagaagttgactttaccttggctttctgtgggttcccgatgggcttggaagtgccgtctacttcctaagcatcctgtctaaagctttgtggcaccctcagtgcaacctcagaacagacaaatcatgaatgagctggaactttgcaagaatattcatattataaatgtctcatctgatggaggaacgtgtgcatttagagagagggagagttttcaaggtttatggcaactttgtggaggacctgggtaactcttacccttggccaaaggaagaggttttcctgtctggcttctgaggttggagggggcacttagcagtgaaccttaagtctgggtacatgtaaccctgctgaggggctgtgcaggccgctcctacggtcctttggcctgaggcagggcgggaggcatgcaagccagtgggggaaaacccctctgaagctgggcagccctctacctgggccccgggagccgtgctccttggaacgcaaagggccgaggagcatctggttttcatggcaaagctctactccagagctcctttaacatctgctaattaagtgcaataaatttttctagaaaatggcaaagatgacttccaggtggatattgctctcttacggtgttggggatgccagaacaccacttggttttatttttctaagtgcatgtgatgtgatagagtgtgtggggctctgtgtccttccctgggagctggcattccagcgggcccctctctttacctttgttgggggaaggaggcaagagagaaattccttcttcccagccagagagggcagaagcagaccgtagcccattggccttatgtgcgtgtgtgcgtgcgagtgtgtcactgctggtgggccggagtgatgtggtgggagggaagccgggaatgtatccttttcagacaaaattaaatattttgaaatgagaa

SEQ ID NO: 303355 - DNA, 4494 bp, Homo sapiens
agcggagcagctgcagcgggtcgcacggctccggcccatctcggggggcgggcgggggaggcgaggtgcgcgagccgagtccggggcacgatgtccgacgcgggcggcggaaagaagccgcctgtggacccgcaggcaggacccggtccggggccggggcgcgcagctggggaaaggggcctgtcggggtccttccccctggtcctgaagaagctgatggagaaccccccgcgcgaggcgcgcctcgataaggaaaaggggaaggaaaagctggaggaggacgaggccgcagccgccagcaccatggctgtctcagcctccctcatgccacccatctgggacaagaccatcccatatgatggcgaatctttccacctggagtacatggacctggatgagttcctgctggagaatggcatccccgccagccccacccacctggcccacaacctgctgctgcctgtagcagagctagaagggaaggagtctgccagctcttccacagcatccccaccatcctcctccactgccatctttcagccctctgaaaccgtgtccagcacagaatcttccctggagaaggagagggagactcccagtcccatcgaccccaattgtgtggaagtggatgtgaacttcaatccggaccccgccgacctggtgctctccagtgtgccaggcggggagctcttcaaccctcggaagcacaagtttgctgaggaggacctgaagccccagcctatgatcaaaaaggccaagaaggtctttgtccccgacgagcagaaggatgaaaagtactggacaagacgcaagaagaacaacgtggcagctaaacggtcacgggatgcccggcgcctgaaagagaatcagatcaccatccgggcagccttcctggagaaggagaacacagccctgcggacggaggtggccgagctacgcaaggaggtgggcaagtgcaagaccatcgtgtccaagtatgagaccaaatacgggcccttgtaacccgtgccccccgcccgggcggggtactgcctgcacctcagacctctgcctgggggctccctgtaacccctcacacgcgtggagacttatgactcgtcgtgggcgcatggcggcgcacctgctgcaggagcggccacgtctcagcttcattataccatggcctgcgcacgtggcgacgtccctgaggggccagtctcctcactggtggggaacgcaagagaatctgcgtagatgggtgactcagccttagtttctattcttggatgtcccagttgaatcagaaggggacctctggagtacacacctctctcctgggcgctcagggtccctggactctccctcagtctccagcctgggctgccgagggctatctctgcagaatgagttgtgatcattgtcaccctatgtcttctcaggtagcagggcgcgtttccacttaaggtgtgtctgtcacgcacctcattctccccagacagtctttgagtaacatctgttcccatcttccttggaagcaggacacaccagctcctccgtcagtgtctgcatgggtagcaggctgcaggagtggggtctctgcacagcctgggatggggcttggggctggggcctgcagcagaagtgtgcccagcgtttctcagctcccgcaccccttttcccttatggctctgaggccatcggctgtctctgcatttcattggctgtggaggagagactcctaggatggctgctgtctgagccatgagtgccaggctgagagaggcctcttcatttcctctccaggctactcagaggccatgtgaagctcgtttgtcccactagaccaggcctctgggcctgctctttctttccacccaatgtccagtcttggatcatagatttaaaaggaaaacccctcttatctaggaggctttaacttcctggaccccaggattcaccttcctagtggtgtttagaaaatgcctccacagcccccttccaccatgggcatgagagctggggtgtgtttcttgagaagctcccttttttcttgctctgctcaccggtgtggcctgggctggagtgcactctccctgggggcagctggggcctcgcaattcttgcttcaggatctctcccatgcgagctgcccggagggtgtcagcagggcaagacacctagtctagagtcaccaaggtcacagtgccactttcacgggatagcaggctcttgggacttttacacaggcctagggtcccctcagtcttggtcccaggagatgggggccactcgtgaggctggccatgctgtggcttctcacagctgtggtctcccctgcctcacaacgactcctttctcttgtgtggcgggactcgcccttttgctgtgctcagaagattcactgaggaaactcatggaagcctctgctcatttgggtcactgggacacccctgagatgggtgtgtttatttgctcagggcgggcagcctatggtgaagaggagacagaggcgatgggcgtgcttcgtcctccgtaacactggctttatttaccgtggtggttcagagtcccaggccctgacctctaaagacttttcataacagacgttaagaccaagccgtggacctcaccccagggaatgccacggccctttggggacctgcacacccacctctccgggggacttgacaaggggccctgaggccaagggaggtcactcctccctccaggcccctgacttttactttgtggttctctaaaaaccatgtacacactttcactctattgtaaccacacagggcaggcgcatccagcatgtcagtgtcctgccccgggcagctctccctcccgggcacgctccctctggcctggtggatcaccaagagggcggttctcattttgttattagtggaagagccttgagcttaaaagctcttcattttctttgccggaaagtatatggtttgtgtttttgcagttttatttttttaaggatggacactaaatctctggtgtccatgttccgagcccggtggctgggatggtggctcgatgtgtctcctctttatcccgccctctgcctgtttggtgccctcccttctttcccccaggcagtgggtatcgggttctttcccaaagtgcttacttggaaagagtgtggctgctggactcttttcgaaatgcccctctgagtcaggagcctggtggggacaagatggaggatgtccacagaggctgacctgtgggggaaaagaagtgctcaggtaaggttgtctcctctcctgtcctaaaaaaatccatgcttgcaggagagggttggtgcctgctcagtttctgtcgagggaatgggagtctcctcggctccctcctgggccctctgcttcttggaggccgaccgctggagactgcggctcctgtgcttggatctttgacatctgtcagtcactggaggctagagaagttgactttaccttggctttctgtgggttcccgatgggcttggaagtgccgtctacttcctaagcatcctgtctaaagctttgtggcaccctcagtgcaacctcagaacagacaaatcatgaatgagctggaactttgcaagaatattcatattataaatgtctcatctgatggaggaacgtgtgcatttagagagagggagagttttcaaggtttatggcaactttgtggaggacctgggtaactcttacccttggccaaaggaagaggttttcctgtctggcttctgaggttggagggggcacttagcagtgaaccttaagtctgggtacatgtaaccctgctgaggggctgtgcaggccgctcctacggtcctttggcctgaggcagggcgggaggcatgcaagccagtgggggaaaacccctctgaagctgggcagccctctacctgggccccgggagccgtgctccttggaacgcaaagggccgaggagcatctggttttcatggcaaagctctactccagagctcctttaacatctgctaattaagtgcaataaatttttctagaaaatggcaaagatgacttccaggtggatattgctctcttacggtgttggggatgccagaacaccacttggttttatttttctaagtgcatgtgatgtgatagagtgtgtggggctctgtgtccttccctgggagctggcattccagcgggcccctctctttacctttgttgggggaaggaggcaagagagaaattccttcttcccagccagagagggcagaagcagaccgtagcccattggccttatgtgcgtgtgtgcgtgcgagtgtgtcactgctggtgggccggagtgatgtggtgggagggaagccgggaatgtatccttttcagacaaaattaaatattttgaaatgagaaaaaaaaaaaaaaataaaaaaaaaaaacggggtttttttggggggggaaaggtttagagggcgggtctgtgttttcgcccccttttggaaggggaaatgggggcccaaaggggggtaaatgaaggggac

SEQ ID NO: 303356 - DNA, 3939 bp, Homo sapiens
cagtgaaccttaagtctgggtacatgtaaccctgctgaggggctgtgcaggccgctcctacggtcctttggcctgaggcagggcgggaggcatgcaagccagtgggggaaaacccctctgaaaccgtgtccagcacagaatcttccctggagaaggagagggagactcccagtcccatcgaccccaattgtgtggaagtggatgtgaacttcaatccggaccccgccgacctggtgctctccagtgtgccaggcggggagctcttcaaccctcggaagcacaagtttgctgaggaggacctgaagccccagcctatgatcaaaaaggccaagaaggtctttgtccccgacgagcagaaggatgaaaagtactggacaagacgcaagaagaacaacgtggcagctaaacggtcacgggatgcccggcgcctgaaagagaatcagatcaccatccgggcagccttcctggagaaggagaacacagccctgcggacggaggtggccgagctacgcaaggaggtgggcaagtgcaagaccatcgtgtccaagtatgagaccaaatacgggcccttgtaacccgtgccccccgcccgggcggggtactgcctgcacctcagacctctgcctgggggctccctgtaacccctcacacgcgtggagacttatgactcgtcgtgggcgcatggcggcgcacctgctgcaggagcggccacgtctcagcttcattataccatggcctgcgcacgtggcgacgtccctgaggggccagtctcctcactggtggggaacgcaagagaatctgcgtagatgggtgactcagccttagtttctattcttggatgtcccagttgaatcagaaggggacctctggagtacacacctctctcctgggcgctcagggtccctggactctccctcagtctccagcctgggctgccgagggctatctctgcagaatgagttgtgatcattgtcaccctatgtcttctcaggtagcagggcgcgtttccacttaaggtgtgtctgtcacgcacctcattctccccagacagtctttgagtaacatctgttcccatcttccttggaagcaggacacaccagctcctccgtcagtgtctgcatgggtagcaggctgcaggagtggggtctctgcacagcctgggatggggcttggggctggggcctgcagcagaagtgtgcccagcgtttctcagctcccgcaccccttttcccttatggctctgaggccatcggctgtctctgcatttcattggctgtggaggagagactcctaggatggctgctgtctgagccatgagtgccaggctgagagaggcctcttcatttcctctccaggctactcagaggccatgtgaagctcgtttgtcccactagaccaggcctctgggcctgctctttctttccacccaatgtccagtcttggatcatagatttaaaaggaaaacccctcttatctaggaggctttaacttcctggaccccaggattcaccttcctagtggtgtttagaaaatgcctccacagcccccttccaccatgggcatgagagctggggtgtgtttcttgagaagctcccttttttcttgctctgctcaccggtgtggcctgggctggagtgcactctccctgggggcagctggggcctcgcaattcttgcttcaggatctctcccatgcgagctgcccggagggtgtcagcagggcaagacacctagtctagagtcaccaaggtcacagtgccactttcacgggatagcaggctcttgggacttttacacaggcctagggtcccctcagtcttggtcccaggagatgggggccactcgtgaggctggccatgctgtggcttctcacagctgtggtctcccctgcctcacaacgactcctttctcttgtgtggcgggactcgcccttttgctgtgctcagaagattcactgaggaaactcatggaagcctctgctcatttgggtcactgggacacccctgagatgggtgtgtttatttgctcagggcgggcagcctatggtgaagaggagacagaggcgatgggcgtgcttcgtcctccgtaacactggctttatttaccgtggtggttcagagtcccaggccctgacctctaaagacttttcataacagacgttaagaccaagccgtggacctcaccccagggaatgccacggccctttggggacctgcacacccacctctccgggggacttgacaaggggccctgaggccaagggaggtcactcctccctccaggcccctgacttttactttgtggttctctaaaaaccatgtacacactttcactctattgtaaccacacagggcaggcgcatccagcatgtcagtgtcctgccccgggcagctctccctcccgggcacgctccctctggcctggtggatcaccaagagggcggttctcattttgttattagtggaagagccttgagcttaaaagctcttcattttctttgccggaaagtatatggtttgtgtttttgcagttttatttttttaaggatggacactaaatctctggtgtccatgttccgagcccggtggctgggatggtggctcgatgtgtctcctctttatcccgccctctgcctgtttggtgccctcccttctttcccccaggcagtgggtatcgggttctttcccaaagtgcttacttggaaagagtgtggctgctggactcttttcgaaatgcccctctgagtcaggagcctggtggggacaagatggaggatgtccacagaggctgacctgtgggggaaaagaagtgctcaggtaaggttgtctcctctcctgtcctaaaaaaatccatgcttgcaggagagggttggtgcctgctcagtttctgtcgagggaatgggagtctcctcggctccctcctgggccctctgcttcttggaggccgaccgctggagactgcggctcctgtgcttggatctttgacatctgtcagtcactggaggctagagaagttgactttaccttggctttctgtgggttcccgatgggcttggaagtgccgtctacttcctaagcatcctgtctaaagctttgtggcaccctcagtgcaacctcagaacagacaaatcatgaatgagctggaactttgcaagaatattcatattataaatgtctcatctgatggaggaacgtgtgcatttagagagagggagagttttcaaggtttatggcaactttgtggaggacctgggtaactcttacccttggccaaaggaagaggttttcctgtctggcttctgaggttggagggggcacttagcagtgaaccttaagtctgggtacatgtaaccctgctgaggggctgtgcaggccgctcctacggtcctttggcctgaggcagggcgggaggcatgcaagccagtgggggaaaacccctctgaagctgggcagccctctacctgggccccgggagccgtgctccttggaacgcaaagggccgaggagcatctggttttcatggcaaagctctactccagagctcctttaacatctgctaattaagtgcaataaatttttctagaaaatggcaaagatgacttccaggtggatattgctctcttacggtgttggggatgccagaacaccacttggttttatttttctaagtgcatgtgatgtgatagagtgtgtggggctctgtgtccttccctgggagctggcattccagcgggcccctctctttacctttgttgggggaaggaggcaagagagaaattccttcttcccagccagagagggcagaagcagaccgtagcccattggccttatgtgcgtgtgtgcgtgcgagtgtgtcactgctggtgggccggagtgatgtggtgggagggaagccgggaatgtatccttttcagacaaaattaaatattttgaaatgagaa

SEQ ID NO: 303357 - DNA, 3633 bp, Homo sapiens
  misc_feature (42)..(42): n is a, c, g, or t
  misc_feature (49)..(49): n is a, c, g, or t
caaaaaaaaacacaaaacaaaatatacggctaggtagagccnggggttnatcggatgaaaagtactggacaagacgcaagaagaacaacgtggcagctaaacggtcacgggatgcccggcgcctgaaagagaatcagatcaccatccgggcagccttcctggagaaggagaacacagccctgcggacggaggtggccgagctacgcaaggaggtgggcaagtgcaagaccatcgtgtccaagtatgagaccaaatacgggcccttgtaacccgtgccccccgcccgggcggggtactgcctgcacctcagacctctgcctgggggctccctgtaacccctcacacgcgtggagacttatgactcgtcgtgggcgcatggcggcgcacctgctgcaggagcggccacgtctcagcttcattataccatggcctgcgcacgtggcgacgtccctgaggggccagtctcctcactggtggggaacgcaagagaatctgcgtagatgggtgactcagccttagtttctattcttggatgtcccagttgaatcagaaggggacctctggagtacacacctctctcctgggcgctcagggtccctggactctccctcagtctccagcctgggctgccgagggctatctctgcagaatgagttgtgatcattgtcaccctatgtcttctcaggtagcagggcgcgtttccacttaaggtgtgtctgtcacgcacctcattctccccagacagtctttgagtaacatctgttcccatcttccttggaagcaggacacaccagctcctccgtcagtgtctgcatgggtagcaggctgcaggagtggggtctctgcacagcctgggatggggcttggggctggggcctgcagcagaagtgtgcccagcgtttctcagctcccgcaccccttttcccttatggctctgaggccatcggctgtctctgcatttcattggctgtggaggagagactcctaggatggctgctgtctgagccatgagtgccaggctgagagaggcctcttcatttcctctccaggctactcagaggccatgtgaagctcgtttgtcccactagaccaggcctctgggcctgctctttctttccacccaatgtccagtcttggatcatagatttaaaaggaaaacccctcttatctaggaggctttaacttcctggaccccaggattcaccttcctagtggtgtttagaaaatgcctccacagcccccttccaccatgggcatgagagctggggtgtgtttcttgagaagctcccttttttcttgctctgctcaccggtgtggcctgggctggagtgcactctccctgggggcagctggggcctcgcaattcttgcttcaggatctctcccatgcgagctgcccggagggtgtcagcagggcaagacacctagtctagagtcaccaaggtcacagtgccactttcacgggatagcaggctcttgggacttttacacaggcctagggtcccctcagtcttggtcccaggagatgggggccactcgtgaggctggccatgctgtggcttctcacagctgtggtctcccctgcctcacaacgactcctttctcttgtgtggcgggactcgcccttttgctgtgctcagaagattcactgaggaaactcatggaagcctctgctcatttgggtcactgggacacccctgagatgggtgtgtttatttgctcagggcgggcagcctatggtgaagaggagacagaggcgatgggcgtgcttcgtcctccgtaacactggctttatttaccgtggtggttcagagtcccaggccctgacctctaaagacttttcataacagacgttaagaccaagccgtggacctcaccccagggaatgccacggccctttggggacctgcacacccacctctccgggggacttgacaaggggccctgaggccaagggaggtcactcctccctccaggcccctgacttttactttgtggttctctaaaaaccatgtacacactttcactctattgtaaccacacagggcaggcgcatccagcatgtcagtgtcctgccccgggcagctctccctcccgggcacgctccctctggcctggtggatcaccaagagggcggttctcattttgttattagtggaagagccttgagcttaaaagctcttcattttctttgccggaaagtatatggtttgtgtttttgcagttttatttttttaaggatggacactaaatctctggtgtccatgttccgagcccggtggctgggatggtggctcgatgtgtctcctctttatcccgccctctgcctgtttggtgccctcccttctttcccccaggcagtgggtatcgggttctttcccaaagtgcttacttggaaagagtgtggctgctggactcttttcgaaatgcccctctgagtcaggagcctggtggggacaagatggaggatgtccacagaggctgacctgtgggggaaaagaagtgctcaggtaaggttgtctcctctcctgtcctaaaaaaatccatgcttgcaggagagggttggtgcctgctcagtttctgtcgagggaatgggagtctcctcggctccctcctgggccctctgcttcttggaggccgaccgctggagactgcggctcctgtgcttggatctttgacatctgtcagtcactggaggctagagaagttgactttaccttggctttctgtgggttcccgatgggcttggaagtgccgtctacttcctaagcatcctgtctaaagctttgtggcaccctcagtgcaacctcagaacagacaaatcatgaatgagctggaactttgcaagaatattcatattataaatgtctcatctgatggaggaacgtgtgcatttagagagagggagagttttcaaggtttatggcaactttgtggaggacctgggtaactcttacccttggccaaaggaagaggttttcctgtctggcttctgaggttggagggggcacttagcagtgaaccttaagtctgggtacatgtaaccctgctgaggggctgtgcaggccgctcctacggtcctttggcctgaggcagggcgggaggcatgcaagccagtgggggaaaacccctctgaagctgggcagccctctacctgggccccgggagccgtgctccttggaacgcaaagggccgaggagcatctggttttcatggcaaagctctactccagagctcctttaacatctgctaattaagtgcaataaatttttctagaaaatggcaaagatgacttccaggtggatattgctctcttacggtgttggggatgccagaacaccacttggttttatttttctaagtgcatgtgatgtgatagagtgtgtggggctctgtgtccttccctgggagctggcattccagcgggcccctctctttacctttgttgggggaaggaggcaagagagaaattccttcttcccagccagagagggcagaagcagaccgtagcccattggccttatgtgcgtgtgtgcgtgcgagtgtgtcactgctggtgggccggagtgatgtggtgggagggaagccgggaatgtatccttttcagacaaaattaaatattttgaaatgagaa

SEQ ID NO: 303358 - DNA, 3557 bp, Homo sapiens
agcggagcagctgcagcgggtcgcacggctccggcccatctcggggggcgggcgggggaggcgaggtgcgcgagccgagtccggggcacgatgtccgacgcgggcggcggaaagaagccgcctgtggacccgcaggcaggacccggtccggggccggggcgcgcagctggggaaaggggcctgtcggggtccttccccctggtcctgaagaagctgatggagaaccccccgcgcgaggcgcgcctcgataaggaaaaggggaaggaaaagctggaggaggacgaggccgcagccgccagcaccatggctgtctcagcctccctcatgccacccatctgggacaagaccatcccatatgatggcgaatctttccacctggagtacatggacctggatgagttcctgctggagaatggcatccccgccagccccacccacctggcccacaacctgctgctgcctgtagcagagctagaagggaaggagtctgccagctcttccacagcatccccaccatcctcctccactgccatctttcagccctctgaaaccgtgtccagcacagaatcttccctggagaaggagagggagactcccagtcccatcgaccccaattgtgtggaagtggatgtgaacttcaatccggaccccgccgacctggtgctctccagtgtgccaggcggggagctcttcaaccctcggaagcacaagtttgctgaggaggacctgaagccccagcctatgatcaaaaaggccaagaaggtctttgtccccgacgagcagaaggatgaaaagtactggacaagacgcaagaagaacaacgtggcagctaaacggtcacgggatgcccggcgcctgaaagagaatcagatcaccatccgggcagccttcctggagaaggagaacacagccctgcggacggaggtggccgagctacgcaaggaggtgggcaagtgcaagaccatcgtgtccaagtatgagaccaaatacgggcccttgtaacccgtgccccccgcccgggcggggtactgcctgcacctcagacctctgcctgggggctccctgtaacccctcacacgcgtggagacttatgactcgtcgtgggcgcatggcggcgcacctgctgcaggagcggccacgtctcagcttcattataccatggcctgcgcacgtggcgacgtccctgaggggccagtctcctcactggtggggaacgcaagagaatctgcgtagatgggtgactcagccttagtttctattcttggatgtcccagttgaatcagaaggggacctctggagtacacacctctctcctgggcgctcagggtccctggactctccctcagtctccagcctgggctgccgagggctatctctgcagaatgagttgtgatcattgtcaccctatgtcttctcaggtagcagggcgcgtttccacttaaggtgtgtctgtcacgcacctcattctccccagacagtctttgagtaacatctgttcccatcttccttggaagcaggacacaccagctcctccgtcagtgtctgcatgggtagcaggctgcaggagtggggtctctgcacagcctgggatggggcttggggctggggcctgcagcagaagtgtgcccagcgtttctcagctcccgcaccccttttcccttatggctctgaggccatcggctgtctctgcatttcattggctgtggaggagagactcctaggatggctgctgtctgagccatgagtgccaggctgagagaggcctcttcatttcctctccaggctactcagaggccatgtgaagctcgtttgtcccactagaccaggcctctgggcctgctctttctttccacccaatgtccagtcttggatcatagatttaaaaggaaaacccctcttatctaggaggctttaacttcctggaccccaggattcaccttcctagtggtgtttagaaaatgcctccacagcccccttccaccatgggcatgagagctggggtgtgtttcttgagaagctcccttttttcttgctctgctcaccggtgtggcctgggctggagtgcactctccctgggggcagctggggcctcgcaattcttgcttcaggatctctcccatgcgagctgcccggagggtgtcagcagggcaagacacctagtctagagtcaccaaggtcacagtgccactttcacgggatagcaggctcttgggacttttacacaggcctagggtcccctcagtcttggtcccaggagatgggggccactcgtgaggctggccatgctgtggcttctcacagctgtggtctcccctgcctcacaacgactcctttctcttgtgtggcgggactcgcccttttgctgtgctcagaagattcactgaggaaactcatggaagcctctgctcatttgggtcactgggacacccctgagatgggtgtgtttatttgctcagggcgggcagcctatggtgaagaggagacagaggcgatgggcgtgcttcgtcctccgtaacactggctttatttaccgtggtggttcagagtcccaggccctgacctctaaagacttttcataacagacgttaagaccaagccgtggacctcaccccagggaatgccacggccctttggggacctgcacacccacctctccgggggacttgacaaggggccctgaggccaagggaggtcactcctccctccaggcccctgacttttactttgtggttctctaaaaaccatgtacacactttcactctattgtaaccacacagggcaggcgcatccagcatgtcagtgtcctgccccgggcagctctccctcccgggcacgctccctctggcctggtggatcaccaagagggcggttctcattttgttattagtggaagagccttgagcttaaaagctcttcattttctttgccggaaagtatatggtttgtgtttttgcagttttatttttttaaggatggacactaaatctctggtgtccatgttccgagcccggtggctgggatggtggctcgatgtgtctcctctttatcccgccctctgcctgtttggtgccctcccttctttcccccaggcagtgggtatcgggttctttcccaaagtgcttacttggaaagagtgtggctgctggactcttttcgaaatgcccctctgagtcaggagcctggtggggacaagatggaggatgtccacagaggctgacctgtgggggaaaagaagtgctcaggtaaggttgtctcctctcctgtcctaaaaaaatccatgcttgcaggagagggttggtgcctgctcagtttctgtcgagggaatgggagtctcctcggctccctcctgggccctctctttacctttgttgggggaaggaggcaagagagaaattccttcttcccagccagagagggcagaagcagaccgtagcccattggccttatgtgcgtgtgtgcgtgcgagtgtgtcactgctggtgggccggagtgatgtggtgggagggaagccgggaatgtatccttttcagacaaaattaaatattttgaaatgagaa

SEQ ID NO: 303359 - DNA, 2743 bp, Homo sapiens
  misc_feature (42)..(42): n is a, c, g, or t
  misc_feature (49)..(49): n is a, c, g, or t
caaaaaaaaacacaaaacaaaatatacggctaggtagagccnggggttnatcgctcgtttgtcccactagaccaggcctctgggcctgctctttctttccacccaatgtccagtcttggatcatagatttaaaaggaaaacccctcttatctaggaggctttaacttcctggaccccaggattcaccttcctagtggtgtttagaaaatgcctccacagcccccttccaccatgggcatgagagctggggtgtgtttcttgagaagctcccttttttcttgctctgctcaccggtgtggcctgggctggagtgcactctccctgggggcagctggggcctcgcaattcttgcttcaggatctctcccatgcgagctgcccggagggtgtcagcagggcaagacacctagtctagagtcaccaaggtcacagtgccactttcacgggatagcaggctcttgggacttttacacaggcctagggtcccctcagtcttggtcccaggagatgggggccactcgtgaggctggccatgctgtggcttctcacagctgtggtctcccctgcctcacaacgactcctttctcttgtgtggcgggactcgcccttttgctgtgctcagaagattcactgaggaaactcatggaagcctctgctcatttgggtcactgggacacccctgagatgggtgtgtttatttgctcagggcgggcagcctatggtgaagaggagacagaggcgatgggcgtgcttcgtcctccgtaacactggctttatttaccgtggtggttcagagtcccaggccctgacctctaaagacttttcataacagacgttaagaccaagccgtggacctcaccccagggaatgccacggccctttggggacctgcacacccacctctccgggggacttgacaaggggccctgaggccaagggaggtcactcctccctccaggcccctgacttttactttgtggttctctaaaaaccatgtacacactttcactctattgtaaccacacagggcaggcgcatccagcatgtcagtgtcctgccccgggcagctctccctcccgggcacgctccctctggcctggtggatcaccaagagggcggttctcattttgttattagtggaagagccttgagcttaaaagctcttcattttctttgccggaaagtatatggtttgtgtttttgcagttttatttttttaaggatggacactaaatctctggtgtccatgttccgagcccggtggctgggatggtggctcgatgtgtctcctctttatcccgccctctgcctgtttggtgccctcccttctttcccccaggcagtgggtatcgggttctttcccaaagtgcttacttggaaagagtgtggctgctggactcttttcgaaatgcccctctgagtcaggagcctggtggggacaagatggaggatgtccacagaggctgacctgtgggggaaaagaagtgctcaggtaaggttgtctcctctcctgtcctaaaaaaatccatgcttgcaggagagggttggtgcctgctcagtttctgtcgagggaatgggagtctcctcggctccctcctgggccctctgcttcttggaggccgaccgctggagactgcggctcctgtgcttggatctttgacatctgtcagtcactggaggctagagaagttgactttaccttggctttctgtgggttcccgatgggcttggaagtgccgtctacttcctaagcatcctgtctaaagctttgtggcaccctcagtgcaacctcagaacagacaaatcatgaatgagctggaactttgcaagaatattcatattataaatgtctcatctgatggaggaacgtgtgcatttagagagagggagagttttcaaggtttatggcaactttgtggaggacctgggtaactcttacccttggccaaaggaagaggttttcctgtctggcttctgaggttggagggggcacttagcagtgaaccttaagtctgggtacatgtaaccctgctgaggggctgtgcaggccgctcctacggtcctttggcctgaggcagggcgggaggcatgcaagccagtgggggaaaacccctctgaagctgggcagccctctacctgggccccgggagccgtgctccttggaacgcaaagggccgaggagcatctggttttcatggcaaagctctactccagagctcctttaacatctgctaattaagtgcaataaatttttctagaaaatggcaaagatgacttccaggtggatattgctctcttacggtgttggggatgccagaacaccacttggttttatttttctaagtgcatgtgatgtgatagagtgtgtggggctctgtgtccttccctgggagctggcattccagcgggcccctctctttacctttgttgggggaaggaggcaagagagaaattccttcttcccagccagagagggcagaagcagaccgtagcccattggccttatgtgcgtgtgtgcgtgcgagtgtgtcactgctggtgggccggagtgatgtggtgggagggaagccgggaatgtatccttttcagacaaaattaaatattttgaaatgagaaaaaaaaaaaaaaataaaaaaaaaaaacggggtttttttggggggggaaaggtttagagggcgggtctgtgttttcgcccccttttggaaggggaaatgggggcccaaaggggggtaaatgaaggggac

SEQ ID NO: 303360 - DNA, 2707 bp, Homo sapiens
tagtcaggaggccggcgtgtccatgtagatcaatggtccttgggctgacaacatctttctttccacccaatgtccagtcttggatcatagatttaaaaggaaaacccctcttatctaggaggctttaacttcctggaccccaggattcaccttcctagtggtgtttagaaaatgcctccacagcccccttccaccatgggcatgagagctggggtgtgtttcttgagaagctcccttttttcttgctctgctcaccggtgtggcctgggctggagtgcactctccctgggggcagctggggcctcgcaattcttgcttcaggatctctcccatgcgagctgcccggagggtgtcagcagggcaagacacctagtctagagtcaccaaggtcacagtgccactttcacgggatagcaggctcttgggacttttacacaggcctagggtcccctcagtcttggtcccaggagatgggggccactcgtgaggctggccatgctgtggcttctcacagctgtggtctcccctgcctcacaacgactcctttctcttgtgtggcgggactcgcccttttgctgtgctcagaagattcactgaggaaactcatggaagcctctgctcatttgggtcactgggacacccctgagatgggtgtgtttatttgctcagggcgggcagcctatggtgaagaggagacagaggcgatgggcgtgcttcgtcctccgtaacactggctttatttaccgtggtggttcagagtcccaggccctgacctctaaagacttttcataacagacgttaagaccaagccgtggacctcaccccagggaatgccacggccctttggggacctgcacacccacctctccgggggacttgacaaggggccctgaggccaagggaggtcactcctccctccaggcccctgacttttactttgtggttctctaaaaaccatgtacacactttcactctattgtaaccacacagggcaggcgcatccagcatgtcagtgtcctgccccgggcagctctccctcccgggcacgctccctctggcctggtggatcaccaagagggcggttctcattttgttattagtggaagagccttgagcttaaaagctcttcattttctttgccggaaagtatatggtttgtgtttttgcagttttatttttttaaggatggacactaaatctctggtgtccatgttccgagcccggtggctgggatggtggctcgatgtgtctcctctttatcccgccctctgcctgtttggtgccctcccttctttcccccaggcagtgggtatcgggttctttcccaaagtgcttacttggaaagagtgtggctgctggactcttttcgaaatgcccctctgagtcaggagcctggtggggacaagatggaggatgtccacagaggctgacctgtgggggaaaagaagtgctcaggtaaggttgtctcctctcctgtcctaaaaaaatccatgcttgcaggagagggttggtgcctgctcagtttctgtcgagggaatgggagtctcctcggctccctcctgggccctctgcttcttggaggccgaccgctggagactgcggctcctgtgcttggatctttgacatctgtcagtcactggaggctagagaagttgactttaccttggctttctgtgggttcccgatgggcttggaagtgccgtctacttcctaagcatcctgtctaaagctttgtggcaccctcagtgcaacctcagaacagacaaatcatgaatgagctggaactttgcaagaatattcatattataaatgtctcatctgatggaggaacgtgtgcatttagagagagggagagttttcaaggtttatggcaactttgtggaggacctgggtaactcttacccttggccaaaggaagaggttttcctgtctggcttctgaggttggagggggcacttagcagtgaaccttaagtctgggtacatgtaaccctgctgaggggctgtgcaggccgctcctacggtcctttggcctgaggcagggcgggaggcatgcaagccagtgggggaaaacccctctgaagctgggcagccctctacctgggccccgggagccgtgctccttggaacgcaaagggccgaggagcatctggttttcatggcaaagctctactccagagctcctttaacatctgctaattaagtgcaataaatttttctagaaaatggcaaagatgacttccaggtggatattgctctcttacggtgttggggatgccagaacaccacttggttttatttttctaagtgcatgtgatgtgatagagtgtgtggggctctgtgtccttccctgggagctggcattccagcgggcccctctctttacctttgttgggggaaggaggcaagagagaaattccttcttcccagccagagagggcagaagcagaccgtagcccattggccttatgtgcgtgtgtgcgtgcgagtgtgtcactgctggtgggccggagtgatgtggtgggagggaagccgggaatgtatccttttcagacaaaattaaatattttgaaatgagaaaaaaaaaaaaaaataaaaaaaaaaaacggggtttttttggggggggaaaggtttagagggcgggtctgtgttttcgcccccttttggaaggggaaatgggggcccaaaggggggtaaatgaaggggac

SEQ ID NO: 303361 - DNA, 11072 bp, Homo sapiens
  misc_feature (3362)..(3362): n is a, c, g, or t
gagggaaggagggagggaagcagccgctgacccgtggcatgagctggatgcggtgtccgttgcaggactagggcgccgacatgaacctgcaccaggtgctgaccggggctgtgaaccctggcgaccactgcttctccgtgggcagcattggcgaccagcgcttcacggcttatgcatctggatgtgacattgtaatactgggaagcgattttgaaagattacagataatcccaggagctaaacatggaaatattcaagtgggatgtgtagactgttcaatgcaacaaggcaagattgcagcgtcttatggaaatgttatctccatttttgaaccagttaacctaccaaaacaaaagaaaaatttggaattatatagtcagtggcagaaaagtggccaattttttctggaatcaatagcacacaatataacctgggatcccacaggcagtcgtcttttaactggttccagctatttgcaactctggtccaatactaacttggagaagccaactgaagatgaaaatttaaataaaacagatcttaactttggagattggaaatgcatttggcattgcaaaactgcttcccaagttcatttaatgaaattttcaccagatggagaattttttgccactgctgggaaggatgactgtcttttgaaggtttggtataatgtagaaaactggcggacagctgttacttctccagatggaagttcagaaaaacaatcccaaggagaaattgacttttcttttgtgtatctggcccatcctcgagcagtaaatggattttcctggcgtaaaacaagcaaatatatgcctagggcttctgtatgtaatgtactgttgacttgctgcaaagataatgtgtgtcgtctttgggtagagacatttttaccaaatgattgtttgctatacggaggtgactgcagccattggactgaatcaattaatttaacaaataacttcaagagaaatgcttccagtaaagaacgagttcaaaatgctttagaagtaaatctgagacattttcgtagaggtcggaggagatcacttgctcttgtagcacatacgggatatctaccacatcagcaggatcctcatcatgttcacaggaacactccactgcatgccaatgcactttgccactttcatattgcagccagcatcaacccagccacagacattccacttcttccatctattacatctctgagtctaaatgaaaatgaagagaagaccggaccttttgttgtacactggctaaacaataaagaactgcattttactttgtccatggaagtttttttacagcaacttagaaaaagttttgaacaaccatcttctgaggccagtgtagaagattctaatcaggcagatgtaaaatctgatgaagaaactgatgatggtgttgatgatctgaaaataaatcccgaaaagaaggaattaggctgtgataaaatggtaccaaactcaagttttacatcattatcgtcagctgccattgatcatcagattgaagtacttctgtctgaatggagtaaaaatgcagatatgctatttagtattcatcccatggatggttctttgctagtttggcatgtggattggctggatgaataccagcctggtatgtttcgtcaagtacaggtgtcctttgtttccagaattccagtagctttccccacaggtgatgcaaactctctctgtaaaagcataatgatgtatgcctgtaccaagaatgttgacttggctattcagcaggggaaacaaaaaccttctggcctcacccgttccacatcaatgcttatttcttctggtcacaataaatcatctaatagtttaaaattaagtatttttacgcctaatgttatgatgatatcaaaacatgctgatggttctctgaatcagtggctggtcagttttgccgaggaatctgctttttctactgttctcagtatttcccacaaatccagatattgtggtcatcgttttcatcttaatgatttagcttgccactcagtattaccattattgctgacaacatcacaccataatgcattaaggacaccagatgttgataacccagagcaaccttttgatgctctaaatattgaagaatgctctttgacacaacaaaataaaagcactgttgacgtggcatttcaggatcccagtgcagtttacagtgagcttattctgtggagggttgacccagttgggccattgtctttttctggaggagtttctgagcttgcccggattaattctcttcatgtttctgccttttccaatgtggcatggctgcccactcttatacccagttattgtctgggtgcatactgcaactctcctagtgcatgctttgtagccagtgatggacaatatctgagattatatgaagcagttattgatgctaagaaacttttatctgagctttctaaccctgaaatttctaaatatgttggtgaagtctttaacatcgtcagtcaacaatcaacagccaggccaggatgcattattgcattagatcccattaccaaacttcatggcagaaaaacccaactgcttcatgtttttgaagaagacttcattttgaataaccttgagaagaaaagccttggcaaagacagcattttatctaatgcaggcagctcacctaatggattttctgagaagttctacctaattgtaatagaatgcactcaagacaaccgttcactgttacacatgtggaatttacatctaaagtcaattcctgtctcattagatgaaaaagtagatacaaaattatccgaagcggtttggcagccagaagaacattattcttcttctccagagaagatcctatctcctttttcacaaaagtatcaggcttgcagagcaaatctccagagtaccagcaggttgactctgttttcagaaatggtttatagccaagaattgcatttaccagaaggagttgagataataagtattaagccatcagcaggacatctgagttcatcttctatatatcctgcatgcagtgctccttatttattggcaacttcatgttcagatgagaaagtaagattctggagatgcagagtaacagatggagaatctgccacgtcaaagaatggaaaaattgatcttgcatacatttgggaagaatggccattacttattgaagatggacttcagagcaatagtagtataactgtacctggtaggcctgtagaagttagctgtgcacatacaaatcgtttagcagtagcttataagcagcctgcatctaatagtagatcttcccaggactttgtgatgcatgtaagtatttttgaatgtgagtcaacaggaggttcatgttgggtccttgancagacaattcatttagatgagttaagcacagtattggattctggcattagtgttgatagcaatttagtggcctataataaacaagacatgtatttatctagtaaagagaatatcacatcaaacacaaagcatttagttcacttagattggatgtctagagaagacggttctcatatcctgactgtaggaattggatcaaaactttttatgtatggacccctggctggcaaggtacaagaccaaactggtaaggaaaccctggcatttcctctctgggagagtaccaaagttgtgcccctttctaaatttgtactattacgaagtgtggacctagtttcttctgtagatggctccccaccttttcctgtttctttatcgtgggtccgggatggcatccttgtggtaggaatggactgtgaaatgcatgtgtattgccaatggcaaccatcttctaaacaagaacctgttataacagattcgtacagtgggagcactccatctataacaagtttaataaaacagagtaactccagttctgggttacatcctccaaagaaaactctgactcgatccatgaccagtcttgcacagaaaatctgtggaaagaaaactgcattcgatccttcagtggatatggaagattcaggtctttttgaagcagctcatgtactttccccgactctacctcagtatcatcccttgcagcttttggaactcatggatcttggtaaagttcggagagccaaggccatcttgtcccatcttgttaagtgcattgctggggaagttgtggctctgaatgaagctgaatctaatcatgaacgccgccttaggtctctcacaatcagtgctagtggaagcactaccagagacccccaggcattcaacaaggctgaaaatacagattacacagaaatagattctgttcctccacttcctttatatgccttacttgcagcagatgatgatagctgttactcatctttggagaaatctagtaatgagagtacgttaagtaaatcaaaccaattatctaaagaaagttatgatgagctttttcagactcaacttctaatgactgatactcatatgttagagacagatgaagaaaatacaaagcctagagttattgacctttcacagtacagtccgacttactttggacctgagcatgctcaggttctttctggccacttacttcattctagtttaccaggactcagccggatggagcagatgtctttgatggccttagcagatacaattgcaactacaagcactgatattggagaaagccgagacagaagccaaggtggagaaactcttgatgaatgtgggttaaaatttcttttggctgttcgactccatacctttcttacaacttcccttccagcctatcgagctcaactccttcaccaaggcctgtctacaagtcattttgcttgggcatttcactcagtagcagaagaagaactgctgaacatgttgccagccatgcagaaagatgatcccacttggtctgaactaagagctatgggtgtggggtggtgggtccggaatacccgcatcttacgcaaatgcatagaaaaagtagctaaagcagccttttatagaaagaatgatcctttagatgctgccattttttaccttgcaatgaaaaagaaagctgtgatttggggattatatagagctgaaaaaaacaccaggatgacacagttttttggacacaattttgaggatgagaggtggcgtaaagcagctttaaagaatgctttttctttgctaggcaaacaaagatttgaacattctgcagcattttttcttttagctggttgcctcagagatgcaattgaggtatgtcttgagaaattgaatgacattcagttggctcttgtaatagcaagactctatgagtctgaatttgatacatctgcagcatataaatctattttacgtaaaaaagttttgggaatcgattctcctgtcagtgaactgtgttcattgaacataaatatgcatcatgatccttttcttcggagcatggcatattggattttggaagattatagtggtgctctggaaacattaataaagcaacctatcagagagaatgatgatcaagttttatcagccagtaatcctacagtttttaatttctacaattatctaagaacacatcctcttttgctgagacgtcattttggatcatctgatacattttccacacatatgagcctaacaggaaaaagtggactggcaggaacaattaatttaagtgaaagacgtttattttttaccactgccagtgctcatttaaaagctggctgcccaatgttggctttggaagtattatcaaagatgcctaaagtcatcaagaaaacaagacctttttatagggcttctagttttctggatactagtaaagactgttctccttcttctccattaaagttggatgcaagggaagataagtcttctgctgttgattggtcacagtcactgataaatggttttggatcttcttcagagggttcctcagagaagcaatcaaactccactctttcttttgactggagccaaccaagtgttgtgtttcaggatgactctttagagttaaaatgggacagtgataatgatgaagaaaatgaggatgtccctatttcaatgaaagaactaaaacctttacagagaaaaacagataaaaagttggatgacataagttctaactacacagaatctttcagcacactagatgaaaatgaccttttaaatccatcagaagatataattgcagttcagttaaaatttagagcatgtttaaagattctcacagtagaacttcgtactttatctactggctatgaaatagatggtggaaaattgcgttaccaactataccactggcttgaaaaagaggtgatagctcttcagaggacttgtgacttttgctcagatgctgaagaactacagtctgcatttggcagaaatgaagatgaatttggattaaatgaggatgctgaagatttgcctcaccaaacaaaagtgaaacaactgagagaaaattttcaggaaaaaagacagtggctcttgaagtatcagtcacttttgagaatgtttcttagttactgcatacttcatggatcccatggtgggggtcttgcatctgtaagaatggaattgattttgcttttgcaagaatctcagcaggaaacatcagaaccactattttctagccttctgtcagagcaaacctcagtgcctctcctctttgcttgtacagccaatgccaaaacagtagttgccaatccattattgcaccttagtaatctgacacatgatattctccatgccataataaactttgattcaccaccccaccctgatatccaaagcaataaagtgtatgtaatgcatactttagcagcttcactttctgcttgtatttatcagtgcctttgtggtagtcataactacagttcatttcagacgaatcagtttactggaatggtatatcagacagtactgcttcctcatcgaccttctttgaaaacaggaagcttagatgaagcattaactcccaatacgtcaccagctcaatggccaggaataacttgtctaattcgacttttgaattcttctggcgaggaagcccagtcagggcttacagtcttgctctgtgagattctcacagcagtgtatcttagtctcttcatccatggcctggccacacattcaagtaatgagctatttcggattgtggcccatcctctaaatgagaaaatgtggtctgctgtgtttggtggaggtgcacatgttcctagcaaagaacagacacattcaaaaactttacctgtttcttcactagttgaagaaggagaaaaacagaacaaacgttttaggccgtcaaaaatgtcttgcagagaatctgccccactgaccccttcctcggcaccagtaagccaggagtcactggcggttaaagaaaagttcatcccacctgagctcagtatctgggactatttcatagctaagccttttctaccctcttctcaaagtagagccgaatatgattcagaggagagtctgggaagtgatgatgatgacaatgatgatgatgatgatgttttagcatcagatttccatctccaggaacattctaattcaaattcatatagttggtccttgatgcggttggcgatggtgcaattggtgctcaacaatttgaagactttttatcccttcgcaggtcatgatcttgcagagcttccagttagttcacctctttgtcatgcggttctaaaaactcttcaatgttgggaacaagttcttctccgacgacttgaaatccatggtgggccacctcaaaattatatcgcaagtcataccgccgaagagagtttgtctgcaggtcctgcaattcttcgccacaaagctttactggaacctacaaacactcctttcaaatccaaacaccatctggcactgtctgtgaagaggctttggcagtatttggtgaagcaggaagaaattcaggaaacctttatcaaaaatatattcacaaagaaacggtgtctaaatgagatagaagcagatttgggatatcctggaggtaaagcaagaattattcataaggaatctgatatcattactgcgtttgctgttaataaggcaaatagaaactgcatagcaatcgcttccagtcatgatgttcaagaactggatgtttctggaattctggccacacaggtctacacttgggtagatgatgatatagaagtggaaaccaaaggatcagaagatttcttggttatacatgctcgtgatgatttaacagctgttcaaggtacaactccatatacacatagcaatcctggcactccaatcaacatgccatggcttggtagtacacagactggcagaggagcatctgtgatgattaagaaagccattaataatgttagaagaatgacttctcatccaactcttccttactatctgacaggagctcaagatggaagtgtcagaatgtttgaatggggccattctcaacaaataacctgttttcgatctggtggcaattcaagagttacaagaatgagatttaactatcagggaaataagtttggaatagttgatgctgatggatatttaagtttgtatcaaacaaactggaaatgttgtccagttactggaagcatgcctaagccatacctgacttggcagtgtcataacaaaacagccaatgattttgtcttcgttagttcctcctctctgatagctacagctggtctttcaactgacaatagaaacgtatgtttgtgggatactcttgtagcacctgccaatagtttagtccatgcatttacctgccatgacagtggagccacagttttagcatatgctccaaaacatcagctactaatatcaggtggcagaaaaggttttacatatgtatttgacctttgtcaacgacaacagaggcagcttttccagagccatgattctcctgttaaagccgttgctgttgatccaactgaagagtactttgttacaggatctgccgaaggcaatataaagatttggagtctctctacctttggtcttctccatacttttgtcagtgaacatgctcggcagtccatttttagaaatattggaactggagtgatgcaaattgagacagggcctgcaaatcacattttctcctgtggagctgatggaacaatgaaaatgagaatactgccagatcagtttagccctttaaatgaagtgttgaaaaatgatgtgaaatttatgctataacatttttacaataagatgtacaatttattacctatatggaagtggccaacagatataatatacagtgatcattctctatgccacaaattagctaatgctttcttgtttttatatttattttatggagctttgcccttgatgcactgatgccttaaaaattaacaaggtcattcagaagtagattacattgcctaaagtagaatgtgtaagtaatgctgtaataatacatatcatagtatattataatcagtatgtcatagtgttaaaggtgttttgttttctttattgatacttttccacaggcatctctgcatgaatttcttccacagtaaaaatacgttttttgtaaaggcaattgtacataatactcatcacttaattcaccacactctcacttcctttattagccttatacatctcaaactcttctcttaattaatgataggtatttgagtaagaatgaaaaaaataatgaacatcttcattaaaattgtcattgagacgtcagtgataaatgagctagatggctcaatatgtaaggttttcagtagtttaccctccggaacccaagttatatgtatgtatacgtgtgtgtgtgtgtgtgtgtgtgtatcttacacatcttatttgaacttagttgtatatattagcgaaaactggtttttcatgtgtttttgtgccataacaactattgccaccagaataacttttttttgcaactgtgcttttcatttttaaaaaatttttgaattcccatcctaattttcaaataagtttcaaggagactatcaggattattattttaaagattagatttagtcaaataagtcttagcaggcaataaagtttctgtggtggcatatatcatgtaagacacttaaagtaagtttgtgaatttgtcaactttcgagcatcaaacaaatattttacttaaattttattttatcttatttttaggtgcttttaatctcaaaattctgaaaagcgaatagcagtgttttcagaaacaaatgtgaaagcagtcaaattaagtagatactatttagaaatgtaaaatactctccagatctaccattaatagaaaataaactaaaccttatattttatttttgccaaaatattttattataaaatatgaccaaaatatttaaaatgcacaatgcttttaacttaaatgtgctaaccctgtttctgtctgttttgtgctgtaccttttctgattcagaattatagaaaacttgataaatacttgattttaaccaatgagactacaggcagatgggactaagtgtttatgggacaattatgtactatttaacttaaatatattttgtttaataggaaatatataataatagcattttatgtaataaaatatgggcaacgattatcttggaaattaaagagtcaaagcaaagaaatgaagggctggtaaaatgaattttgtaatatcctcaggatacttttatcttaaaagtatgttgttaaagattttgtaaattgtatttcaacaattttaaatgtgttgagcaagttgcagtgcaaacactgtcattatgtagagagtttatatgcacataataacctgtacctataaatcgtgcaataaccatatgcgactattttgccatggagaaatctgacagcattgcaaacaatagtattgtttgatgtagttaaccttaagttatttttcagtaatttcttcacaaatcaagattcaaacagctttaaacacttccaatgagataaaatatttactattatgcttattagaacaaaaggtgtttaaggatgaactaaatattttaattgagcatttatatggataatcatacattatgtaagcccatatgtatttacatccagagtcataatattttaaataaacaatcatgcagaaacttt

SEQ ID NO: 303362 - DNA, 11707 bp, Homo sapiens
  misc_feature (3362)..(3362): n is a, c, g, or t
gagggaaggagggagggaagcagccgctgacccgtggcatgagctggatgcggtgtccgttgcaggactagggcgccgacatgaacctgcaccaggtgctgaccggggctgtgaaccctggcgaccactgcttctccgtgggcagcattggcgaccagcgcttcacggcttatgcatctggatgtgacattgtaatactgggaagcgattttgaaagattacagataatcccaggagctaaacatggaaatattcaagtgggatgtgtagactgttcaatgcaacaaggcaagattgcagcgtcttatggaaatgttatctccatttttgaaccagttaacctaccaaaacaaaagaaaaatttggaattatatagtcagtggcagaaaagtggccaattttttctggaatcaatagcacacaatataacctgggatcccacaggcagtcgtcttttaactggttccagctatttgcaactctggtccaatactaacttggagaagccaactgaagatgaaaatttaaataaaacagatcttaactttggagattggaaatgcatttggcattgcaaaactgcttcccaagttcatttaatgaaattttcaccagatggagaattttttgccactgctgggaaggatgactgtcttttgaaggtttggtataatgtagaaaactggcggacagctgttacttctccagatggaagttcagaaaaacaatcccaaggagaaattgacttttcttttgtgtatctggcccatcctcgagcagtaaatggattttcctggcgtaaaacaagcaaatatatgcctagggcttctgtatgtaatgtactgttgacttgctgcaaagataatgtgtgtcgtctttgggtagagacatttttaccaaatgattgtttgctatacggaggtgactgcagccattggactgaatcaattaatttaacaaataacttcaagagaaatgcttccagtaaagaacgagttcaaaatgctttagaagtaaatctgagacattttcgtagaggtcggaggagatcacttgctcttgtagcacatacgggatatctaccacatcagcaggatcctcatcatgttcacaggaacactccactgcatgccaatgcactttgccactttcatattgcagccagcatcaacccagccacagacattccacttcttccatctattacatctctgagtctaaatgaaaatgaagagaagaccggaccttttgttgtacactggctaaacaataaagaactgcattttactttgtccatggaagtttttttacagcaacttagaaaaagttttgaacaaccatcttctgaggccagtgtagaagattctaatcaggcagatgtaaaatctgatgaagaaactgatgatggtgttgatgatctgaaaataaatcccgaaaagaaggaattaggctgtgataaaatggtaccaaactcaagttttacatcattatcgtcagctgccattgatcatcagattgaagtacttctgtctgaatggagtaaaaatgcagatatgctatttagtattcatcccatggatggttctttgctagtttggcatgtggattggctggatgaataccagcctggtatgtttcgtcaagtacaggtgtcctttgtttccagaattccagtagctttccccacaggtgatgcaaactctctctgtaaaagcataatgatgtatgcctgtaccaagaatgttgacttggctattcagcaggggaaacaaaaaccttctggcctcacccgttccacatcaatgcttatttcttctggtcacaataaatcatctaatagtttaaaattaagtatttttacgcctaatgttatgatgatatcaaaacatgctgatggttctctgaatcagtggctggtcagttttgccgaggaatctgctttttctactgttctcagtatttcccacaaatccagatattgtggtcatcgttttcatcttaatgatttagcttgccactcagtattaccattattgctgacaacatcacaccataatgcattaaggacaccagatgttgataacccagagcaaccttttgatgctctaaatattgaagaatgctctttgacacaacaaaataaaagcactgttgacgtggcatttcaggatcccagtgcagtttacagtgagcttattctgtggagggttgacccagttgggccattgtctttttctggaggagtttctgagcttgcccggattaattctcttcatgtttctgccttttccaatgtggcatggctgcccactcttatacccagttattgtctgggtgcatactgcaactctcctagtgcatgctttgtagccagtgatggacaatatctgagattatatgaagcagttattgatgctaagaaacttttatctgagctttctaaccctgaaatttctaaatatgttggtgaagtctttaacatcgtcagtcaacaatcaacagccaggccaggatgcattattgcattagatcccattaccaaacttcatggcagaaaaacccaactgcttcatgtttttgaagaagacttcattttgaataaccttgagaagaaaagccttggcaaagacagcattttatctaatgcaggcagctcacctaatggattttctgagaagttctacctaattgtaatagaatgcactcaagacaaccgttcactgttacacatgtggaatttacatctaaagtcaattcctgtctcattagatgaaaaagtagatacaaaattatccgaagcggtttggcagccagaagaacattattcttcttctccagagaagatcctatctcctttttcacaaaagtatcaggcttgcagagcaaatctccagagtaccagcaggttgactctgttttcagaaatggtttatagccaagaattgcatttaccagaaggagttgagataataagtattaagccatcagcaggacatctgagttcatcttctatatatcctgcatgcagtgctccttatttattggcaacttcatgttcagatgagaaagtaagattctggagatgcagagtaacagatggagaatctgccacgtcaaagaatggaaaaattgatcttgcatacatttgggaagaatggccattacttattgaagatggacttcagagcaatagtagtataactgtacctggtaggcctgtagaagttagctgtgcacatacaaatcgtttagcagtagcttataagcagcctgcatctaatagtagatcttcccaggactttgtgatgcatgtaagtatttttgaatgtgagtcaacaggaggttcatgttgggtccttgancagacaattcatttagatgagttaagcacagtattggattctggcattagtgttgatagcaatttagtggcctataataaacaagacatgtatttatctagtaaagagaatatcacatcaaacacaaagcatttagttcacttagattggatgtctagagaagacggttctcatatcctgactgtaggaattggatcaaaactttttatgtatggacccctggctggcaaggtacaagaccaaactggtaaggaaaccctggcatttcctctctgggagagtaccaaagttgtgcccctttctaaatttgtactattacgaagtgtggacctagtttcttctgtagatggctccccaccttttcctgtttctttatcgtgggtccgggatggcatccttgtggtaggaatggactgtgaaatgcatgtgtattgccaatggcaaccatcttctaaacaagaacctgttataacagattcgtacagtgggagcactccatctataacaagtttaataaaacagagtaactccagttctgggttacatcctccaaagaaaactctgactcgatccatgaccagtcttgcacagaaaatctgtggaaagaaaactgcattcgatccttcagtggatatggaagattcaggtctttttgaagcagctcatgtactttccccgactctacctcagtatcatcccttgcagcttttggaactcatggatcttggtaaagttcggagagccaaggccatcttgtcccatcttgttaagtgcattgctggggaagttgtggctctgaatgaagctgaatctaatcatgaacgccgccttaggtctctcacaatcagtgctagtggaagcactaccagagacccccaggcattcaacaaggctgaaaatacagattacacagaaatagattctgttcctccacttcctttatatgccttacttgcagcagatgatgatagctgttactcatctttggagaaatctagtaatgagagtacgttaagtaaatcaaaccaattatctaaagaaagttatgatgagctttttcagactcaacttctaatgactgatactcatatgttagagacagatgaagaaaatacaaagcctagagttattgacctttcacagtacagtccgacttactttggacctgagcatgctcaggttctttctggccacttacttcattctagtttaccaggactcagccggatggagcagatgtctttgatggccttagcagatacaattgcaactacaagcactgatattggagaaagccgagacagaagccaaggtggagaaactcttgatgaatgtgggttaaaatttcttttggctgttcgactccatacctttcttacaacttcccttccagcctatcgagctcaactccttcaccaaggcctgtctacaagtcattttgcttgggcatttcactcagtagcagaagaagaactgctgaacatgttgccagccatgcagaaagatgatcccacttggtctgaactaagagctatgggtgtggggtggtgggtccggaatacccgcatcttacgcaaatgcatagaaaaagtagctaaagcagccttttatagaaagaatgatcctttagatgctgccattttttaccttgcaatgaaaaagaaagctgtgatttggggattatatagagctgaaaaaaacaccaggatgacacagttttttggacacaattttgaggatgagaggtggcgtaaagcagctttaaagaatgctttttctttgctaggcaaacaaagatttgaacattctgcagcattttttcttttagctggttgcctcagagatgcaattgaggtatgtcttgagaaattgaatgacattcagttggctcttgtaatagcaagactctatgagtctgaatttgatacatctgcagcatataaatctattttacgtaaaaaagttttgggaatcgattctcctgtcagtgaactgtgttcattgaacataaatatgcatcatgatccttttcttcggagcatggcatattggattttggaagattatagtggtgctctggaaacattaataaagcaacctatcagagagaatgatgatcaagttttatcagccagtaatcctacagtttttaatttctacaattatctaagaacacatcctcttttgctgagacgtcattttggatcatctgatacattttccacacatatgagcctaacaggaaaaagtggactggcaggaacaattaatttaagtgaaagacgtttattttttaccactgccagtgctcatttaaaagctggctgcccaatgttggctttggaagtattatcaaagatgcctaaagtcatcaagaaaacaagacctttttatagggcttctagttttctggatactagtaaagactgttctccttcttctccattaaagttggatgcaagggaagataagtcttctgctgttgattggtcacagtcactgataaatggttttggatcttcttcagagggttcctcagagaagcaatcaaactccactctttcttttgactggagccaaccaagtgttgtgtttcaggatgactctttagagttaaaatgggacagtgataatgatgaagaaaatgaggatgtccctatttcaatgaaagaactaaaacctttacagagaaaaacagataaaaagttggatgacataagttctaactacacagaatctttcagcacactagatgaaaatgaccttttaaatccatcagaagatataattgcagttcagttaaaatttagagcatgtttaaagattctcacagtagaacttcgtactttatctactggctatgaaatagatggtggaaaattgcgttaccaactataccactggcttgaaaaagaggtgatagctcttcagaggacttgtgacttttgctcagatgctgaagaactacagtctgcatttggcagaaatgaagatgaatttggattaaatgaggatgctgaagatttgcctcaccaaacaaaagtgaaacaactgagagaaaattttcaggaaaaaagacagtggctcttgaagtatcagtcacttttgagaatgtttcttagttactgcatacttcatggatcccatggtgggggtcttgcatctgtaagaatggaattgattttgcttttgcaagaatctcagcaggaaacatcagaaccactattttctagccttctgtcagagcaaacctcagtgcctctcctctttgcttgtacagccaatgccaaaacagtagttgccaatccattattgcaccttagtaatctgacacatgatattctccatgccataataaactttgattcaccaccccaccctgatatccaaagcaataaagtgtatgtaatgcatactttagcagcttcactttctgcttgtatttatcagtgcctttgtggtagtcataactacagttcatttcagacgaatcagtttactggaatggtatatcagacagtactgcttcctcatcgaccttctttgaaaacaggaagcttagatgaagcattaactcccaatacgtcaccagctcaatggccaggaataacttgtctaattcgacttttgaattcttctggcgaggaagcccagtcagggcttacagtcttgctctgtgagattctcacagcagtgtatcttagtctcttcatccatggcctggccacacattcaagtaatgagctatttcggattgtggcccatcctctaaatgagaaaatgtggtctgctgtgtttggtggaggtgcacatgttcctagcaaagaacagacacattcaaaaactttacctgtttcttcactagttgaagaaggagaaaaacagaacaaacgttttaggccgtcaaaaatgtcttgcagagaatctgccccactgaccccttcctcggcaccagtaagccaggagtcactggcggttaaagaaaagttcatcccacctgagctcagtatctgggactatttcatagctaagccttttctaccctcttctcaaagtagagccgaatatgattcagaggagagtctgggaagtgatgatgatgacaatgatgatgatgatgatgttttagcatcagatttccatctccaggaacattctaattcaaattcatatagttggtccttgatgcggttggcgatggtgcaattggtgctcaacaatttgaagactttttatcccttcgcaggtcatgatcttgcagagcttccagttagttcacctctttgtcatgcggttctaaaaactcttcaatgttgggaacaagttcttctccgacgacttgaaatccatggtgggccacctcaaaattatatcgcaagtcataccgccgaagagagtttgtctgcaggtcctgcaattcttcgccacaaagctttactggaacctacaaacactcctttcaaatccaaacaccatctggcactgtctgtgaagaggctttggcagtatttggtgaagcaggaagaaattcaggaaacctttatcaaaaatatattcacaaagaaacggtgtctaaatgagatagaagcagatttgggatatcctggaggtaaagcaagaattattcataaggaatctgatatcattactgcgtttgctgttaataaggcaaatagaaactgcatagcaatcgcttccagtcatgatgttcaagaactggatgtttctggaattctggccacacaggtctacacttgggtagatgatgatatagaagtggaaaccaaaggatcagaagatttcttggttatacatgctcgtgatgatttaacagctgttcaaggtacaactccatatacacatagcaatcctggcactccaatcaacatgccatggcttggtagtacacagactggcagaggagcatctgtgatgattaagaaagccattaataatgttagaagaatgacttctcatccaactcttccttactatctgacaggagctcaagatggaagtgtcagaatgtttgaatggggccattctcaacaaataacctgttttcgatctggtggcaattcaagagttacaagaatgagatttaactatcagggaaataagtttggaatagttgatgctgatggatatttaagtttgtatcaaacaaactggaaatgttgtccagttactggaagcatgcctaagccatacctgacttggcagtgtcataacaaaacagccaatgattttgtcttcgttagttcctcctctctgatagctacagctggtctttcaactgacaatagaaacgtatgtttgtgggatactcttgtagcacctgccaatagtttagtccatgcatttacctgccatgacagtggagccacagttttagcatatgctccaaaacatcagctactaatatcaggtggcagaaaaggttttacatatgtatttgacctttgtcaacgacaacagaggcagcttttccagagccatgattctcctgttaaagccgttgctgttgatccaactgaagagtactttgttacaggatctgccgaaggcaatataaagatttggagtctctctacctttggtcttctccatacttttgtcagtgaacatgctcggcagtccatttttagaaatattggaactggagtgatgcaaattgagacagggcctgcaaatcacattttctcctgtggagctgatggaacaatgaaaatgagaatactgccagatcagtttagccctttaaatgaagtgttgaaaaatgatgtgaaatttatgctataacatttttacaataagatgtacaatttattacctatatggaagtggccaacagatataatatacagtgatcattctctatgccacaaattagctaatgctttcttgtttttatatttattttatggagctttgcccttgatgcactgatgccttaaaaattaacaaggtcattcagaagtagattacattgcctaaagtagaatgtgtaagtaatgctgtaataatacatatcatagtatattataatcagtatgtcatagtgttaaaggtgttttgttttctttattgatacttttccacaggcatctctgcatgaatttcttccacagtaaaaatacgttttttgtaaaggcaattgtacataatactcatcacttaattcaccacactctcacttcctttattagccttatacatctcaaactcttctcttaattaatgataggtatttgagtaagaatgaaaaaaataatgaacatcttcattaaaattgtcattgagacgtcagtgataaatgagctagatggctcaatatgtaaggttttcagtagtttaccctccggaacccaagttatatgtatgtatacgtgtgtgtgtgtgtgtgtgtgtgtatcttacacatcttatttgaacttagttgtatatattagcgaaaactggtttttcatgtgtttttgtgccataacaactattgccaccagaataacttttttttgcaactgtgcttttcatttttaaaaaatttttgaattcccatcctaattttcaaataagtttcaaggagactatcaggattattattttaaagattagatttagtcaaataagtcttagcaggcaataaagtttctgtggtggcatatatcatgtaagacacttaaagtaagtttgtgaatttgtcaactttcgagcatcaaacaaatattttacttaaattttattttatcttatttttaggtgcttttaatctcaaaattctgaaaagcgaatagcagtgttttcagaaacaaatgtgaaagcagtcaaattaagtagatactatttagaaatgtaaaatactctccagatctaccattaatagaaaataaactaaaccttatattttatttttgccaaaatattttattataaaatatgaccaaaatatttaaaatgcacaatgcttttaacttaaatgtgctaaccctgtttctgtctgttttgtgctgtaccttttctgattcagaattatagaaaacttgataaatacttgattttaaccaatgagactacaggcagatgggactaagtgtttatgggacaattatgtactatttaacttaaatatattttgtttaataggaaatatataataatagcattttatgtaataaaatatgggcaacgattatcttggaaattaaagagtcaaagcaaagaaatgaagggctggtaaaatgaattttgtaatatcctcaggatacttttatcttaaaagtatgttgttaaagattttgtaaattgtatttcaacaattttaaatgtgttgagcaagttgcagtgcaaacactgtcattatgtagagagtttatatgcacataataacctgtacctataaatcgtgcaataaccatatgcgactattttgccatggagaaatctgacagcattgcaaacaatagtattgtttgatgtagttaaccttaagttatttttcagtaatttcttcacaaatcaagattcaaacagctttaaacacttccaatgagataaaatatttactattatgcttattagaacaaaaggtgtttaaggatgaactaaatattttaattgagcatttatatggataatcatacattatgtaagcccatatgtatttacatccagagtcataatattttaaataaacaatcatgcagaaactttaaaaaaaaaaaaaaaaaaaaaaaaaaaaaaaaaaaaaaaaaaaaaaaaaaaaaaaagagaggggggggggcgcgccaagaaaaaccccccgggggggcgcccgtgcgggcggcccccgttttggggaaggggggggcccgccaatagtgagggagcgatcctatctatattatcaccgcagaagaggccgagaacggcgccgcgcactagctactaaccaaaccacgctctccaacgcgtaggaacacaaaccagcggcccatcccacgagggaaaaccactgggcgaagcaagcgacaccccaatcactctcgtgcggcggggcggcgacccaataaatgagtaggacaccacccactacaccaacaaagagcattatttacaacgaggcctcagaaaggaggcgaaaatattaaagaaccttctaacaggcgcggcatacatgggggcgtgcttaacccacatagcgcatgacaactctgcggcgccggcggagccgaggaaaaaaactccgcgctaacacggcggcgactgcactctacgacgacacaattttaaccacacgggggcgccatcactataaacactaccacccccacccaacagcacccgcacaaccacgcccacaccaccac

SEQ ID NO: 303363 - DNA, 3026 bp, Homo sapiens
gagggaaggagggagggaagcagccgctgacccgtggcatgagctggatgcggtgtccgttgcaggactagggcgccgacatgaacctgcaccaggtgctgaccggggctgtgaaccctggcgaccactgcttctccgtgggcagcattggcgaccagcgcttcacggcttatgcatctggatgtgacattgtaatactgggaagcgattttgaaagattacagataatcccaggagctaaacatggaaatattcaagtgggatgtgtagactgttcaatgcaacaaggcaagattgcagcgtcttatggaaatgttatctccatttttgaaccagttaacctaccaaaacaaaagaaaaatttggaattatatagtcagtggcagaaaagtggccaattttttctggaatcaatagcacacaatataacctgggatcccacaggcagtcgtcttttaactggttccagctatttgcaactctggtccaatactaacttggagaagccaactgaagatgaaaatttaaataaaacagatcttaactttggagattggaaatgcatttggcattgcaaaactgcttcccaagttcatttaatgaaattttcaccagatggagaattttttgccactgctgggaaggatgactgtcttttgaaggtttggtataatgtagaaaactggcggacagctgttacttctccagatggaagttcagaaaaacaatcccaaggagaaattgacttttcttttgtgtatctggcccatcctcgagcagtaaatggattttcctggcgtaaaacaagcaaccatgattctcctgttaaagccgttgctgttgatccaactgaagagtactttgttacaggatctgccgaaggcaatataaagatttggagtctctctacctttggtcttctccatacttttgtcagtgaacatgctcggcagtccatttttagaaatattggaactggagtgatgcaaattgagacagggcctgcaaatcacattttctcctgtggagctgatggaacaatgaaaatgagaatactgccagatcagtttagccctttaaatgaagtgttgaaaaatgatgtgaaatttatgctataacatttttacaataagatgtacaatttattacctatatggaagtggccaacagatataatatacagtgatcattctctatgccacaaattagctaatgctttcttgtttttatatttattttatggagctttgcccttgatgcactgatgccttaaaaattaacaaggtcattcagaagtagattacattgcctaaagtagaatgtgtaagtaatgctgtaataatacatatcatagtatattataatcagtatgtcatagtgttaaaggtgttttgttttctttattgatacttttccacaggcatctctgcatgaatttcttccacagtaaaaatacgttttttgtaaaggcaattgtacataatactcatcacttaattcaccacactctcacttcctttattagccttatacatctcaaactcttctcttaattaatgataggtatttgagtaagaatgaaaaaaataatgaacatcttcattaaaattgtcattgagacgtcagtgataaatgagctagatggctcaatatgtaaggttttcagtagtttaccctccggaacccaagttatatgtatgtatacgtgtgtgtgtgtgtgtgtgtgtgtatcttacacatcttatttgaacttagttgtatatattagcgaaaactggtttttcatgtgtttttgtgccataacaactattgccaccagaataacttttttttgcaactgtgcttttcatttttaaaaaatttttgaattcccatcctaattttcaaataagtttcaaggagactatcaggattattattttaaagattagatttagtcaaataagtcttagcaggcaataaagtttctgtggtggcatatatcatgtaagacacttaaagtaagtttgtgaatttgtcaactttcgagcatcaaacaaatattttacttaaattttattttatcttatttttaggtgcttttaatctcaaaattctgaaaagcgaatagcagtgttttcagaaacaaatgtgaaagcagtcaaattaagtagatactatttagaaatgtaaaatactctccagatctaccattaatagaaaataaactaaaccttatattttatttttgccaaaatattttattataaaatatgaccaaaatatttaaaatgcacaatgcttttaacttaaatgtgctaaccctgtttctgtctgttttgtgctgtaccttttctgattcagaattatagaaaacttgataaatacttgattttaaccaatgagactacaggcagatgggactaagtgtttatgggacaattatgtactatttaacttaaatatattttgtttaataggaaatatataataatagcattttatgtaataaaatatgggcaacgattatcttggaaattaaagagtcaaagcaaagaaatgaagggctggtaaaatgaattttgtaatatcctcaggatacttttatcttaaaagtatgttgttaaagattttgtaaattgtatttcaacaattttaaatgtgttgagcaagttgcagtgcaaacactgtcattatgtagagagtttatatgcacataataacctgtacctataaatcgtgcaataaccatatgcgactattttgccatggagaaatctgacagcattgcaaacaatagtattgtttgatgtagttaaccttaagttatttttcagtaatttcttcacaaatcaagattcaaacagctttaaacacttccaatgagataaaatatttactattatgcttattagaacaaaaggtgtttaaggatgaactaaatattttaattgagcatttatatggataatcatacattatgtaagcccatatgtatttacatccagagtcataatattttaaataaacaatcatgcagaaacttt

SEQ ID NO: 303364 - DNA, 318 bp, Homo sapiens
ccactaatgacgtgactgttcttttcattatataaatctgtctttagagagaaaaaaagattaaaactgtggcatagtgtgactcactgctaatatgttgctttgtaacacttgggacattttcaagagatgtttgactttacaaagtttgtggctaaaacctcaagtttcttgtttatttcattactttagttcattacagtgttatctgtacacctgtatcacgtactcagtggtatggtattttcaacttagaattaaaacaagtttaagttttaggtagttggtcaatcttctaaaatagtttgtaaagttttt

SEQ ID NO: 303365 - DNA, 3359 bp, Homo sapiens
ccggccgctcgccctgtccggtctctccccggccccttgattctccgcgtcttcctcgcaggccagcctaagctcagcctgcattgcgccctcccggcctagggtgtcgctgtaccggcctccgagctccacatagacaagtccggacctcgggcgggggcaggagacggagctgagcggcggggggcagtgtcgcctcggtctagggacggcggcggagtcggtggtccctgcgcgatggccacctcggtgttgtgctgcctgcggtgctgcagagacggggggactggccacatccctctgaaggagatgccggccgtgcagctggacacgcagcacatgggaacagatgttgttattgtaaagaatggaagaagaatatgtggaacaggaggttgtttagccagcgcacctttacatcaaaacaaaagctattttgaattcaaaatccagtccacaggaatctggggtattggtgttgcaactcagaaggttaacttgaatcagattcctcttggccgagatatgcacagtctggtgatgagaaatgatggagccctttaccacaacaatgaagagaaaaataggctgccagcaaacagtcttccgcaggaaggagatgtggtgggtattacttatgaccatgtcgaattaaatgtatacttgaatggaaaaaacatgcattgtccagcatcaggtatacgagggacagtgtatccagttgtttatgttgatgacagtgcaattttggattgccagttcagtgagttttatcatacgcctccacctggttttgaaaaaatattatttgaacagcaaatcttctgaatgtatttgtttttaaaacttgtatttctgcactgttaaaaaatgttcatcatttaataaaactttacctggcctatagatgaaaatatattcttaaaaatatgcttgttgatgctgtctaaggaaccaatgtattcagtataccaccctgaagttgtgatttaaaatactttatgttttgtgaaatgaaaataagcatttgggcagtttatttaattcttatttaaataaatagaattatgggtttaattaacagtataacatgactatatatacatatatatttaaagggaattctttcttacataatatatttgttttgatagagatgtagagttgggtgggtgtttttgtcactctgaagtttagacctcattaaatatttgacatctacagttggataattttgccgcttagtgtccttttttatatacaatataacaaagtgagagaaatttatattactggcaatttcatttttggcagtctatttctgtatcatgtaccgcttttcttaaaacttaaattgcttattttgttgtgtaatgtcattgcttttgatttgctttgtgaaaggagataaacgtttcagtaattgtcagagcattttgttgcctcaggctgtgttacctcaatttcagagtaagtagtggttgattagtaatgtagtatacactggcagacatctagaatagtatgatgctttacatttaaatgaggttattcttttaaggacttttatttgtatgttttctgtaaggaataataaaataattgtaattaaggaatataccatactatattaaacacattcttcctattttgttagttatacactaaattcacatcacccgtgattatttcagttcagagataagtgaatcctcttcatgaccctgagtctttgcctggttcttaagaatcactgtcctttagttaacgccctgtgacctgaaccaatcactctatacatctttagatacgttgtctgttttcaaatgagcatggcaaggatgcatacatttccctcctttatcaactagaaacagtacattgttcaggaaaacatgagtgttagaattagaaagagatccaaattgtagttttgctgctcatcctattttctcctctccaagtctcagattcccatttataaaaggagcaatcatactgacataagattctatgattaaataaggtaatacgtatataacaccttaataatcataggcacttgcgccaggcgcggtggctcacacctgtaatcccagcactttgggaggctgaggcgggaggatcacaaggtcaggagatcgagaccatcgtggctaacatggtgaaaccctggctctactaaaaaaatacaaaaaaaattagccaggtgtggtggcgggcgcctgtagttctagctactctggaggctgaggcaggagaatggcttgaacccgggagacggcgcttgcagtgagccgagattgccccactgcactccagcctaggcaacagagtgagactctgtctcaaaaaaaattaaaataaaataaaataaaaatcataggcacttagtaagtgtagtttcctggatggtaaagtatcagggaaagtggttttctttctttttttttttttctcgttttttttttgagacagagtctcaccttgtcacccaggctagagtgcagtggcacgatcttggctcactgcaacctctgcttcccaggtttaagcgattctcttgcctcagcctcccgagtaggtgggactacaggtgcccgccaccacgcccgtgtaatttttgtatttttagtagagatggggtttcaccatgttgtccaggctggtctcaaactcctgacctcatgatccacctccctcagcctcccaaagtgctggaattataggcgtaagccaccacacccagccagaaagtggttctcatgatgcttctcagaccggcaacatcagcatcactggaacttgttaaaaatggacactctcagaacccacaccagacccaccaaatcagtttgagaactgccattcagtagagaattatttgcctactgtaaattttctaaggatttatgatgggctatttttgacccataggctcagagaatcctgcaaaatccttttttattgtttattctgcagacaaaaatgtgacaatatgctttgaaaacatagatatacttgagtaacatttatttacataaatcccaaattctacctctgaaggtatatgaaatttaactatgtatgtattatgcattttgtctggctttctatcataattttaatttgtaaagaatgtgcttacttgggaaagcaaattaaagtgactactgtttgctatcgttaaaaaaaaaaaaaaaaaaaaaaaaaaaaaaaaaaaaaaaaaaaaaaaagagaaggggagaaggagaaaaaaaaagagtaggggaaagggaaaaaaaatataagggaaaaaatgggggggggacagggaccaaaggggggggggaaagggaggggcggggagttaaaggggg

SEQ ID NO: 303366 - DNA, 1647 bp, Homo sapiens
ccggccgctcgccctgtccggtctctccccggccccttgattctccgcgtcttcctcgcaggccagcctaagctcagcctgcattgcgccctcccggcctagggtgtcgctgtaccggcctccgagctccacatagacaagtccggacctcgggcgggggcaggagacggagctgagcggcggggggcagtgtcgcctcggtctagggacggcggcggagtcggtggtccctgcgcgatggccacctcggtgttgtgctgcctgcggtgctgcagagacggggggactggccacatccctctgaaggagatgccggccgtgcagctggacacgcagcacatgggaacagatgttgttattgtaaagaatggaagaagaatatgtggaacaggaggttgtttagccagcgcacctttacatcaaaacaaaagctattttgaattcaaaatccagtccacaggaatctggggtattggtgttgcaactcagaaggttaacttgaatcagattcctcttggccgagatatgcacagtctggtgatgagaaatgatggagccctttaccacaacaatgaagagaaaaataggctgccagcaaacagtcttccgcaggaaggagatgtggtgggtattacttatgaccatgtcgaattaaatgtatacttgaatggaaaaaacatgcattgtccagcatcaggtatacgagggacagtgtatccagttgtttatgttgatgacagtgcaattttggattgccagttcagtgagttttatcatacgcctccacctggttttgaaaaaatattatttgaacagcaaatcttctgaatgtatttgtttttaaaacttgtatttctgcactgttaaaaaatgttcatcatttaataaaactttacctggcctatagatgaaaatatattcttaaaaatatgcttgttgatgctgtctaaggaaccaatgtattcagtataccaccctgaagttgtgatttaaaatactttatgttttgtgaaatgaaaataagcatttgggcagtttatttaattcttatttaaataaatagaattatgggtttaattaacagtataacatgactatatatacatatatatttaaagggaattctttcttacataatatatttgttttgatagagatgtagagttgggtgggtgtttttgtcactctgaagtttagacctcattaaatatttgacatctacagttggataattttgccgcttagtgtccttttttatatacaatataacaaagtgagagaaatttatattactggcaatttcatttttggcagtctatttctgtatcatgtaccgcttttcttaaaacttaaattgcttattttgttgtgtaatgtcattgcttttgatttgctttgtgaaaggagataaacgtttcagtaattgtcagagcattttgttgcctcaggctgtgttacctcaatttcagagtaagtagtggttgattagtaatgtagtatacactggcagacatctagaatagtatgatgctttacatttaaatgaggttattcttttaaggacttttatttgtatgttttctgtaaggaataataaaataattgtaattaaggaatataccatactatattaaacacattcttcct

SEQ ID NO: 303367 - DNA, 1230 bp, Homo sapiens
ccggccgctcgccctgtccggtctctccccggccccttgattctccgcgtcttcctcgcaggccagcctaagctcagcctgcattgcgccctcccggcctagggtgtcgctgtaccggcctccgagctccacatagacaagtccggacctcgggcgggggcaggagacggagctgagcggcggggggcagtgtcgcctcggtctagggacggcggcggagtcggtggtccctgcgcgatggccacctcggtgttgtgctgcctgcggtgctgcagagacggggggactggccacatccctctgaaggagatgccggccgtgcagctggacacgcagcacatgggaacagatgttgttattgtaaagaatggaagaagaatatgtggaacaggaggttgtttagccagcgcacctttacatcaaaacaaaagctattttgaattcaaaatccagtccacaggaatctggggtattggtgttgcaactcagaaggttaacttgaatcagattcctcttggccgagatatgcacagtctggtgatgagaaatgatggagccctttaccacaacaatgaagagaaaaataggctgccagcaaacagtcttccgcaggaaggagatgtggtgggtattacttatgaccatgtcgaattaaatgtatacttgaatggaaaaaacatgcattgtccagcatcaggtatacgagggacagtgtatccagttgtttatgttgatgacagtgcaattttggattgccagttcagtgagttttatcatacgcctccacctggttttgaaaaaatattatttgaacagcaaatcttctgaatgtatttgtttttaaaacttgtatttctgcactgttaaaaaatgttcatcatttaataaaactttacctggcctatagatgaaaatatattcttaaaaatatgcttgttgatgctgtctaaggaaccaatgtattcagtataccaccctgaagttgtgatttaaaatactttatgttttgtgaaatgaaaataagcatttgggcagtttatttaattcttatttaaataaatagaattatgggtttaattaacagtataacatgactatatatacatatatatttaaagggaattctttcttacataatatatttgttttgatagagatgtagagttgggtgggtgtttttgtcactctgaagtttagacctcattaaatatttgacatctacagttggat

SEQ ID NO: 303368 - DNA, 906 bp, Homo sapiens
ccggccgctcgccctgtccggtctctccccggccccttgattctccgcgtcttcctcgcaggccagcctaagctcagcctgcattgcgccctcccggcctagggtgtcgctgtaccggcctccgagctccacatagacaagtccggacctcgggcgggggcaggagacggagctgagcggcggggggcagtgtcgcctcggtctagggacggcggcggagtcggtggtccctgcgcgatggccacctcggtgttgtgctgcctgcggtgctgcagagacggggggactggccacatccctctgaaggagatgccggccgtgcagctggacacgcagcacatgggaacagatgttgttattgtaaagaatggaagaagaatatgtggaacaggaggttgtttagccagcgcacctttacatcaaaacaaaagctattttgaattcaaaatccagtccacaggaatctggggtattggtgttgcaactcagaaggttaacttgaatcagattcctcttggccgagatatgcacagtctggtgatgagaaatgatggagccctttaccacaacaatgaagagaaaaataggctgccagcaaacagtcttccgcaggaaggagatgtggtgggtattacttatgaccatgtcgaattaaatgtatacttgaatggaaaaaacatgcattgtccagcatcaggtatacgagggacagtgtatccagttgtttatgttgatgacagtgcaattttggattgccagttcagtgagttttatcatacgcctccacctggttttgaaaaaatattatttgaacagcaaatcttctgaatgtatttgtttttaaaacttgtatttctgcactgttaaaaaatgttcatcatttaataaaactttacctggcctata

SEQ ID NO: 303369 - DNA, 789 bp, Homo sapiens
ccggccgctcgccctgtccggtctctccccggccccttgattctccgcgtcttcctcgcaggccagcctaagctcagcctgcattgcgccctcccggcctagggtgtcgctgtaccggcctccgagctccacatagacaagtccggacctcgggcgggggcaggagacggagctgagcggcggggggcagtgtcgcctcggtctagggacggcggcggagtcggtggtccctgcgcgatggccacctcggtgttgtgctgcctgcggtgctgcagagacggggggactggccacatccctctgaaggagatgccggccgtgcagctggacacgcagcacatgggaatctggggtattggtgttgcaactcagaaggttaacttgaatcagattcctcttggccgagatatgcacagtctggtgatgagaaatgatggagccctttaccacaacaatgaagagaaaaataggctgccagcaaacagtcttccgcaggaaggagatgtggtgggtattacttatgaccatgtcgaattaaatgtatacttgaatggaaaaaacatgcattgtccagcatcaggtatacgagggacagtgtatccagttgtttatgttgatgacagtgcaattttggattgccagttcagtgagttttatcatacgcctccacctggttttgaaaaaatattatttgaacagcaaatcttctgaatgtatttgtttttaaaacttgtatttctgcactgttaaaaaatgttcatcatttaataaaactttacctggcctata

SEQ ID NO: 303370 - DNA, 2698 bp, Homo sapiens
ccggccgctcgccctgtccggtctctccccggccccttgattctccgcgtcttcctcgcaggccagcctaagctcagcctgcattgcgccctcccggcctagggtgtcgctgtaccggcctccgagctccacatagacaagtccggacctcgggcgggggcaggagacggagctgagcggcggggggcagtgtcgcctcggtctagggacggcggcggagtcggtggtccctgcgcgatggccacctcggtgttgtgctgcctgcggtgctgcagagacggggggactggccacatccctctgaaggagatgccggccgtgcagctggacacgcagcacatgggaacagatgttgttattgtaaagaatggaagaagaatatgtggaacaggaggttgtttagccagcgcacctttacatcaaaacaaaagctattttgaattcaaaatccagtccacaggaatctggggtattggtgttgcaactcagaaggttaacttgaatcagattcctcttggccgagatatgcacagtctggtgatgagaaatgatggagccctttaccacaacaatgaagagaaaaataggctgccagcaaacagtcttccgcaggaaggagatgtggtgggtattacttatgaccatgtcgaattaaatgtatacttgaatggaaaaaacatgcattgtccagcatcaggtatacgagggacagtgtatccagttgtttatgttgatgacagtgcaattttggattgccagttcagtgagttttatcatacgcctccacctggttttgaaaaaatattatttgaacagcaaatcttctgaatgtatttgtttttaaaacttgtatttctgcactgttaaaaaatgttcatcatttaataaaactttacctggcctatagatgaaaatatattcttaaaaatatgcttgttgatgctgtctaaggaaccaatgtattcagtataccaccctgaagttgtgatttaaaatactttatgttttgtgaaatgaaaataagcatttgggcagtttatttaattcttatttaaataaatagaattatgggtttaattaacagtataacatgactatatatacatatatatttaaagggaattctttcttacataatatatttgttttgatagagatgtagagttgggtgggtgtttttgtcactctgaagtttagacctcattaaatatttgacatctacagttggataattttgccgcttagtgtccttttttatatacaatataacaaagtgagagaaatttatattactggcaatttcatttttggcagtctatttctgtatcatgtaccgcttttcttaaaacttaaattgcttattttgttgtgtaatgtcattgcttttgatttgctttgtgaaaggagataaacgtttcagtaattgtcagagcattttgttgcctcaggctgtgttacctcaatttcagagtaagtagtggttgattagtaatgtagtatacactggcagacatctagaatagtatgatgctttacatttaaatgaggttattcttttaaggacttttatttgtatgttttctgtaaggaataataaaataattgtaattaaggaatataccatactatattaaacacattcttcctattttgttagttatacactaaattcacatcacccgtgattatttcagttcagagataagtgaatcctcttcatgaccctgagtctttgcctggttcttaagaatcactgtcctttagttaacgccctgtgacctgaaccaatcactctatacatctttagatacgttgtctgttttcaaatgagcatggcaaggatgcatacatttccctcctttatcaactagaaacagtacattgttcaggaaaacatgagtgttagaattagaaagagatccaaattgtagttttgtgcccgccaccacgcccgtgtaatttttgtatttttagtagagatggggtttcaccatgttgtccaggctggtctcaaactcctgacctcatgatccacctccctcagcctcccaaagtgctggaattataggcgtaagccaccacacccagccagaaagtggttctcatgatgcttctcagaccggcaacatcagcatcactggaacttgttaaaaatggacactctcagaacccacaccagacccaccaaatcagtttgagaactgccattcagtagagaattatttgcctactgtaaattttctaaggatttatgatgggctatttttgacccataggctcagagaatcctgcaaaatccttttttattgtttattctgcagacaaaaatgtgacaatatgctttgaaaacatagatatacttgagtaacatttatttacataaatcccaaattctacctctgaaggtatatgaaatttaactatgtatgtattatgcattttgtctggctttctatcataattttaatttgtaaagaatgtgcttacttgggaaagcaaattaaagtgactactgtttgctatcgttaaaaaaaaaaaaaaaaaaaaaaaaaaaaaaaaaaaaaaaaaaaaaaaagagaaggggagaaggagaaaaaaaaagagtaggggaaagggaaaaaaaatataagggaaaaaatgggggggggacagggaccaaaggggggggggaaagggaggggcggggagttaaaggggg

SEQ ID NO: 303371 - DNA, 3153 bp, Homo sapiens
ctcctgccctgactgtcggtcctgtctcttgagccccatcatttataggttgaatcctatattattggaagtaattttcctctcacctcctaaagtcgaaacaaggcagactgcagaagtctgaagtcgcacctcaggaacagatgttgttattgtaaagaatggaagaagaatatgtggaacaggaggttgtttagccagcgcacctttacatcaaaacaaaagctattttgaattcaaaatccagtccacaggaatctggggtattggtgttgcaactcagaaggttaacttgaatcagattcctcttggccgagatatgcacagtctggtgatgagaaatgatggagccctttaccacaacaatgaagagaaaaataggctgccagcaaacagtcttccgcaggaaggagatgtggtgggtattacttatgaccatgtcgaattaaatgtatacttgaatggaaaaaacatgcattgtccagcatcaggtatacgagggacagtgtatccagttgtttatgttgatgacagtgcaattttggattgccagttcagtgagttttatcatacgcctccacctggttttgaaaaaatattatttgaacagcaaatcttctgaatgtatttgtttttaaaacttgtatttctgcactgttaaaaaatgttcatcatttaataaaactttacctggcctatagatgaaaatatattcttaaaaatatgcttgttgatgctgtctaaggaaccaatgtattcagtataccaccctgaagttgtgatttaaaatactttatgttttgtgaaatgaaaataagcatttgggcagtttatttaattcttatttaaataaatagaattatgggtttaattaacagtataacatgactatatatacatatatatttaaagggaattctttcttacataatatatttgttttgatagagatgtagagttgggtgggtgtttttgtcactctgaagtttagacctcattaaatatttgacatctacagttggataattttgccgcttagtgtccttttttatatacaatataacaaagtgagagaaatttatattactggcaatttcatttttggcagtctatttctgtatcatgtaccgcttttcttaaaacttaaattgcttattttgttgtgtaatgtcattgcttttgatttgctttgtgaaaggagataaacgtttcagtaattgtcagagcattttgttgcctcaggctgtgttacctcaatttcagagtaagtagtggttgattagtaatgtagtatacactggcagacatctagaatagtatgatgctttacatttaaatgaggttattcttttaaggacttttatttgtatgttttctgtaaggaataataaaataattgtaattaaggaatataccatactatattaaacacattcttcctattttgttagttatacactaaattcacatcacccgtgattatttcagttcagagataagtgaatcctcttcatgaccctgagtctttgcctggttcttaagaatcactgtcctttagttaacgccctgtgacctgaaccaatcactctatacatctttagatacgttgtctgttttcaaatgagcatggcaaggatgcatacatttccctcctttatcaactagaaacagtacattgttcaggaaaacatgagtgttagaattagaaagagatccaaattgtagttttgctgctcatcctattttctcctctccaagtctcagattcccatttataaaaggagcaatcatactgacataagattctatgattaaataaggtaatacgtatataacaccttaataatcataggcacttgcgccaggcgcggtggctcacacctgtaatcccagcactttgggaggctgaggcgggaggatcacaaggtcaggagatcgagaccatcgtggctaacatggtgaaaccctggctctactaaaaaaatacaaaaaaaattagccaggtgtggtggcgggcgcctgtagttctagctactctggaggctgaggcaggagaatggcttgaacccgggagacggcgcttgcagtgagccgagattgccccactgcactccagcctaggcaacagagtgagactctgtctcaaaaaaaattaaaataaaataaaataaaaatcataggcacttagtaagtgtagtttcctggatggtaaagtatcagggaaagtggttttctttctttttttttttttctcgttttttttttgagacagagtctcaccttgtcacccaggctagagtgcagtggcacgatcttggctcactgcaacctctgcttcccaggtttaagcgattctcttgcctcagcctcccgagtaggtgggactacaggtgcccgccaccacgcccgtgtaatttttgtatttttagtagagatggggtttcaccatgttgtccaggctggtctcaaactcctgacctcatgatccacctccctcagcctcccaaagtgctggaattataggcgtaagccaccacacccagccagaaagtggttctcatgatgcttctcagaccggcaacatcagcatcactggaacttgttaaaaatggacactctcagaacccacaccagacccaccaaatcagtttgagaactgccattcagtagagaattatttgcctactgtaaattttctaaggatttatgatgggctatttttgacccataggctcagagaatcctgcaaaatccttttttattgtttattctgcagacaaaaatgtgacaatatgctttgaaaacatagatatacttgagtaacatttatttacataaatcccaaattctacctctgaaggtatatgaaatttaactatgtatgtattatgcattttgtctggctttctatcataattttaatttgtaaagaatgtgcttacttgggaaagcaaattaaagtgactactgtttgctatcgttaaaaaaaaaaaaaaaaaaaaaaaaaaaaaaaaaaaaaaaaaaaaaaaagagaaggggagaaggagaaaaaaaaagagtaggggaaagggaaaaaaaatataagggaaaaaatgggggggggacagggaccaaaggggggggggaaagggaggggcggggagttaaaggggg

SEQ ID NO: 303372 - DNA, 3242 bp, Homo sapiens
ccggccgctcgccctgtccggtctctccccggccccttgattctccgcgtcttcctcgcaggccagcctaagctcagcctgcattgcgccctcccggcctagggtgtcgctgtaccggcctccgagctccacatagacaagtccggacctcgggcgggggcaggagacggagctgagcggcggggggcagtgtcgcctcggtctagggacggcggcggagtcggtggtccctgcgcgatggccacctcggtgttgtgctgcctgcggtgctgcagagacggggggactggccacatccctctgaaggagatgccggccgtgcagctggacacgcagcacatgggaatctggggtattggtgttgcaactcagaaggttaacttgaatcagattcctcttggccgagatatgcacagtctggtgatgagaaatgatggagccctttaccacaacaatgaagagaaaaataggctgccagcaaacagtcttccgcaggaaggagatgtggtgggtattacttatgaccatgtcgaattaaatgtatacttgaatggaaaaaacatgcattgtccagcatcaggtatacgagggacagtgtatccagttgtttatgttgatgacagtgcaattttggattgccagttcagtgagttttatcatacgcctccacctggttttgaaaaaatattatttgaacagcaaatcttctgaatgtatttgtttttaaaacttgtatttctgcactgttaaaaaatgttcatcatttaataaaactttacctggcctatagatgaaaatatattcttaaaaatatgcttgttgatgctgtctaaggaaccaatgtattcagtataccaccctgaagttgtgatttaaaatactttatgttttgtgaaatgaaaataagcatttgggcagtttatttaattcttatttaaataaatagaattatgggtttaattaacagtataacatgactatatatacatatatatttaaagggaattctttcttacataatatatttgttttgatagagatgtagagttgggtgggtgtttttgtcactctgaagtttagacctcattaaatatttgacatctacagttggataattttgccgcttagtgtccttttttatatacaatataacaaagtgagagaaatttatattactggcaatttcatttttggcagtctatttctgtatcatgtaccgcttttcttaaaacttaaattgcttattttgttgtgtaatgtcattgcttttgatttgctttgtgaaaggagataaacgtttcagtaattgtcagagcattttgttgcctcaggctgtgttacctcaatttcagagtaagtagtggttgattagtaatgtagtatacactggcagacatctagaatagtatgatgctttacatttaaatgaggttattcttttaaggacttttatttgtatgttttctgtaaggaataataaaataattgtaattaaggaatataccatactatattaaacacattcttcctattttgttagttatacactaaattcacatcacccgtgattatttcagttcagagataagtgaatcctcttcatgaccctgagtctttgcctggttcttaagaatcactgtcctttagttaacgccctgtgacctgaaccaatcactctatacatctttagatacgttgtctgttttcaaatgagcatggcaaggatgcatacatttccctcctttatcaactagaaacagtacattgttcaggaaaacatgagtgttagaattagaaagagatccaaattgtagttttgctgctcatcctattttctcctctccaagtctcagattcccatttataaaaggagcaatcatactgacataagattctatgattaaataaggtaatacgtatataacaccttaataatcataggcacttgcgccaggcgcggtggctcacacctgtaatcccagcactttgggaggctgaggcgggaggatcacaaggtcaggagatcgagaccatcgtggctaacatggtgaaaccctggctctactaaaaaaatacaaaaaaaattagccaggtgtggtggcgggcgcctgtagttctagctactctggaggctgaggcaggagaatggcttgaacccgggagacggcgcttgcagtgagccgagattgccccactgcactccagcctaggcaacagagtgagactctgtctcaaaaaaaattaaaataaaataaaataaaaatcataggcacttagtaagtgtagtttcctggatggtaaagtatcagggaaagtggttttctttctttttttttttttctcgttttttttttgagacagagtctcaccttgtcacccaggctagagtgcagtggcacgatcttggctcactgcaacctctgcttcccaggtttaagcgattctcttgcctcagcctcccgagtaggtgggactacaggtgcccgccaccacgcccgtgtaatttttgtatttttagtagagatggggtttcaccatgttgtccaggctggtctcaaactcctgacctcatgatccacctccctcagcctcccaaagtgctggaattataggcgtaagccaccacacccagccagaaagtggttctcatgatgcttctcagaccggcaacatcagcatcactggaacttgttaaaaatggacactctcagaacccacaccagacccaccaaatcagtttgagaactgccattcagtagagaattatttgcctactgtaaattttctaaggatttatgatgggctatttttgacccataggctcagagaatcctgcaaaatccttttttattgtttattctgcagacaaaaatgtgacaatatgctttgaaaacatagatatacttgagtaacatttatttacataaatcccaaattctacctctgaaggtatatgaaatttaactatgtatgtattatgcattttgtctggctttctatcataattttaatttgtaaagaatgtgcttacttgggaaagcaaattaaagtgactactgtttgctatcgttaaaaaaaaaaaaaaaaaaaaaaaaaaaaaaaaaaaaaaaaaaaaaaaagagaaggggagaaggagaaaaaaaaagagtaggggaaagggaaaaaaaatataagggaaaaaatgggggggggacagggaccaaaggggggggggaaagggaggggcggggagttaaaggggg

SEQ ID NO: 303373 - DNA, 3256 bp, Homo sapiens
ccggccgctcgccctgtccggtctctccccggccccttgattctccgcgtcttcctcgcaggccagcctaagctcagcctgcattgcgccctcccggcctagggtgtcgctgtaccggcctccgagctccacatagacaagtccggacctcgggcgggggcaggagacggagctgagcggcggggggcagtgtcgcctcggtctagggacggcggcggagtcggtggtccctgcgcgatggccacctcggtgttgtgctgcctgcggtgctgcagagacggggggactggccacatccctctgaaggagatgccggccgtgcagctggacacgcagcacatgggaacagatgttgttattgtaaagaatggaagaagaatatgtggaacaggaggttgtttagccagcgcacctttacatcaaaacaaaagctattttgaattcaaaatccagtccacaggaatctggggtattggtgttgcaactcagaaggttaacttgaatcagattcctcttggccgagatatgcacagtctggtgatgagaaatgatggagccctttaccacaacaatgaagagaaaaataggctgccagcaaacagtcttccgcaggaaggagatgtggtgttgatgacagtgcaattttggattgccagttcagtgagttttatcatacgcctccacctggttttgaaaaaatattatttgaacagcaaatcttctgaatgtatttgtttttaaaacttgtatttctgcactgttaaaaaatgttcatcatttaataaaactttacctggcctatagatgaaaatatattcttaaaaatatgcttgttgatgctgtctaaggaaccaatgtattcagtataccaccctgaagttgtgatttaaaatactttatgttttgtgaaatgaaaataagcatttgggcagtttatttaattcttatttaaataaatagaattatgggtttaattaacagtataacatgactatatatacatatatatttaaagggaattctttcttacataatatatttgttttgatagagatgtagagttgggtgggtgtttttgtcactctgaagtttagacctcattaaatatttgacatctacagttggataattttgccgcttagtgtccttttttatatacaatataacaaagtgagagaaatttatattactggcaatttcatttttggcagtctatttctgtatcatgtaccgcttttcttaaaacttaaattgcttattttgttgtgtaatgtcattgcttttgatttgctttgtgaaaggagataaacgtttcagtaattgtcagagcattttgttgcctcaggctgtgttacctcaatttcagagtaagtagtggttgattagtaatgtagtatacactggcagacatctagaatagtatgatgctttacatttaaatgaggttattcttttaaggacttttatttgtatgttttctgtaaggaataataaaataattgtaattaaggaatataccatactatattaaacacattcttcctattttgttagttatacactaaattcacatcacccgtgattatttcagttcagagataagtgaatcctcttcatgaccctgagtctttgcctggttcttaagaatcactgtcctttagttaacgccctgtgacctgaaccaatcactctatacatctttagatacgttgtctgttttcaaatgagcatggcaaggatgcatacatttccctcctttatcaactagaaacagtacattgttcaggaaaacatgagtgttagaattagaaagagatccaaattgtagttttgctgctcatcctattttctcctctccaagtctcagattcccatttataaaaggagcaatcatactgacataagattctatgattaaataaggtaatacgtatataacaccttaataatcataggcacttgcgccaggcgcggtggctcacacctgtaatcccagcactttgggaggctgaggcgggaggatcacaaggtcaggagatcgagaccatcgtggctaacatggtgaaaccctggctctactaaaaaaatacaaaaaaaattagccaggtgtggtggcgggcgcctgtagttctagctactctggaggctgaggcaggagaatggcttgaacccgggagacggcgcttgcagtgagccgagattgccccactgcactccagcctaggcaacagagtgagactctgtctcaaaaaaaattaaaataaaataaaataaaaatcataggcacttagtaagtgtagtttcctggatggtaaagtatcagggaaagtggttttctttctttttttttttttctcgttttttttttgagacagagtctcaccttgtcacccaggctagagtgcagtggcacgatcttggctcactgcaacctctgcttcccaggtttaagcgattctcttgcctcagcctcccgagtaggtgggactacaggtgcccgccaccacgcccgtgtaatttttgtatttttagtagagatggggtttcaccatgttgtccaggctggtctcaaactcctgacctcatgatccacctccctcagcctcccaaagtgctggaattataggcgtaagccaccacacccagccagaaagtggttctcatgatgcttctcagaccggcaacatcagcatcactggaacttgttaaaaatggacactctcagaacccacaccagacccaccaaatcagtttgagaactgccattcagtagagaattatttgcctactgtaaattttctaaggatttatgatgggctatttttgacccataggctcagagaatcctgcaaaatccttttttattgtttattctgcagacaaaaatgtgacaatatgctttgaaaacatagatatacttgagtaacatttatttacataaatcccaaattctacctctgaaggtatatgaaatttaactatgtatgtattatgcattttgtctggctttctatcataattttaatttgtaaagaatgtgcttacttgggaaagcaaattaaagtgactactgtttgctatcgttaaaaaaaaaaaaaaaaaaaaaaaaaaaaaaaaaaaaaaaaaaaaaaaagagaaggggagaaggagaaaaaaaaagagtaggggaaagggaaaaaaaatataagggaaaaaatgggggggggacagggaccaaaggggggggggaaagggaggggcggggagttaaaggggg

SEQ ID NO: 303374 - DNA, 2792 bp, Homo sapiens
  misc_feature (50)..(51): n is a, c, g, or t
atatattctctccaacttacactcttactttcacacactcgcacagcacnnaaccttgacggtattacttatgaccatgtcgaattaaatgtatacttgaatggaaaaaacatgcattgtccagcatcaggtatacgagggacagtgtatccagttgtttatgttgatgacagtgcaattttggattgccagttcagtgagttttatcatacgcctccacctggttttgaaaaaatattatttgaacagcaaatcttctgaatgtatttgtttttaaaacttgtatttctgcactgttaaaaaatgttcatcatttaataaaactttacctggcctatagatgaaaatatattcttaaaaatatgcttgttgatgctgtctaaggaaccaatgtattcagtataccaccctgaagttgtgatttaaaatactttatgttttgtgaaatgaaaataagcatttgggcagtttatttaattcttatttaaataaatagaattatgggtttaattaacagtataacatgactatatatacatatatatttaaagggaattctttcttacataatatatttgttttgatagagatgtagagttgggtgggtgtttttgtcactctgaagtttagacctcattaaatatttgacatctacagttggataattttgccgcttagtgtccttttttatatacaatataacaaagtgagagaaatttatattactggcaatttcatttttggcagtctatttctgtatcatgtaccgcttttcttaaaacttaaattgcttattttgttgtgtaatgtcattgcttttgatttgctttgtgaaaggagataaacgtttcagtaattgtcagagcattttgttgcctcaggctgtgttacctcaatttcagagtaagtagtggttgattagtaatgtagtatacactggcagacatctagaatagtatgatgctttacatttaaatgaggttattcttttaaggacttttatttgtatgttttctgtaaggaataataaaataattgtaattaaggaatataccatactatattaaacacattcttcctattttgttagttatacactaaattcacatcacccgtgattatttcagttcagagataagtgaatcctcttcatgaccctgagtctttgcctggttcttaagaatcactgtcctttagttaacgccctgtgacctgaaccaatcactctatacatctttagatacgttgtctgttttcaaatgagcatggcaaggatgcatacatttccctcctttatcaactagaaacagtacattgttcaggaaaacatgagtgttagaattagaaagagatccaaattgtagttttgctgctcatcctattttctcctctccaagtctcagattcccatttataaaaggagcaatcatactgacataagattctatgattaaataaggtaatacgtatataacaccttaataatcataggcacttgcgccaggcgcggtggctcacacctgtaatcccagcactttgggaggctgaggcgggaggatcacaaggtcaggagatcgagaccatcgtggctaacatggtgaaaccctggctctactaaaaaaatacaaaaaaaattagccaggtgtggtggcgggcgcctgtagttctagctactctggaggctgaggcaggagaatggcttgaacccgggagacggcgcttgcagtgagccgagattgccccactgcactccagcctaggcaacagagtgagactctgtctcaaaaaaaattaaaataaaataaaataaaaatcataggcacttagtaagtgtagtttcctggatggtaaagtatcagggaaagtggttttctttctttttttttttttctcgttttttttttgagacagagtctcaccttgtcacccaggctagagtgcagtggcacgatcttggctcactgcaacctctgcttcccaggtttaagcgattctcttgcctcagcctcccgagtaggtgggactacaggtgcccgccaccacgcccgtgtaatttttgtatttttagtagagatggggtttcaccatgttgtccaggctggtctcaaactcctgacctcatgatccacctccctcagcctcccaaagtgctggaattataggcgtaagccaccacacccagccagaaagtggttctcatgatgcttctcagaccggcaacatcagcatcactggaacttgttaaaaatggacactctcagaacccacaccagacccaccaaatcagtttgagaactgccattcagtagagaattatttgcctactgtaaattttctaaggatttatgatgggctatttttgacccataggctcagagaatcctgcaaaatccttttttattgtttattctgcagacaaaaatgtgacaatatgctttgaaaacatagatatacttgagtaacatttatttacataaatcccaaattctacctctgaaggtatatgaaatttaactatgtatgtattatgcattttgtctggctttctatcataattttaatttgtaaagaatgtgcttacttgggaaagcaaattaaagtgactactgtttgctatcgttaaaaaaaaaaaaaaaaaaaaaaaaaaaaaaaaaaaaaaaaaaaaaaaagagaaggggagaaggagaaaaaaaaagagtaggggaaagggaaaaaaaatataagggaaaaaatgggggggggacagggaccaaaggggggggggaaagggaggggcggggagttaaaggggg

SEQ ID NO: 303375 - DNA, 1076 bp, Homo sapiens
ccggccgctcgccctgtccggtctctccccggccccttgattctccgcgtcttcctcgcaggccagcctaagctcagcctgcattgcgccctcccggcctagggtgtcgctgtaccggcctccgagctccacatagacaagtccggacctcgggcgggggcaggagacggagctgagcggcggggggcagtgtcgcctcggtctagggacggcggcggagtcggtggtccctgcgcgatggccacctcggtgttgtgctgcctgcggtgctgcagagacggggggactggccacatccctctgaaggagatgccggccgtgcagctggacacgcagcacatgggaacagatgttgttattgtaaagaatggaagaagaatatgtggaacaggaggttgtttagccagcgcacctttacatcaaaacaaaagctattttgaattcaaaatccagtccacaggaatctggggtattggtgttgcaactcagaaggttaacttgaatcagattcctcttggccgagatatgcacagtctggtgatgagaaatgatggagccctttaccacaacaatgaagagaaaaataggctgccagcaaacagtcttccgcaggaaggagatgtggtgggtattacttatgaccatgtcgaattaaatgtatacttgaatggaaaaaacatgcattgtccagcatcaggtatacgagggacagtgtatccagttgtttatgttgatgacagtgcaattttggattgccagttcagtgagttttatcatacgcctccacctggttttgaaaaaatattatttgaacagcaaatcttctgaatgtatttgtttttaaaacttgtatttctgcactgttaaaaaatgttcatcatttaataaaactttacctggcctataaaaaaaaaaaaaaaaaaaaaaaaaaaaaaaaaaaaaaaaaaaaaaaagagaaggggagaaggagaaaaaaaaagagtaggggaaagggaaaaaaaatataagggaaaaaatgggggggggacagggaccaaaggggggggggaaagggaggggcggggagttaaaggggg

SEQ ID NO: 303376 - DNA, 313 bp, Homo sapiens
gaaaagaaaagaaaagaaaatacaaaactttacatagtgtctgcattttttgtttaggaacagatgttgttattgtaaagaatggaagaagaatatgtggaacaggaggttgtttagccagcgcacctttacatcaaaacaaaagctattttgaattcaaaatccagtccacaggttggtataatggtactttactattaaaagtcctaattgttctaaatattaagagtaatttgtaacacataaaaaagattcagaaggtaatataaaagcaccaaactcttagaagatctgggtcttccacctcttgttg

SEQ ID NO: 303377 - DNA, 766 bp, Homo sapiens
agcgggctcccatcgcgcgcacacacgcacacatcgtctccagctctctgctcgctctgctcgcagtcacagacacttgagcacacgcgtacacccagacatcttcgggctgctattggattgactttgaaggttctgtgtgggtcgccgtggctgcatgtttgaatcaggtggagaagcacttcaacgctggacgaagtaaagattattgttgttattttttttttctctctctctctctcttaagaaaggaaaatatcccaaggactaatctgatcgggtcttccttcatcaggaacgaatgcaggaatttgggaactgagctgtgcaagtgctgaagaaggagatttgtttggaggaaacaggaaagagaaagaaaaggaaggaaaaaatacataatttcagggacgagagagagaagaaaaacggggactatggggagaaaaaagattcagattacgaggattatggatgaacgtaacagacaggtgacatttacaaagaggaaatttgggttgatgaagaaggcttatgagctgagcgtgctgtgtgactgtgagattgcgctgatcatcttcaacagcaccaacaagctgttccagtatgccagcaccgacatggacaaagtgcttctcaagtacacggagtacaacgagccgcatgagagccggacaaactcagacatcgtggagggtgagagagcatgcgtggtgagccccaagcctccgcaagcaggggagtttggacctccccctgccacacacac

SEQ ID NO: 303378 - DNA, 444 bp, Homo sapiens
agcgggctcccatcgcgcgcacacacgcacacatcgtctccagctctctgctcgctctgctcgcagtcacagacacttgagcacacgcgtacacccagacatcttcgggctgctattggattgactttgaaggttctgtgtgggtcgccgtggctgcatgtttgaatcaggtggagaagcacttcaacgctggacgaagtaaagattattgttgttattttttttttctctctctctctctcttaagaaaggaaaatatcccaaggactaatctgatcgggtcttccttcatgtaagtacccctgatatttctcgaggaaatagaaaacccgggtattgtctctaaaatctgcatcaatatattccacggcactgtgtctatctatccctgtgccttttttgaaggctgaagttgaggctcgttgtgcattctttttcgttaga

SEQ ID NO: 303379 - DNA, 219 bp, Homo sapiens
  misc_feature (208)..(208): n is a, c, g, or t
agcgggctcccatcgcgcgcacacacgcacacatcgtctccagctctctgctcgctctgctcgcagtcacagacacttgagcacacgcgtacacccagacatcttcgggctgctattggattgactttgaaggttctgtgtgggtcgccgtggctgcatgtttgaatcctgctaagcagaaatgccacatttgcctaatccctgatanctgtggcacct

SEQ ID NO: 303380 - DNA, 6220 bp, Homo sapiens
agcgggctcccatcgcgcgcacacacgcacacatcgtctccagctctctgctcgctctgctcgcagtcacagacacttgagcacacgcgtacacccagacatcttcgggctgctattggattgactttgaaggttctgtgtgggtcgccgtggctgcatgtttgaatcaggtggagaagcacttcaacgctggacgaagtaaagattattgttgttattttttttttctctctctctctctcttaagaaaggaaaatatcccaaggactaatctgatcgggtcttccttcatcaggaacgaatgcaggaatttgggaactgagctgtgcaagtgctgaagaaggagatttgtttggaggaaacaggaaagagaaagaaaaggaaggaaaaaatacataatttcagggacgagagagagaagaaaaacggggactatggggagaaaaaagattcagattacgaggattatggatgaacgtaacagacaggtgacatttacaaagaggaaatttgggttgatgaagaaggcttatgagctgagcgtgctgtgtgactgtgagattgcgctgatcatcttcaacagcaccaacaagctgttccagtatgccagcaccgacatggacaaagtgcttctcaagtacacggagtacaacgagccgcatgagagccggacaaactcagacatcgtggagacgttgagaaagaagggccttaatggctgtgacagcccagaccccgatgcggacgattccgtaggtcacagccctgagtctgaggacaagtacaggaaaattaacgaagatattgatctaatgatcagcaggcaaagattgtgtgctgttccacctcccaacttcgagatgccagtctccatcccagtgtccagccacaacagtttggtgtacagcaaccctgtcagctcactgggaaaccccaacctattgccactggctcacccttctctgcagaggaatagtatgtctcctggtgtaacacatcgacctccaagtgcaggtaacacaggtggtctgatgggtggagacctcacgtctggtgcaggcaccagtgcagggaacgggtatggcaatccccgaaactcaccaggtctgctggtctcacctggtaacttgaacaagaatatgcaagcaaaatctcctcccccaatgaatttaggaatgaataaccgtaaaccagatctccgagttcttattccaccaggcagcaagaatacgatgccatcagtgtctgaggatgtcgacctgcttttgaatcaaaggataaataactcccagtcggctcagtcattggctaccccagtggtttccgtagcaactcctactttaccaggacaaggaatgggaggatatccatcagccatttcaacaacatatggtaccgagtactctctgagtagtgcagacctgtcatctctgtctgggtttaacaccgccagcgctcttcaccttggttcagtaactggctggcaacagcaacacctacataacatgccaccatctgccctcagtcagttgggagcttgcactagcactcatttatctcagagttcaaatctctccctgccttctactcaaagcctcaacatcaagtcagaacctgtttctcctcctagagaccgtaccaccaccccttcgagatacccacaacacacgcgccacgaggcggggagatctcctgttgacagcttgagcagctgtagcagttcgtacgacgggagcgaccgagaggatcaccggaacgaattccactcccccattggactcaccagaccttcgccggacgaaagggaaagtccctcagtcaagcgcatgcgactttctgaaggatgggcaacatgatcagattattacttactagtttttttttttttcttgcagtgtgtgtgtgtgctataccttaatggggaaggggggtcgatatgcattatatgtgccgtgtgtggaaaaaaaaaaagtcaggtactctgttttgtaaaagtacttttaaattgcctcagtgatacagtataaagataaacagaaatgctgagataagcttagcacttgagttgtacaacagaacacttgtacaaaatagattttaaggctaacttcttttcactgttgtgctcctttgcaaaatgtatgttacaatagatagtgtcatgttgcaggttcaacgttatttacatgtaaatagacaaaaggaaacatttgccaaaagcggcagatctttactgaaagagagagcagctgttatgcaacatatagaaaaatgtatagatgcttggacagacccggtaatgggtggccattggtaaatgttaggaacacaccaggtcacctgacatcccaagaatgctcacaaacctgcaggcatatcattggcgtatggcactcattaaaaaggatcagagaccattaaaagaggaccatacctattaaaaaaaaatgtggagttggagggctaacatatttaattaaataaataaataaatctgggtctgcatctcttattaaataaaaatataaaaatatgtacattacattttgcttattttcatataaaaggtaagacagagtttgcaaagcatttgtggctttttgtagtttacttaagccaaaatgtgtttttttccccttgatagcttcgctaatattttaaacagtcctgtaaaaaaccaaaaaggactttttgtatagaaagcactaccctaagccatgaagaactccatgctttgctaaccaagataactgttttctctttgtagaagttttgtttttgaaatgtgtatttctaattatataaaatattaagaatcttttaaaaaaatctgtgaaattaacatgcttgtgtatagctttctaatatatataatattatggtaatagcagaagttttgttatcttaatagcgggaggggggtatatttgtgcagttgcacatttgagtaactattttctttctgttttcttttactctgcttacattttataagtttaaggtcagctgtcaaaaggataacctgtggggttagaacatatcacattgcaacaccctaaattgtttttaatacattagcaatctattgggtcaactgacatccattgtatatactagtttctttcatgctatttttattttgttttttgcatttttatcaaatgcagggcccctttctgatctcaccatttcaccatgcatcttggaattcagtaagtgcatatcctaacttgcccatattctaaatcatctggttggttttcagcctagaatttgatacgctttttagaaatatgcccagaatagaaaagctatgttggggcacatgtcctgcaaatatggccctagaaacaagtgatatggaatttacttggtgaataagttataaattcccacagaagaaaaatgtgaaagactgggtgctagacaagaaggaagcaggtaaagggatagttgctttgtcatccgtttttaattattttaactgacccttgacaatcttgtcagcaatataggactgttgaacaatcccggtgtgtcaggacccccaaatgtcacttctgcataaagcatgtatgtcatctattttttcttcaataaagagatttaatagccatttcaagaaatcccataaagaacctctctatgtccctttttttaatttaaaaaaaatgactcttgtctaatattcgtctataagggattaattttcagaccctttaataagtgagtgccataagaaagtcaatatatattgtttaaaagatatttcagtctaggaaagattttccttctcttggaatgtgaagatctgtcgattcatctccaatcatatgcattgacatacacagcaaagaagatataggcagtaatatcaacactgctatatcatgtgtaggacatttcttatccattttttctcttttacttgcatagttgctatgtgtttctcattgtaaaaggctgccgctgggtggcagaagccaagagaccttattaactaggctatatttttcttaacttgatctgaaatccacaattagaccacaatgcacctttggttgtatccataaaggatgctagcctgccttgtactaatgttttatatattaaaaaaaaaaaaatctatcaaccatttcatatatatcccactactcaaggtatccatggaacatgaaagaataacatttatgcagaggaaaaacaaaaacatccctgaaaatatacacactcatacacacacacgcacaggggaataaaataagaaaaccattttcctcaccatagacttgatcccatccttacaacccatccttctaacttgatgtgtataaaatatgcaaacatttcacaaatgttctttgtcatttcaaaatactttagtatatcaatatcagtagataccagtgggtgggaaagggtcattacatgaaaatatgaagaaatagccatattagttttttaacctgcaatttgcctcagcaacaaagaaaaagtgaatttttaatgctgaagataaagtaagctaaagtaccagcagaagccttggctatttatagcagttctgacaatagttttataagaacatgaagagaacagaatcacttgaaaatggatgccagtcatctcttgttcccactactgaattcttataaagtggtggcaagatagggaagggataatctgagaatttttaaaagatgatttaatgagaagaagcacaattttgattgtgatgagtcactttctgtaaacaatcttggtctatctttacccttataccttatctgtaatttaccatttattgtatttgcaaagctagtatggtttttaatcacagtaaatcctttgtattccagactttagggcagagccctgagggagtattattttacataacccgtcctagagtaacattttaggcaacattcttcattgcaagtaaaagatccataagtggcattttacacggctgcgagtattgttatatctaatcctattttaaaagatttttggtaatatgaagcttgaatactggtaacagtgatgcaatatacgcaagctgcacaacctgtatattgtatgcattgctgcgtggaggctgtttatttcaacctttttaaaaattgtgttttttagtaaaatggcttattttttcccaaaggtggaatttagcattttgtaatgatgaatataaaaatacctgtcatccccagatcatttaaaagttaactaaagtgagaatgaaaaaacaaaattccaagacactttttaaaagaatgtctgccctcacacacttttatggatttgtttttcttacatacccatcttttaacttagagatagcattttttgccctctttattttgttgtttgtttctccagagagtaaacgctttgtagttctttctttaaaaaacattttttttaaagaagaagaagccacttgaaccctcaataaaggctgttgcctaagcatggcatacttcatctgttctcatttgtgccatctgccgtgatgtcgtcacttttatggcgttaatttcctgccactacagatcttttgaagattgctggaatactggtgtctgttagaatgcttcagactacagatgtaattaaaggcttttcttaatatgttttaaccaaagatgtggagcaatccaagccacatatcttctacatcaaatttttccattttggttattttcataatctggtattgcattttgccttccctgttcatacctcaaattgattcatacctcagtttaattcagagaggtcagttaagtgacggattctgttgtggtttgaatgcagtaccagtgttctcttcgagcaaagtagacctgggtcactgtaggcataggacttggattgcttcagatggtttgctgtatcatttttcttctttttcttttcctggggacttgtttccattaaatgagagtaattaaaatcgcttgtaaatgagggcatacaagcatttgcaacaaatattcaaatagaggctcacagcggcataagctggactttgtcgccactagatgacaagatgttataactaagttaaaccacatctgtgtatctcaagggacttaattcagctgtctgtagtgaataaaagtgggaaattttcaaaagtttctcctgctggaaataaggtataatttgtattttgcagacaattcagtaaagttactggctttcttagtga

SEQ ID NO: 303381 - DNA, 6415 bp, Homo sapiens
  misc_feature (244)..(244): n is a, c, g, or t
  misc_feature (249)..(249): n is a, c, g, or t
aagatgcatggtgaaatggtgagatcagaaaggggccctgcatttgataaaaatgcaaaaaacaaaataaaaatagcatgaaagaaactagtatatacaatggatgtcagttgacccaatagattgctaatgtattaaaaacaatttagggtgttgcaatgtgatatgttctaaccccacaggttatccttttgacagctgaccttaaacttataaaatgtaagcagagtaaaagaaaacaganagaanatagttactcaaatgtgcaactgcacaaatatacccccctcccgctattaagataacaaaacttctgctattaccataatattatatatattagaaagctatacacaagcatgttaatttcacagatttttttaaaagattcttaatattttatataattagaaatacacacatttcaaaaacaaacttctacaaagagaaaacagttatcttggttagcaaagcatggagttcttcatggcttagggtagtgctttctatacacaaagtcctttttggttttttacaggactgtttaaaatattagcgacgctatcaaggaaaaaatacataatttcagggacgagaaaggaaggaaaaaatacataatttcagggacgagagagagaagaaaaacggggactatggggagaaaaaagattcagattacgaggattatggatgaacgtaacagacaggtgacatttacaaagaggaaatttgggttgatgaagaaggcttatgagctgagcgtgctgtgtgactgtgagattgcgctgatcatcttcaacagcaccaacaagctgttccagtatgccagcaccgacatggacaaagtgcttctcaagtacacggagtacaacgagccgcatgagagccggacaaactcagacatcgtggagacgttgagaaagaagggccttaatggctgtgacagcccagaccccgatgcggacgattccgtaggtcacagccctgagtctgaggacaagtacaggaaaattaacgaagatattgatctaatgatcagcaggcaaagattgtgtgctgttccacctcccaacttcgagatgccagtctccatcccagtgtccagccacaacagtttggtgtacagcaaccctgtcagctcactgggaaaccccaacctattgccactggctcacccttctctgcagaggaatagtatgtctcctggtgtaacacatcgacctccaagtgcaggtaacacaggtggtctgatgggtggagacctcacgtctggtgcaggcaccagtgcagggaacgggtatggcaatccccgaaactcaccaggtctgctggtctcacctggtaacttgaacaagaatatgcaagcaaaatctcctcccccaatgaatttaggaatgaataaccgtaaaccagatctccgagttcttattccaccaggcagcaagaatacgatgccatcagtgaatcaaaggataaataactcccagtcggctcagtcattggctaccccagtggtttccgtagcaactcctactttaccaggacaaggaatgggaggatatccatcagccatttcaacaacatatggtaccgagtactctctgagtagtgcagacctgtcatctctgtctgggtttaacaccgccagcgctcttcaccttggttcagtaactggctggcaacagcaacacctacataacatgccaccatctgccctcagtcagttgggagcttgcactagcactcatttatctcagagttcaaatctctccctgccttctactcaaagcctcaacatcaagtcagaacctgtttctcctcctagagaccgtaccaccaccccttcgagatacccacaacacacgcgccacgaggcggggagatctcctgttgacagcttgagcagctgtagcagttcgtacgacgggagcgaccgagaggatcaccggaacgaattccactcccccattggactcaccagaccttcgccggacgaaagggaaagtccctcagtcaagcgcatgcgactttctgaaggatgggcaacatgatcagattattacttactagtttttttttttttcttgcagtgtgtgtgtgtgctataccttaatggggaaggggggtcgatatgcattatatgtgccgtgtgtggaaaaaaaaaaagtcaggtactctgttttgtaaaagtacttttaaattgcctcagtgatacagtataaagataaacagaaatgctgagataagcttagcacttgagttgtacaacagaacacttgtacaaaatagattttaaggctaacttcttttcactgttgtgctcctttgcaaaatgtatgttacaatagatagtgtcatgttgcaggttcaacgttatttacatgtaaatagacaaaaggaaacatttgccaaaagcggcagatctttactgaaagagagagcagctgttatgcaacatatagaaaaatgtatagatgcttggacagacccggtaatgggtggccattggtaaatgttaggaacacaccaggtcacctgacatcccaagaatgctcacaaacctgcaggcatatcattggcgtatggcactcattaaaaaggatcagagaccattaaaagaggaccatacctattaaaaaaaaatgtggagttggagggctaacatatttaattaaataaataaataaatctgggtctgcatctcttattaaataaaaatataaaaatatgtacattacattttgcttattttcatataaaaggtaagacagagtttgcaaagcatttgtggctttttgtagtttacttaagccaaaatgtgtttttttccccttgatagcttcgctaatattttaaacagtcctgtaaaaaaccaaaaaggactttttgtatagaaagcactaccctaagccatgaagaactccatgctttgctaaccaagataactgttttctctttgtagaagttttgtttttgaaatgtgtatttctaattatataaaatattaagaatcttttaaaaaaatctgtgaaattaacatgcttgtgtatagctttctaatatatataatattatggtaatagcagaagttttgttatcttaatagcgggaggggggtatatttgtgcagttgcacatttgagtaactattttctttctgttttcttttactctgcttacattttataagtttaaggtcagctgtcaaaaggataacctgtggggttagaacatatcacattgcaacaccctaaattgtttttaatacattagcaatctattgggtcaactgacatccattgtatatactagtttctttcatgctatttttattttgttttttgcatttttatcaaatgcagggcccctttctgatctcaccatttcaccatgcatcttggaattcagtaagtgcatatcctaacttgcccatattctaaatcatctggttggttttcagcctagaatttgatacgctttttagaaatatgcccagaatagaaaagctatgttggggcacatgtcctgcaaatatggccctagaaacaagtgatatggaatttacttggtgaataagttataaattcccacagaagaaaaatgtgaaagactgggtgctagacaagaaggaagcaggtaaagggatagttgctttgtcatccgtttttaattattttaactgacccttgacaatcttgtcagcaatataggactgttgaacaatcccggtgtgtcaggacccccaaatgtcacttctgcataaagcatgtatgtcatctattttttcttcaataaagagatttaatagccatttcaagaaatcccataaagaacctctctatgtccctttttttaatttaaaaaaaatgactcttgtctaatattcgtctataagggattaattttcagaccctttaataagtgagtgccataagaaagtcaatatatattgtttaaaagatatttcagtctaggaaagattttccttctcttggaatgtgaagatctgtcgattcatctccaatcatatgcattgacatacacagcaaagaagatataggcagtaatatcaacactgctatatcatgtgtaggacatttcttatccattttttctcttttacttgcatagttgctatgtgtttctcattgtaaaaggctgccgctgggtggcagaagccaagagaccttattaactaggctatatttttcttaacttgatctgaaatccacaattagaccacaatgcacctttggttgtatccataaaggatgctagcctgccttgtactaatgttttatatattaaaaaaaaaaaaatctatcaaccatttcatatatatcccactactcaaggtatccatggaacatgaaagaataacatttatgcagaggaaaaacaaaaacatccctgaaaatatacacactcatacacacacacgcacaggggaataaaataagaaaaccattttcctcaccatagacttgatcccatccttacaacccatccttctaacttgatgtgtataaaatatgcaaacatttcacaaatgttctttgtcatttcaaaatactttagtatatcaatatcagtagataccagtgggtgggaaagggtcattacatgaaaatatgaagaaatagccatattagttttttaacctgcaatttgcctcagcaacaaagaaaaagtgaatttttaatgctgaagataaagtaagctaaagtaccagcagaagccttggctatttatagcagttctgacaatagttttataagaacatgaagagaacagaatcacttgaaaatggatgccagtcatctcttgttcccactactgaattcttataaagtggtggcaagatagggaagggataatctgagaatttttaaaagatgatttaatgagaagaagcacaattttgattgtgatgagtcactttctgtaaacaatcttggtctatctttacccttataccttatctgtaatttaccatttattgtatttgcaaagctagtatggtttttaatcacagtaaatcctttgtattccagactttagggcagagccctgagggagtattattttacataacccgtcctagagtaacattttaggcaacattcttcattgcaagtaaaagatccataagtggcattttacacggctgcgagtattgttatatctaatcctattttaaaagatttttggtaatatgaagcttgaatactggtaacagtgatgcaatatacgcaagctgcacaacctgtatattgtatgcattgctgcgtggaggctgtttatttcaacctttttaaaaattgtgttttttagtaaaatggcttattttttcccaaaggtggaatttagcattttgtaatgatgaatataaaaatacctgtcatccccagatcatttaaaagttaactaaagtgagaatgaaaaaacaaaattccaagacactttttaaaagaatgtctgccctcacacacttttatggatttgtttttcttacatacccatcttttaacttagagatagcattttttgccctctttattttgttgtttgtttctccagagagtaaacgctttgtagttctttctttaaaaaacattttttttaaagaagaagaagccacttgaaccctcaataaaggctgttgcctaagcatggcatacttcatctgttctcatttgtgccatctgccgtgatgtcgtcacttttatggcgttaatttcctgccactacagatcttttgaagattgctggaatactggtgtctgttagaatgcttcagactacagatgtaattaaaggcttttcttaatatgttttaaccaaagatgtggagcaatccaagccacatatcttctacatcaaatttttccattttggttattttcataatctggtattgcattttgccttccctgttcatacctcaaattgattcatacctcagtttaattcagagaggtcagttaagtgacggattctgttgtggtttgaatgcagtaccagtgttctcttcgagcaaagtagacctgggtcactgtaggcataggacttggattgcttcagatggtttgctgtatcatttttcttctttttcttttcctggggacttgtttccattaaatgagagtaattaaaatcgcttgtaaatgagggcatacaagcatttgcaacaaatattcaaatagaggctcacagcggcataagctggactttgtcgccactagatgacaagatgttataactaagttaaaccacatctgtgtatctcaagggacttaattcagctgtctgtagtgaataaaagtgggaaattttcaaaagtttctcctgctggaaataaggtataatttgtattttgcagacaattcagtaaagttactggctttcttagtga

SEQ ID NO: 303382 - DNA, 6124 bp, Homo sapiens
agcgggctcccatcgcgcgcacacacgcacacatcgtctccagctctctgctcgctctgctcgcagtcacagacacttgagcacacgcgtacacccagacatcttcgggctgctattggattgactttgaaggttctgtgtgggtcgccgtggctgcatgtttgaatcaggtggagaagcacttcaacgctggacgaagtaaagattattgttgttattttttttttctctctctctctctcttaagaaaggaaaatatcccaaggactaatctgatcgggtcttccttcatcaggaacgaatgcaggaatttgggaactgagctgtgcaagtgctgaagaaggagatttgtttggaggaaacaggaaagagaaagaaaaggaaggaaaaaatacataatttcagggacgagagagagaagaaaaacggggactatggggagaaaaaagattcagattacgaggattatggatgaacgtaacagacaggtgacatttacaaagaggaaatttgggttgatgaagaaggcttatgagctgagcgtgctgtgtgactgtgagattgcgctgatcatcttcaacagcaccaacaagctgttccagtatgccagcaccgacatggacaaagtgcttctcaagtacacggagtacaacgagccgcatgagagccggacaaactcagacatcgtggagacgttgagaaagaagggccttaatggctgtgacagcccagaccccgatgcggacgattccgtaggtcacagccctgagtctgaggacaagtacaggaaaattaacgaagatattgatctaatgatcagcaggcaaagattgtgtgctgttccacctcccaacttcgagatgccagtctccatcccagtgtccagccacaacagtttggtgtacagcaaccctgtcagctcactgggaaaccccaacctattgccactggctcacccttctctgcagaggaatagtatgtctcctggtgtaacacatcgacctccaagtgcaggtaacacaggtggtctgatgggtggagacctcacgtctggtgcaggcaccagtgcagggaacgggtatggcaatccccgaaactcaccaggtctgctggtctcacctggtaacttgaacaagaatatgcaagcaaaatctcctcccccaatgaatttaggaatgaataaccgtaaaccagatctccgagttcttattccaccaggcagcaagaatacgatgccatcagtgtctgaggatgtcgacctgcttttgaatcaaaggataaataactcccagtcggctcagtcattggctaccccagtggtttccgtagcaactcctactttaccaggacaaggaatgggaggatatccatcagccatttcaacaacatatggtaccgagtactctctgagtagtgcagacctgtcatctctgtctgggtttaacaccgccagcgctcttcaccttggttcagtaactggctggcaacagcaacacctacataacatgccaccatctgccctcagtcagttgggagaccgtaccaccaccccttcgagatacccacaacacacgcgccacgaggcggggagatctcctgttgacagcttgagcagctgtagcagttcgtacgacgggagcgaccgagaggatcaccggaacgaattccactcccccattggactcaccagaccttcgccggacgaaagggaaagtccctcagtcaagcgcatgcgactttctgaaggatgggcaacatgatcagattattacttactagtttttttttttttcttgcagtgtgtgtgtgtgctataccttaatggggaaggggggtcgatatgcattatatgtgccgtgtgtggaaaaaaaaaaagtcaggtactctgttttgtaaaagtacttttaaattgcctcagtgatacagtataaagataaacagaaatgctgagataagcttagcacttgagttgtacaacagaacacttgtacaaaatagattttaaggctaacttcttttcactgttgtgctcctttgcaaaatgtatgttacaatagatagtgtcatgttgcaggttcaacgttatttacatgtaaatagacaaaaggaaacatttgccaaaagcggcagatctttactgaaagagagagcagctgttatgcaacatatagaaaaatgtatagatgcttggacagacccggtaatgggtggccattggtaaatgttaggaacacaccaggtcacctgacatcccaagaatgctcacaaacctgcaggcatatcattggcgtatggcactcattaaaaaggatcagagaccattaaaagaggaccatacctattaaaaaaaaatgtggagttggagggctaacatatttaattaaataaataaataaatctgggtctgcatctcttattaaataaaaatataaaaatatgtacattacattttgcttattttcatataaaaggtaagacagagtttgcaaagcatttgtggctttttgtagtttacttaagccaaaatgtgtttttttccccttgatagcttcgctaatattttaaacagtcctgtaaaaaaccaaaaaggactttttgtatagaaagcactaccctaagccatgaagaactccatgctttgctaaccaagataactgttttctctttgtagaagttttgtttttgaaatgtgtatttctaattatataaaatattaagaatcttttaaaaaaatctgtgaaattaacatgcttgtgtatagctttctaatatatataatattatggtaatagcagaagttttgttatcttaatagcgggaggggggtatatttgtgcagttgcacatttgagtaactattttctttctgttttcttttactctgcttacattttataagtttaaggtcagctgtcaaaaggataacctgtggggttagaacatatcacattgcaacaccctaaattgtttttaatacattagcaatctattgggtcaactgacatccattgtatatactagtttctttcatgctatttttattttgttttttgcatttttatcaaatgcagggcccctttctgatctcaccatttcaccatgcatcttggaattcagtaagtgcatatcctaacttgcccatattctaaatcatctggttggttttcagcctagaatttgatacgctttttagaaatatgcccagaatagaaaagctatgttggggcacatgtcctgcaaatatggccctagaaacaagtgatatggaatttacttggtgaataagttataaattcccacagaagaaaaatgtgaaagactgggtgctagacaagaaggaagcaggtaaagggatagttgctttgtcatccgtttttaattattttaactgacccttgacaatcttgtcagcaatataggactgttgaacaatcccggtgtgtcaggacccccaaatgtcacttctgcataaagcatgtatgtcatctattttttcttcaataaagagatttaatagccatttcaagaaatcccataaagaacctctctatgtccctttttttaatttaaaaaaaatgactcttgtctaatattcgtctataagggattaattttcagaccctttaataagtgagtgccataagaaagtcaatatatattgtttaaaagatatttcagtctaggaaagattttccttctcttggaatgtgaagatctgtcgattcatctccaatcatatgcattgacatacacagcaaagaagatataggcagtaatatcaacactgctatatcatgtgtaggacatttcttatccattttttctcttttacttgcatagttgctatgtgtttctcattgtaaaaggctgccgctgggtggcagaagccaagagaccttattaactaggctatatttttcttaacttgatctgaaatccacaattagaccacaatgcacctttggttgtatccataaaggatgctagcctgccttgtactaatgttttatatattaaaaaaaaaaaaatctatcaaccatttcatatatatcccactactcaaggtatccatggaacatgaaagaataacatttatgcagaggaaaaacaaaaacatccctgaaaatatacacactcatacacacacacgcacaggggaataaaataagaaaaccattttcctcaccatagacttgatcccatccttacaacccatccttctaacttgatgtgtataaaatatgcaaacatttcacaaatgttctttgtcatttcaaaatactttagtatatcaatatcagtagataccagtgggtgggaaagggtcattacatgaaaatatgaagaaatagccatattagttttttaacctgcaatttgcctcagcaacaaagaaaaagtgaatttttaatgctgaagataaagtaagctaaagtaccagcagaagccttggctatttatagcagttctgacaatagttttataagaacatgaagagaacagaatcacttgaaaatggatgccagtcatctcttgttcccactactgaattcttataaagtggtggcaagatagggaagggataatctgagaatttttaaaagatgatttaatgagaagaagcacaattttgattgtgatgagtcactttctgtaaacaatcttggtctatctttacccttataccttatctgtaatttaccatttattgtatttgcaaagctagtatggtttttaatcacagtaaatcctttgtattccagactttagggcagagccctgagggagtattattttacataacccgtcctagagtaacattttaggcaacattcttcattgcaagtaaaagatccataagtggcattttacacggctgcgagtattgttatatctaatcctattttaaaagatttttggtaatatgaagcttgaatactggtaacagtgatgcaatatacgcaagctgcacaacctgtatattgtatgcattgctgcgtggaggctgtttatttcaacctttttaaaaattgtgttttttagtaaaatggcttattttttcccaaaggtggaatttagcattttgtaatgatgaatataaaaatacctgtcatccccagatcatttaaaagttaactaaagtgagaatgaaaaaacaaaattccaagacactttttaaaagaatgtctgccctcacacacttttatggatttgtttttcttacatacccatcttttaacttagagatagcattttttgccctctttattttgttgtttgtttctccagagagtaaacgctttgtagttctttctttaaaaaacattttttttaaagaagaagaagccacttgaaccctcaataaaggctgttgcctaagcatggcatacttcatctgttctcatttgtgccatctgccgtgatgtcgtcacttttatggcgttaatttcctgccactacagatcttttgaagattgctggaatactggtgtctgttagaatgcttcagactacagatgtaattaaaggcttttcttaatatgttttaaccaaagatgtggagcaatccaagccacatatcttctacatcaaatttttccattttggttattttcataatctggtattgcattttgccttccctgttcatacctcaaattgattcatacctcagtttaattcagagaggtcagttaagtgacggattctgttgtggtttgaatgcagtaccagtgttctcttcgagcaaagtagacctgggtcactgtaggcataggacttggattgcttcagatggtttgctgtatcatttttcttctttttcttttcctggggacttgtttccattaaatgagagtaattaaaatcgcttgtaaatgagggcatacaagcatttgcaacaaatattcaaatagaggctcacagcggcataagctggactttgtcgccactagatgacaagatgttataactaagttaaaccacatctgtgtatctcaagggacttaattcagctgtctgtagtgaataaaagtgggaaattttcaaaagtttctcctgctggaaataaggtataatttgtattttgcagacaattcagtaaagttactggctttcttagtga

SEQ ID NO: 303383 - DNA, 6190 bp, Homo sapiens
agcgggctcccatcgcgcgcacacacgcacacatcgtctccagctctctgctcgctctgctcgcagtcacagacacttgagcacacgcgtacacccagacatcttcgggctgctattggattgactttgaaggttctgtgtgggtcgccgtggctgcatgtttgaatcaggtggagaagcacttcaacgctggacgaagtaaagattattgttgttattttttttttctctctctctctctcttaagaaaggaaaatatcccaaggactaatctgatcgggtcttccttcatcaggaacgaatgcaggaatttgggaactgagctgtgcaagtgctgaagaaggagatttgtttggaggaaacaggaaagagaaagaaaaggaaggaaaaaatacataatttcagggacgagagagagaagaaaaacggggactatggggagaaaaaagattcagattacgaggattatggatgaacgtaacagacaggtgacatttacaaagaggaaatttgggttgatgaagaaggcttatgagctgagcgtgctgtgtgactgtgagattgcgctgatcatcttcaacagcaccaacaagctgttccagtatgccagcaccgacatggacaaagtgcttctcaagtacacggagtacaacgagccgcatgagagccggacaaactcagacatcgtggaggcattgaacaagaaagaaaacaaaggctgtgaaagccccgatcccgactcctcttatgcactcaccccacgcactgaagaaaaatacaaaaaaattaatgaagaatttgataatatgatcaagagtcataaaattcctgctgttccacctcccaacttcgagatgccagtctccatcccagtgtccagccacaacagtttggtgtacagcaaccctgtcagctcactgggaaaccccaacctattgccactggctcacccttctctgcagaggaatagtatgtctcctggtgtaacacatcgacctccaagtgcaggtaacacaggtggtctgatgggtggagacctcacgtctggtgcaggcaccagtgcagggaacgggtatggcaatccccgaaactcaccaggtctgctggtctcacctggtaacttgaacaagaatatgcaagcaaaatctcctcccccaatgaatttaggaatgaataaccgtaaaccagatctccgagttcttattccaccaggcagcaagaatacgatgccatcagtgaatcaaaggataaataactcccagtcggctcagtcattggctaccccagtggtttccgtagcaactcctactttaccaggacaaggaatgggaggatatccatcagccatttcaacaacatatggtaccgagtactctctgagtagtgcagacctgtcatctctgtctgggtttaacaccgccagcgctcttcaccttggttcagtaactggctggcaacagcaacacctacataacatgccaccatctgccctcagtcagttgggagcttgcactagcactcatttatctcagagttcaaatctctccctgccttctactcaaagcctcaacatcaagtcagaacctgtttctcctcctagagaccgtaccaccaccccttcgagatacccacaacacacgcgccacgaggcggggagatctcctgttgacagcttgagcagctgtagcagttcgtacgacgggagcgaccgagaggatcaccggaacgaattccactcccccattggactcaccagaccttcgccggacgaaagggaaagtccctcagtcaagcgcatgcgactttctgaaggatgggcaacatgatcagattattacttactagtttttttttttttcttgcagtgtgtgtgtgtgctataccttaatggggaaggggggtcgatatgcattatatgtgccgtgtgtggaaaaaaaaaaagtcaggtactctgttttgtaaaagtacttttaaattgcctcagtgatacagtataaagataaacagaaatgctgagataagcttagcacttgagttgtacaacagaacacttgtacaaaatagattttaaggctaacttcttttcactgttgtgctcctttgcaaaatgtatgttacaatagatagtgtcatgttgcaggttcaacgttatttacatgtaaatagacaaaaggaaacatttgccaaaagcggcagatctttactgaaagagagagcagctgttatgcaacatatagaaaaatgtatagatgcttggacagacccggtaatgggtggccattggtaaatgttaggaacacaccaggtcacctgacatcccaagaatgctcacaaacctgcaggcatatcattggcgtatggcactcattaaaaaggatcagagaccattaaaagaggaccatacctattaaaaaaaaatgtggagttggagggctaacatatttaattaaataaataaataaatctgggtctgcatctcttattaaataaaaatataaaaatatgtacattacattttgcttattttcatataaaaggtaagacagagtttgcaaagcatttgtggctttttgtagtttacttaagccaaaatgtgtttttttccccttgatagcttcgctaatattttaaacagtcctgtaaaaaaccaaaaaggactttttgtatagaaagcactaccctaagccatgaagaactccatgctttgctaaccaagataactgttttctctttgtagaagttttgtttttgaaatgtgtatttctaattatataaaatattaagaatcttttaaaaaaatctgtgaaattaacatgcttgtgtatagctttctaatatatataatattatggtaatagcagaagttttgttatcttaatagcgggaggggggtatatttgtgcagttgcacatttgagtaactattttctttctgttttcttttactctgcttacattttataagtttaaggtcagctgtcaaaaggataacctgtggggttagaacatatcacattgcaacaccctaaattgtttttaatacattagcaatctattgggtcaactgacatccattgtatatactagtttctttcatgctatttttattttgttttttgcatttttatcaaatgcagggcccctttctgatctcaccatttcaccatgcatcttggaattcagtaagtgcatatcctaacttgcccatattctaaatcatctggttggttttcagcctagaatttgatacgctttttagaaatatgcccagaatagaaaagctatgttggggcacatgtcctgcaaatatggccctagaaacaagtgatatggaatttacttggtgaataagttataaattcccacagaagaaaaatgtgaaagactgggtgctagacaagaaggaagcaggtaaagggatagttgctttgtcatccgtttttaattattttaactgacccttgacaatcttgtcagcaatataggactgttgaacaatcccggtgtgtcaggacccccaaatgtcacttctgcataaagcatgtatgtcatctattttttcttcaataaagagatttaatagccatttcaagaaatcccataaagaacctctctatgtccctttttttaatttaaaaaaaatgactcttgtctaatattcgtctataagggattaattttcagaccctttaataagtgagtgccataagaaagtcaatatatattgtttaaaagatatttcagtctaggaaagattttccttctcttggaatgtgaagatctgtcgattcatctccaatcatatgcattgacatacacagcaaagaagatataggcagtaatatcaacactgctatatcatgtgtaggacatttcttatccattttttctcttttacttgcatagttgctatgtgtttctcattgtaaaaggctgccgctgggtggcagaagccaagagaccttattaactaggctatatttttcttaacttgatctgaaatccacaattagaccacaatgcacctttggttgtatccataaaggatgctagcctgccttgtactaatgttttatatattaaaaaaaaaaaaatctatcaaccatttcatatatatcccactactcaaggtatccatggaacatgaaagaataacatttatgcagaggaaaaacaaaaacatccctgaaaatatacacactcatacacacacacgcacaggggaataaaataagaaaaccattttcctcaccatagacttgatcccatccttacaacccatccttctaacttgatgtgtataaaatatgcaaacatttcacaaatgttctttgtcatttcaaaatactttagtatatcaatatcagtagataccagtgggtgggaaagggtcattacatgaaaatatgaagaaatagccatattagttttttaacctgcaatttgcctcagcaacaaagaaaaagtgaatttttaatgctgaagataaagtaagctaaagtaccagcagaagccttggctatttatagcagttctgacaatagttttataagaacatgaagagaacagaatcacttgaaaatggatgccagtcatctcttgttcccactactgaattcttataaagtggtggcaagatagggaagggataatctgagaatttttaaaagatgatttaatgagaagaagcacaattttgattgtgatgagtcactttctgtaaacaatcttggtctatctttacccttataccttatctgtaatttaccatttattgtatttgcaaagctagtatggtttttaatcacagtaaatcctttgtattccagactttagggcagagccctgagggagtattattttacataacccgtcctagagtaacattttaggcaacattcttcattgcaagtaaaagatccataagtggcattttacacggctgcgagtattgttatatctaatcctattttaaaagatttttggtaatatgaagcttgaatactggtaacagtgatgcaatatacgcaagctgcacaacctgtatattgtatgcattgctgcgtggaggctgtttatttcaacctttttaaaaattgtgttttttagtaaaatggcttattttttcccaaaggtggaatttagcattttgtaatgatgaatataaaaatacctgtcatccccagatcatttaaaagttaactaaagtgagaatgaaaaaacaaaattccaagacactttttaaaagaatgtctgccctcacacacttttatggatttgtttttcttacatacccatcttttaacttagagatagcattttttgccctctttattttgttgtttgtttctccagagagtaaacgctttgtagttctttctttaaaaaacattttttttaaagaagaagaagccacttgaaccctcaataaaggctgttgcctaagcatggcatacttcatctgttctcatttgtgccatctgccgtgatgtcgtcacttttatggcgttaatttcctgccactacagatcttttgaagattgctggaatactggtgtctgttagaatgcttcagactacagatgtaattaaaggcttttcttaatatgttttaaccaaagatgtggagcaatccaagccacatatcttctacatcaaatttttccattttggttattttcataatctggtattgcattttgccttccctgttcatacctcaaattgattcatacctcagtttaattcagagaggtcagttaagtgacggattctgttgtggtttgaatgcagtaccagtgttctcttcgagcaaagtagacctgggtcactgtaggcataggacttggattgcttcagatggtttgctgtatcatttttcttctttttcttttcctggggacttgtttccattaaatgagagtaattaaaatcgcttgtaaatgagggcatacaagcatttgcaacaaatattcaaatagaggctcacagcggcataagctggactttgtcgccactagatgacaagatgttataactaagttaaaccacatctgtgtatctcaagggacttaattcagctgtctgtagtgaataaaagtgggaaattttcaaaagtttctcctgctggaaataaggtataatttgtattttgcagacaattcagtaaagttactggctttcttagtga

SEQ ID NO: 303384 - DNA, 6033 bp, Homo sapiens
aaagttatttttattcattttattgctttagctccatatagtttatttccttgataaaattagaatatgatagttcttatgaaactgacttgctgttagagtggtatttaatttttcttttttgttcagcaggaacgaatgcaggaatttgggaactgagctgtgcaagtgctgaagaaggagatttgtttggaggaaacaggaaagagaaagaaaaggaaggaaaaaatacataatttcagggacgagagagagaagaaaaacggggactatggggagaaaaaagattcagattacgaggattatggatgaacgtaacagacaggtgacatttacaaagaggaaatttgggttgatgaagaaggcttatgagctgagcgtgctgtgtgactgtgagattgcgctgatcatcttcaacagcaccaacaagctgttccagtatgccagcaccgacatggacaaagtgcttctcaagtacacggagtacaacgagccgcatgagagccggacaaactcagacatcgtggagacgttgagaaagaagggccttaatggctgtgacagcccagaccccgatgcggacgattccgtaggtcacagccctgagtctgaggacaagtacaggaaaattaacgaagatattgatctaatgatcagcaggcaaagattgtgtgctgttccacctcccaacttcgagatgccagtctccatcccagtgtccagccacaacagtttggtgtacagcaaccctgtcagctcactgggaaaccccaacctattgccactggctcacccttctctgcagaggaatagtatgtctcctggtgtaacacatcgacctccaagtgcaggtaacacaggtggtctgatgggtggagacctcacgtctggtgcaggcaccagtgcagggaacgggtatggcaatccccgaaactcaccaggtctgctggtctcacctggtaacttgaacaagaatatgcaagcaaaatctcctcccccaatgaatttaggaatgaataaccgtaaaccagatctccgagttcttattccaccaggcagcaagaatacgatgccatcagtgaatcaaaggataaataactcccagtcggctcagtcattggctaccccagtggtttccgtagcaactcctactttaccaggacaaggaatgggaggatatccatcagccatttcaacaacatatggtaccgagtactctctgagtagtgcagacctgtcatctctgtctgggtttaacaccgccagcgctcttcaccttggttcagtaactggctggcaacagcaacacctacataacatgccaccatctgccctcagtcagttgggagcttgcactagcactcatttatctcagagttcaaatctctccctgccttctactcaaagcctcaacatcaagtcagaacctgtttctcctcctagagaccgtaccaccaccccttcgagatacccacaacacacgcgccacgaggcggggagatctcctgttgacagcttgagcagctgtagcagttcgtacgacgggagcgaccgagaggatcaccggaacgaattccactcccccattggactcaccagaccttcgccggacgaaagggaaagtccctcagtcaagcgcatgcgactttctgaaggatgggcaacatgatcagattattacttactagtttttttttttttcttgcagtgtgtgtgtgtgctataccttaatggggaaggggggtcgatatgcattatatgtgccgtgtgtggaaaaaaaaaaagtcaggtactctgttttgtaaaagtacttttaaattgcctcagtgatacagtataaagataaacagaaatgctgagataagcttagcacttgagttgtacaacagaacacttgtacaaaatagattttaaggctaacttcttttcactgttgtgctcctttgcaaaatgtatgttacaatagatagtgtcatgttgcaggttcaacgttatttacatgtaaatagacaaaaggaaacatttgccaaaagcggcagatctttactgaaagagagagcagctgttatgcaacatatagaaaaatgtatagatgcttggacagacccggtaatgggtggccattggtaaatgttaggaacacaccaggtcacctgacatcccaagaatgctcacaaacctgcaggcatatcattggcgtatggcactcattaaaaaggatcagagaccattaaaagaggaccatacctattaaaaaaaaatgtggagttggagggctaacatatttaattaaataaataaataaatctgggtctgcatctcttattaaataaaaatataaaaatatgtacattacattttgcttattttcatataaaaggtaagacagagtttgcaaagcatttgtggctttttgtagtttacttaagccaaaatgtgtttttttccccttgatagcttcgctaatattttaaacagtcctgtaaaaaaccaaaaaggactttttgtatagaaagcactaccctaagccatgaagaactccatgctttgctaaccaagataactgttttctctttgtagaagttttgtttttgaaatgtgtatttctaattatataaaatattaagaatcttttaaaaaaatctgtgaaattaacatgcttgtgtatagctttctaatatatataatattatggtaatagcagaagttttgttatcttaatagcgggaggggggtatatttgtgcagttgcacatttgagtaactattttctttctgttttcttttactctgcttacattttataagtttaaggtcagctgtcaaaaggataacctgtggggttagaacatatcacattgcaacaccctaaattgtttttaatacattagcaatctattgggtcaactgacatccattgtatatactagtttctttcatgctatttttattttgttttttgcatttttatcaaatgcagggcccctttctgatctcaccatttcaccatgcatcttggaattcagtaagtgcatatcctaacttgcccatattctaaatcatctggttggttttcagcctagaatttgatacgctttttagaaatatgcccagaatagaaaagctatgttggggcacatgtcctgcaaatatggccctagaaacaagtgatatggaatttacttggtgaataagttataaattcccacagaagaaaaatgtgaaagactgggtgctagacaagaaggaagcaggtaaagggatagttgctttgtcatccgtttttaattattttaactgacccttgacaatcttgtcagcaatataggactgttgaacaatcccggtgtgtcaggacccccaaatgtcacttctgcataaagcatgtatgtcatctattttttcttcaataaagagatttaatagccatttcaagaaatcccataaagaacctctctatgtccctttttttaatttaaaaaaaatgactcttgtctaatattcgtctataagggattaattttcagaccctttaataagtgagtgccataagaaagtcaatatatattgtttaaaagatatttcagtctaggaaagattttccttctcttggaatgtgaagatctgtcgattcatctccaatcatatgcattgacatacacagcaaagaagatataggcagtaatatcaacactgctatatcatgtgtaggacatttcttatccattttttctcttttacttgcatagttgctatgtgtttctcattgtaaaaggctgccgctgggtggcagaagccaagagaccttattaactaggctatatttttcttaacttgatctgaaatccacaattagaccacaatgcacctttggttgtatccataaaggatgctagcctgccttgtactaatgttttatatattaaaaaaaaaaaaatctatcaaccatttcatatatatcccactactcaaggtatccatggaacatgaaagaataacatttatgcagaggaaaaacaaaaacatccctgaaaatatacacactcatacacacacacgcacaggggaataaaataagaaaaccattttcctcaccatagacttgatcccatccttacaacccatccttctaacttgatgtgtataaaatatgcaaacatttcacaaatgttctttgtcatttcaaaatactttagtatatcaatatcagtagataccagtgggtgggaaagggtcattacatgaaaatatgaagaaatagccatattagttttttaacctgcaatttgcctcagcaacaaagaaaaagtgaatttttaatgctgaagataaagtaagctaaagtaccagcagaagccttggctatttatagcagttctgacaatagttttataagaacatgaagagaacagaatcacttgaaaatggatgccagtcatctcttgttcccactactgaattcttataaagtggtggcaagatagggaagggataatctgagaatttttaaaagatgatttaatgagaagaagcacaattttgattgtgatgagtcactttctgtaaacaatcttggtctatctttacccttataccttatctgtaatttaccatttattgtatttgcaaagctagtatggtttttaatcacagtaaatcctttgtattccagactttagggcagagccctgagggagtattattttacataacccgtcctagagtaacattttaggcaacattcttcattgcaagtaaaagatccataagtggcattttacacggctgcgagtattgttatatctaatcctattttaaaagatttttggtaatatgaagcttgaatactggtaacagtgatgcaatatacgcaagctgcacaacctgtatattgtatgcattgctgcgtggaggctgtttatttcaacctttttaaaaattgtgttttttagtaaaatggcttattttttcccaaaggtggaatttagcattttgtaatgatgaatataaaaatacctgtcatccccagatcatttaaaagttaactaaagtgagaatgaaaaaacaaaattccaagacactttttaaaagaatgtctgccctcacacacttttatggatttgtttttcttacatacccatcttttaacttagagatagcattttttgccctctttattttgttgtttgtttctccagagagtaaacgctttgtagttctttctttaaaaaacattttttttaaagaagaagaagccacttgaaccctcaataaaggctgttgcctaagcatggcatacttcatctgttctcatttgtgccatctgccgtgatgtcgtcacttttatggcgttaatttcctgccactacagatcttttgaagattgctggaatactggtgtctgttagaatgcttcagactacagatgtaattaaaggcttttcttaatatgttttaaccaaagatgtggagcaatccaagccacatatcttctacatcaaatttttccattttggttattttcataatctggtattgcattttgccttccctgttcatacctcaaattgattcatacctcagtttaattcagagaggtcagttaagtgacggattctgttgtggtttgaatgcagtaccagtgttctcttcgagcaaagtagacctgggtcactgtaggcataggacttggattgcttcagatggtttgctgtatcatttttcttctttttcttttcctggggacttgtttccattaaatgagagtaattaaaatcgcttgtaaatgagggcatacaagcatttgcaacaaatattcaaatagaggctcacagcggcataagctggactttgtcgccactagatgacaagatgttataactaagttaaaccacatctgtgtatctcaagggacttaattcagctgtctgtagtgaataaaagtgggaaattttcaaaagtttctcctgctggaaataaggtataatttgtattttgcagacaattcagtaaagttactggctttcttagtga

SEQ ID NO: 303385 - DNA, 5884 bp, Homo sapiens
gctggtctcacctggtaacttgaacaagaatatgcaagcaaaatctcctcccccaatgaatttagaaaggaaggaaaaaatacataatttcagggacgagagagagaagaaaaacggggactatggggagaaaaaagattcagattacgaggattatggatgaacgtaacagacaggtgacatttacaaagaggaaatttgggttgatgaagaaggcttatgagctgagcgtgctgtgtgactgtgagattgcgctgatcatcttcaacagcaccaacaagctgttccagtatgccagcaccgacatggacaaagtgcttctcaagtacacggagtacaacgagccgcatgagagccggacaaactcagacatcgtggagacgttgagaaagaagggccttaatggctgtgacagcccagaccccgatgcggacgattccgtaggtcacagccctgagtctgaggacaagtacaggaaaattaacgaagatattgatctaatgatcagcaggcaaagattgtgtgctgttccacctcccaacttcgagatgccagtctccatcccagtgtccagccacaacagtttggtgtacagcaaccctgtcagctcactgggaaaccccaacctattgccactggctcacccttctctgcagaggaatagtatgtctcctggtgtaacacatcgacctccaagtgcaggtaacacaggtggtctgatgggtggagacctcacgtctggtgcaggcaccagtgcagggaacgggtatggcaatccccgaaactcaccaggtctgctggtctcacctggtaacttgaacaagaatatgcaagcaaaatctcctcccccaatgaatttaggaatgaataaccgtaaaccagatctccgagttcttattccaccaggcagcaagaatacgatgccatcagtgaatcaaaggataaataactcccagtcggctcagtcattggctaccccagtggtttccgtagcaactcctactttaccaggacaaggaatgggaggatatccatcagccatttcaacaacatatggtaccgagtactctctgagtagtgcagacctgtcatctctgtctgggtttaacaccgccagcgctcttcaccttggttcagtaactggctggcaacagcaacacctacataacatgccaccatctgccctcagtcagttgggagcttgcactagcactcatttatctcagagttcaaatctctccctgccttctactcaaagcctcaacatcaagtcagaacctgtttctcctcctagagaccgtaccaccaccccttcgagatacccacaacacacgcgccacgaggcggggagatctcctgttgacagcttgagcagctgtagcagttcgtacgacgggagcgaccgagaggatcaccggaacgaattccactcccccattggactcaccagaccttcgccggacgaaagggaaagtccctcagtcaagcgcatgcgactttctgaaggatgggcaacatgatcagattattacttactagtttttttttttttcttgcagtgtgtgtgtgtgctataccttaatggggaaggggggtcgatatgcattatatgtgccgtgtgtggaaaaaaaaaaagtcaggtactctgttttgtaaaagtacttttaaattgcctcagtgatacagtataaagataaacagaaatgctgagataagcttagcacttgagttgtacaacagaacacttgtacaaaatagattttaaggctaacttcttttcactgttgtgctcctttgcaaaatgtatgttacaatagatagtgtcatgttgcaggttcaacgttatttacatgtaaatagacaaaaggaaacatttgccaaaagcggcagatctttactgaaagagagagcagctgttatgcaacatatagaaaaatgtatagatgcttggacagacccggtaatgggtggccattggtaaatgttaggaacacaccaggtcacctgacatcccaagaatgctcacaaacctgcaggcatatcattggcgtatggcactcattaaaaaggatcagagaccattaaaagaggaccatacctattaaaaaaaaatgtggagttggagggctaacatatttaattaaataaataaataaatctgggtctgcatctcttattaaataaaaatataaaaatatgtacattacattttgcttattttcatataaaaggtaagacagagtttgcaaagcatttgtggctttttgtagtttacttaagccaaaatgtgtttttttccccttgatagcttcgctaatattttaaacagtcctgtaaaaaaccaaaaaggactttttgtatagaaagcactaccctaagccatgaagaactccatgctttgctaaccaagataactgttttctctttgtagaagttttgtttttgaaatgtgtatttctaattatataaaatattaagaatcttttaaaaaaatctgtgaaattaacatgcttgtgtatagctttctaatatatataatattatggtaatagcagaagttttgttatcttaatagcgggaggggggtatatttgtgcagttgcacatttgagtaactattttctttctgttttcttttactctgcttacattttataagtttaaggtcagctgtcaaaaggataacctgtggggttagaacatatcacattgcaacaccctaaattgtttttaatacattagcaatctattgggtcaactgacatccattgtatatactagtttctttcatgctatttttattttgttttttgcatttttatcaaatgcagggcccctttctgatctcaccatttcaccatgcatcttggaattcagtaagtgcatatcctaacttgcccatattctaaatcatctggttggttttcagcctagaatttgatacgctttttagaaatatgcccagaatagaaaagctatgttggggcacatgtcctgcaaatatggccctagaaacaagtgatatggaatttacttggtgaataagttataaattcccacagaagaaaaatgtgaaagactgggtgctagacaagaaggaagcaggtaaagggatagttgctttgtcatccgtttttaattattttaactgacccttgacaatcttgtcagcaatataggactgttgaacaatcccggtgtgtcaggacccccaaatgtcacttctgcataaagcatgtatgtcatctattttttcttcaataaagagatttaatagccatttcaagaaatcccataaagaacctctctatgtccctttttttaatttaaaaaaaatgactcttgtctaatattcgtctataagggattaattttcagaccctttaataagtgagtgccataagaaagtcaatatatattgtttaaaagatatttcagtctaggaaagattttccttctcttggaatgtgaagatctgtcgattcatctccaatcatatgcattgacatacacagcaaagaagatataggcagtaatatcaacactgctatatcatgtgtaggacatttcttatccattttttctcttttacttgcatagttgctatgtgtttctcattgtaaaaggctgccgctgggtggcagaagccaagagaccttattaactaggctatatttttcttaacttgatctgaaatccacaattagaccacaatgcacctttggttgtatccataaaggatgctagcctgccttgtactaatgttttatatattaaaaaaaaaaaaatctatcaaccatttcatatatatcccactactcaaggtatccatggaacatgaaagaataacatttatgcagaggaaaaacaaaaacatccctgaaaatatacacactcatacacacacacgcacaggggaataaaataagaaaaccattttcctcaccatagacttgatcccatccttacaacccatccttctaacttgatgtgtataaaatatgcaaacatttcacaaatgttctttgtcatttcaaaatactttagtatatcaatatcagtagataccagtgggtgggaaagggtcattacatgaaaatatgaagaaatagccatattagttttttaacctgcaatttgcctcagcaacaaagaaaaagtgaatttttaatgctgaagataaagtaagctaaagtaccagcagaagccttggctatttatagcagttctgacaatagttttataagaacatgaagagaacagaatcacttgaaaatggatgccagtcatctcttgttcccactactgaattcttataaagtggtggcaagatagggaagggataatctgagaatttttaaaagatgatttaatgagaagaagcacaattttgattgtgatgagtcactttctgtaaacaatcttggtctatctttacccttataccttatctgtaatttaccatttattgtatttgcaaagctagtatggtttttaatcacagtaaatcctttgtattccagactttagggcagagccctgagggagtattattttacataacccgtcctagagtaacattttaggcaacattcttcattgcaagtaaaagatccataagtggcattttacacggctgcgagtattgttatatctaatcctattttaaaagatttttggtaatatgaagcttgaatactggtaacagtgatgcaatatacgcaagctgcacaacctgtatattgtatgcattgctgcgtggaggctgtttatttcaacctttttaaaaattgtgttttttagtaaaatggcttattttttcccaaaggtggaatttagcattttgtaatgatgaatataaaaatacctgtcatccccagatcatttaaaagttaactaaagtgagaatgaaaaaacaaaattccaagacactttttaaaagaatgtctgccctcacacacttttatggatttgtttttcttacatacccatcttttaacttagagatagcattttttgccctctttattttgttgtttgtttctccagagagtaaacgctttgtagttctttctttaaaaaacattttttttaaagaagaagaagccacttgaaccctcaataaaggctgttgcctaagcatggcatacttcatctgttctcatttgtgccatctgccgtgatgtcgtcacttttatggcgttaatttcctgccactacagatcttttgaagattgctggaatactggtgtctgttagaatgcttcagactacagatgtaattaaaggcttttcttaatatgttttaaccaaagatgtggagcaatccaagccacatatcttctacatcaaatttttccattttggttattttcataatctggtattgcattttgccttccctgttcatacctcaaattgattcatacctcagtttaattcagagaggtcagttaagtgacggattctgttgtggtttgaatgcagtaccagtgttctcttcgagcaaagtagacctgggtcactgtaggcataggacttggattgcttcagatggtttgctgtatcatttttcttctttttcttttcctggggacttgtttccattaaatgagagtaattaaaatcgcttgtaaatgagggcatacaagcatttgcaacaaatattcaaatagaggctcacagcggcataagctggactttgtcgccactagatgacaagatgttataactaagttaaaccacatctgtgtatctcaagggacttaattcagctgtctgtagtgaataaaagtgggaaattttcaaaagtttctcctgctggaaataaggtataatttgtattttgcagacaattcagtaaagttactggctttcttagtga

SEQ ID NO: 303386 - DNA, 6044 bp, Homo sapiens
ggaagatgctcccatatactttgacttgagatcatggatgttttgttgttgtagtctgttttttgtggtggagaaagccttcttgtctcattggggtattacaaatgcatgggaaatacaagtctgggctgctgcttgcttcttggcaggaacgaatgcaggaatttgggaactgagctgtgcaagtgctgaagaaggagatttgtttggaggaaacaggaaagagaaagaaaaggaaggaaaaaatacataatttcagggacgagagagagaagaaaaacggggactatggggagaaaaaagattcagattacgaggattatggatgaacgtaacagacaggtgacatttacaaagaggaaatttgggttgatgaagaaggcttatgagctgagcgtgctgtgtgactgtgagattgcgctgatcatcttcaacagcaccaacaagctgttccagtatgccagcaccgacatggacaaagtgcttctcaagtacacggagtacaacgagccgcatgagagccggacaaactcagacatcgtggaggcattgaacaagaaagaaaacaaaggctgtgaaagccccgatcccgactcctcttatgcactcaccccacgcactgaagaaaaatacaaaaaaattaatgaagaatttgataatatgatcaagagtcataaaattcctgctgttccacctcccaacttcgagatgccagtctccatcccagtgtccagccacaacagtttggtgtacagcaaccctgtcagctcactgggaaaccccaacctattgccactggctcacccttctctgcagaggaatagtatgtctcctggtgtaacacatcgacctccaagtgcaggtaacacaggtggtctgatgggtggagacctcacgtctggtgcaggcaccagtgcagggaacgggtatggcaatccccgaaactcaccaggtctgctggtctcacctggtaacttgaacaagaatatgcaagcaaaatctcctcccccaatgaatttaggaatgaataaccgtaaaccagatctccgagttcttattccaccaggcagcaagaatacgatgccatcagtgaatcaaaggataaataactcccagtcggctcagtcattggctaccccagtggtttccgtagcaactcctactttaccaggacaaggaatgggaggatatccatcagccatttcaacaacatatggtaccgagtactctctgagtagtgcagacctgtcatctctgtctgggtttaacaccgccagcgctcttcaccttggttcagtaactggctggcaacagcaacacctacataacatgccaccatctgccctcagtcagttgggagcttgcactagcactcatttatctcagagttcaaatctctccctgccttctactcaaagcctcaacatcaagtcagaacctgtttctcctcctagagaccgtaccaccaccccttcgagatacccacaacacacgcgccacgaggcggggagatctcctgttgacagcttgagcagctgtagcagttcgtacgacgggagcgaccgagaggatcaccggaacgaattccactcccccattggactcaccagaccttcgccggacgaaagggaaagtccctcagtcaagcgcatgcgactttctgaaggatgggcaacatgatcagattattacttactagtttttttttttttcttgcagtgtgtgtgtgtgctataccttaatggggaaggggggtcgatatgcattatatgtgccgtgtgtggaaaaaaaaaaagtcaggtactctgttttgtaaaagtacttttaaattgcctcagtgatacagtataaagataaacagaaatgctgagataagcttagcacttgagttgtacaacagaacacttgtacaaaatagattttaaggctaacttcttttcactgttgtgctcctttgcaaaatgtatgttacaatagatagtgtcatgttgcaggttcaacgttatttacatgtaaatagacaaaaggaaacatttgccaaaagcggcagatctttactgaaagagagagcagctgttatgcaacatatagaaaaatgtatagatgcttggacagacccggtaatgggtggccattggtaaatgttaggaacacaccaggtcacctgacatcccaagaatgctcacaaacctgcaggcatatcattggcgtatggcactcattaaaaaggatcagagaccattaaaagaggaccatacctattaaaaaaaaatgtggagttggagggctaacatatttaattaaataaataaataaatctgggtctgcatctcttattaaataaaaatataaaaatatgtacattacattttgcttattttcatataaaaggtaagacagagtttgcaaagcatttgtggctttttgtagtttacttaagccaaaatgtgtttttttccccttgatagcttcgctaatattttaaacagtcctgtaaaaaaccaaaaaggactttttgtatagaaagcactaccctaagccatgaagaactccatgctttgctaaccaagataactgttttctctttgtagaagttttgtttttgaaatgtgtatttctaattatataaaatattaagaatcttttaaaaaaatctgtgaaattaacatgcttgtgtatagctttctaatatatataatattatggtaatagcagaagttttgttatcttaatagcgggaggggggtatatttgtgcagttgcacatttgagtaactattttctttctgttttcttttactctgcttacattttataagtttaaggtcagctgtcaaaaggataacctgtggggttagaacatatcacattgcaacaccctaaattgtttttaatacattagcaatctattgggtcaactgacatccattgtatatactagtttctttcatgctatttttattttgttttttgcatttttatcaaatgcagggcccctttctgatctcaccatttcaccatgcatcttggaattcagtaagtgcatatcctaacttgcccatattctaaatcatctggttggttttcagcctagaatttgatacgctttttagaaatatgcccagaatagaaaagctatgttggggcacatgtcctgcaaatatggccctagaaacaagtgatatggaatttacttggtgaataagttataaattcccacagaagaaaaatgtgaaagactgggtgctagacaagaaggaagcaggtaaagggatagttgctttgtcatccgtttttaattattttaactgacccttgacaatcttgtcagcaatataggactgttgaacaatcccggtgtgtcaggacccccaaatgtcacttctgcataaagcatgtatgtcatctattttttcttcaataaagagatttaatagccatttcaagaaatcccataaagaacctctctatgtccctttttttaatttaaaaaaaatgactcttgtctaatattcgtctataagggattaattttcagaccctttaataagtgagtgccataagaaagtcaatatatattgtttaaaagatatttcagtctaggaaagattttccttctcttggaatgtgaagatctgtcgattcatctccaatcatatgcattgacatacacagcaaagaagatataggcagtaatatcaacactgctatatcatgtgtaggacatttcttatccattttttctcttttacttgcatagttgctatgtgtttctcattgtaaaaggctgccgctgggtggcagaagccaagagaccttattaactaggctatatttttcttaacttgatctgaaatccacaattagaccacaatgcacctttggttgtatccataaaggatgctagcctgccttgtactaatgttttatatattaaaaaaaaaaaaatctatcaaccatttcatatatatcccactactcaaggtatccatggaacatgaaagaataacatttatgcagaggaaaaacaaaaacatccctgaaaatatacacactcatacacacacacgcacaggggaataaaataagaaaaccattttcctcaccatagacttgatcccatccttacaacccatccttctaacttgatgtgtataaaatatgcaaacatttcacaaatgttctttgtcatttcaaaatactttagtatatcaatatcagtagataccagtgggtgggaaagggtcattacatgaaaatatgaagaaatagccatattagttttttaacctgcaatttgcctcagcaacaaagaaaaagtgaatttttaatgctgaagataaagtaagctaaagtaccagcagaagccttggctatttatagcagttctgacaatagttttataagaacatgaagagaacagaatcacttgaaaatggatgccagtcatctcttgttcccactactgaattcttataaagtggtggcaagatagggaagggataatctgagaatttttaaaagatgatttaatgagaagaagcacaattttgattgtgatgagtcactttctgtaaacaatcttggtctatctttacccttataccttatctgtaatttaccatttattgtatttgcaaagctagtatggtttttaatcacagtaaatcctttgtattccagactttagggcagagccctgagggagtattattttacataacccgtcctagagtaacattttaggcaacattcttcattgcaagtaaaagatccataagtggcattttacacggctgcgagtattgttatatctaatcctattttaaaagatttttggtaatatgaagcttgaatactggtaacagtgatgcaatatacgcaagctgcacaacctgtatattgtatgcattgctgcgtggaggctgtttatttcaacctttttaaaaattgtgttttttagtaaaatggcttattttttcccaaaggtggaatttagcattttgtaatgatgaatataaaaatacctgtcatccccagatcatttaaaagttaactaaagtgagaatgaaaaaacaaaattccaagacactttttaaaagaatgtctgccctcacacacttttatggatttgtttttcttacatacccatcttttaacttagagatagcattttttgccctctttattttgttgtttgtttctccagagagtaaacgctttgtagttctttctttaaaaaacattttttttaaagaagaagaagccacttgaaccctcaataaaggctgttgcctaagcatggcatacttcatctgttctcatttgtgccatctgccgtgatgtcgtcacttttatggcgttaatttcctgccactacagatcttttgaagattgctggaatactggtgtctgttagaatgcttcagactacagatgtaattaaaggcttttcttaatatgttttaaccaaagatgtggagcaatccaagccacatatcttctacatcaaatttttccattttggttattttcataatctggtattgcattttgccttccctgttcatacctcaaattgattcatacctcagtttaattcagagaggtcagttaagtgacggattctgttgtggtttgaatgcagtaccagtgttctcttcgagcaaagtagacctgggtcactgtaggcataggacttggattgcttcagatggtttgctgtatcatttttcttctttttcttttcctggggacttgtttccattaaatgagagtaattaaaatcgcttgtaaatgagggcatacaagcatttgcaacaaatattcaaatagaggctcacagcggcataagctggactttgtcgccactagatgacaagatgttataactaagttaaaccacatctgtgtatctcaagggacttaattcagctgtctgtagtgaataaaagtgggaaattttcaaaagtttctcctgctggaaataaggtataatttgtattttgcagacaattcagtaaagttactggctttcttagtga

SEQ ID NO: 303387 - DNA, 5124 bp, Homo sapiens
tgaaggattgtaaatgatagggttggcagagttcatagagacacatgttaaatgattaatttcatgagatttgtaccaagttatctctttatgtggaaaactaatactgaaatctaatatttttaacttttaaaaaaattcatcagtaatgtctttttatttattttaaaagaatcaaaggataaataactcccagtcggctcagtcattggctaccccagtggtttccgtagcaactcctactttaccaggacaaggaatgggaggatatccatcagccatttcaacaacatatggtaccgagtactctctgagtagtgcagacctgtcatctctgtctgggtttaacaccgccagcgctcttcaccttggttcagtaactggctggcaacagcaacacctacataacatgccaccatctgccctcagtcagttgggagcttgcactagcactcatttatctcagagttcaaatctctccctgccttctactcaaagcctcaacatcaagtcagaacctgtttctcctcctagagaccgtaccaccaccccttcgagatacccacaacacacgcgccacgaggcggggagatctcctgttgacagcttgagcagctgtagcagttcgtacgacgggagcgaccgagaggatcaccggaacgaattccactcccccattggactcaccagaccttcgccggacgaaagggaaagtccctcagtcaagcgcatgcgactttctgaaggatgggcaacatgatcagattattacttactagtttttttttttttcttgcagtgtgtgtgtgtgctataccttaatggggaaggggggtcgatatgcattatatgtgccgtgtgtggaaaaaaaaaaagtcaggtactctgttttgtaaaagtacttttaaattgcctcagtgatacagtataaagataaacagaaatgctgagataagcttagcacttgagttgtacaacagaacacttgtacaaaatagattttaaggctaacttcttttcactgttgtgctcctttgcaaaatgtatgttacaatagatagtgtcatgttgcaggttcaacgttatttacatgtaaatagacaaaaggaaacatttgccaaaagcggcagatctttactgaaagagagagcagctgttatgcaacatatagaaaaatgtatagatgcttggacagacccggtaatgggtggccattggtaaatgttaggaacacaccaggtcacctgacatcccaagaatgctcacaaacctgcaggcatatcattggcgtatggcactcattaaaaaggatcagagaccattaaaagaggaccatacctattaaaaaaaaatgtggagttggagggctaacatatttaattaaataaataaataaatctgggtctgcatctcttattaaataaaaatataaaaatatgtacattacattttgcttattttcatataaaaggtaagacagagtttgcaaagcatttgtggctttttgtagtttacttaagccaaaatgtgtttttttccccttgatagcttcgctaatattttaaacagtcctgtaaaaaaccaaaaaggactttttgtatagaaagcactaccctaagccatgaagaactccatgctttgctaaccaagataactgttttctctttgtagaagttttgtttttgaaatgtgtatttctaattatataaaatattaagaatcttttaaaaaaatctgtgaaattaacatgcttgtgtatagctttctaatatatataatattatggtaatagcagaagttttgttatcttaatagcgggaggggggtatatttgtgcagttgcacatttgagtaactattttctttctgttttcttttactctgcttacattttataagtttaaggtcagctgtcaaaaggataacctgtggggttagaacatatcacattgcaacaccctaaattgtttttaatacattagcaatctattgggtcaactgacatccattgtatatactagtttctttcatgctatttttattttgttttttgcatttttatcaaatgcagggcccctttctgatctcaccatttcaccatgcatcttggaattcagtaagtgcatatcctaacttgcccatattctaaatcatctggttggttttcagcctagaatttgatacgctttttagaaatatgcccagaatagaaaagctatgttggggcacatgtcctgcaaatatggccctagaaacaagtgatatggaatttacttggtgaataagttataaattcccacagaagaaaaatgtgaaagactgggtgctagacaagaaggaagcaggtaaagggatagttgctttgtcatccgtttttaattattttaactgacccttgacaatcttgtcagcaatataggactgttgaacaatcccggtgtgtcaggacccccaaatgtcacttctgcataaagcatgtatgtcatctattttttcttcaataaagagatttaatagccatttcaagaaatcccataaagaacctctctatgtccctttttttaatttaaaaaaaatgactcttgtctaatattcgtctataagggattaattttcagaccctttaataagtgagtgccataagaaagtcaatatatattgtttaaaagatatttcagtctaggaaagattttccttctcttggaatgtgaagatctgtcgattcatctccaatcatatgcattgacatacacagcaaagaagatataggcagtaatatcaacactgctatatcatgtgtaggacatttcttatccattttttctcttttacttgcatagttgctatgtgtttctcattgtaaaaggctgccgctgggtggcagaagccaagagaccttattaactaggctatatttttcttaacttgatctgaaatccacaattagaccacaatgcacctttggttgtatccataaaggatgctagcctgccttgtactaatgttttatatattaaaaaaaaaaaaatctatcaaccatttcatatatatcccactactcaaggtatccatggaacatgaaagaataacatttatgcagaggaaaaacaaaaacatccctgaaaatatacacactcatacacacacacgcacaggggaataaaataagaaaaccattttcctcaccatagacttgatcccatccttacaacccatccttctaacttgatgtgtataaaatatgcaaacatttcacaaatgttctttgtcatttcaaaatactttagtatatcaatatcagtagataccagtgggtgggaaagggtcattacatgaaaatatgaagaaatagccatattagttttttaacctgcaatttgcctcagcaacaaagaaaaagtgaatttttaatgctgaagataaagtaagctaaagtaccagcagaagccttggctatttatagcagttctgacaatagttttataagaacatgaagagaacagaatcacttgaaaatggatgccagtcatctcttgttcccactactgaattcttataaagtggtggcaagatagggaagggataatctgagaatttttaaaagatgatttaatgagaagaagcacaattttgattgtgatgagtcactttctgtaaacaatcttggtctatctttacccttataccttatctgtaatttaccatttattgtatttgcaaagctagtatggtttttaatcacagtaaatcctttgtattccagactttagggcagagccctgagggagtattattttacataacccgtcctagagtaacattttaggcaacattcttcattgcaagtaaaagatccataagtggcattttacacggctgcgagtattgttatatctaatcctattttaaaagatttttggtaatatgaagcttgaatactggtaacagtgatgcaatatacgcaagctgcacaacctgtatattgtatgcattgctgcgtggaggctgtttatttcaacctttttaaaaattgtgttttttagtaaaatggcttattttttcccaaaggtggaatttagcattttgtaatgatgaatataaaaatacctgtcatccccagatcatttaaaagttaactaaagtgagaatgaaaaaacaaaattccaagacactttttaaaagaatgtctgccctcacacacttttatggatttgtttttcttacatacccatcttttaacttagagatagcattttttgccctctttattttgttgtttgtttctccagagagtaaacgctttgtagttctttctttaaaaaacattttttttaaagaagaagaagccacttgaaccctcaataaaggctgttgcctaagcatggcatacttcatctgttctcatttgtgccatctgccgtgatgtcgtcacttttatggcgttaatttcctgccactacagatcttttgaagattgctggaatactggtgtctgttagaatgcttcagactacagatgtaattaaaggcttttcttaatatgttttaaccaaagatgtggagcaatccaagccacatatcttctacatcaaatttttccattttggttattttcataatctggtattgcattttgccttccctgttcatacctcaaattgattcatacctcagtttaattcagagaggtcagttaagtgacggattctgttgtggtttgaatgcagtaccagtgttctcttcgagcaaagtagacctgggtcactgtaggcataggacttggattgcttcagatggtttgctgtatcatttttcttctttttcttttcctggggacttgtttccattaaatgagagtaattaaaatcgcttgtaaatgagggcatacaagcatttgcaacaaatattcaaatagaggctcacagcggcataagctggactttgtcgccactagatgacaagatgttataactaagttaaaccacatctgtgtatctcaagggacttaattcagctgtctgtagtgaataaaagtgggaaattttcaaaagtttctcctgctggaaataaggtataatttgtattttgcagacaattcagtaaagttactggctttcttagtga

SEQ ID NO: 303388 - DNA, 6254 bp, Homo sapiens
  misc_feature (5730)..(5730): n is a, c, g, or t
agcgggctcccatcgcgcgcacacacgcacacatcgtctccagctctctgctcgctctgctcgcagtcacagacacttgagcacacgcgtacacccagacatcttcgggctgctattggattgactttgaaggttctgtgtgggtcgccgtggctgcatgtttgaatcaggtggagaagcacttcaacgctggacgaagtaaagattattgttgttattttttttttctctctctctctctcttaagaaaggaaaatatcccaaggactaatctgatcgggtcttccttcatcaggaacgaatgcaggaatttgggaactgagctgtgcaagtgctgaagaaggagatttgtttggaggaaacaggaaagagaaagaaaaggaaggaaaaaatacataatttcagggacgagagagagaagaaaaacggggactatggggagaaaaaagattcagattacgaggattatggatgaacgtaacagacaggtgacatttacaaagaggaaatttgggttgatgaagaaggcttatgagctgagcgtgctgtgtgactgtgagattgcgctgatcatcttcaacagcaccaacaagctgttccagtatgccagcaccgacatggacaaagtgcttctcaagtacacggagtacaacgagccgcatgagagccggacaaactcagacatcgtggagacgttgagaaagaagggccttaatggctgtgacagcccagaccccgatgcggacgattccgtaggtcacagccctgagtctgaggacaagtacaggaaaattaacgaagatattgatctaatgatcagcaggcaaagattgtgtgctgttccacctcccaacttcgagatgccagtctccatcccagtgtccagccacaacagtttggtgtacagcaaccctgtcagctcactgggaaaccccaacctattgccactggctcacccttctctgcagaggaatagtatgtctcctggtgtaacacatcgacctccaagtgcaggtaacacaggtggtctgatgggtggagacctcacgtctggtgcaggcaccagtgcagggaacgggtatggcaatccccgaaactcaccaggtctgctggtctcacctggtaacttgaacaagaatatgcaagcaaaatctcctcccccaatgaatttaggaatgaataaccgtaaaccagatctccgagttcttattccaccaggcagcaagaatacgatgccatcagtgtctgaggatgtcgacctgcttttgaatcaaaggataaataactcccagtcggctcagtcattggctaccccagtggtttccgtagcaactcctactttaccaggacaaggaatgggaggatatccatcagccatttcaacaacatatggtaccgagtactctctgagtagtgcagacctgtcatctctgtctgggtttaacaccgccagcgctcttcaccttggttcagtaactggctggcaacagcaacacctacataacatgccaccatctgccctcagtcagttgggagcttgcactagcactcatttatctcagagttcaaatctctccctgccttctactcaaagcctcaacatcaagtcagaacctgtttctcctcctagagaccgtaccaccaccccttcgagatacccacaacacacgcgccacgaggcggggagatctcctgttgacagcttgagcagctgtagcagttcgtacgacgggagcgaccgagaggatcaccggaacgaattccactcccccattggactcaccagaccttcgccggacgaaagggaaagtccctcagtcaagcgcatgcgactttctgaaggatgggcaacatgatcagattattacttactagtttttttttttttcttgcagtgtgtgtgtgtgctataccttaatggggaaggggggtcgatatgcattatatgtgccgtgtgtggaaaaaaaaaaagtcaggtactctgttttgtaaaagtacttttaaattgcctcagtgatacagtataaagataaacagaaatgctgagataagcttagcacttgagttgtacaacagaacacttgtacaaaatagattttaaggctaacttcttttcactgttgtgctcctttgcaaaatgtatgttacaatagatagtgtcatgttgcaggttcaacgttatttacatgtaaatagacaaaaggaaacatttgccaaaagcggcagatctttactgaaagagagagcagctgttatgcaacatatagaaaaatgtatagatgcttggacagacccggtaatgggtggccattggtaaatgttaggaacacaccaggtcacctgacatcccaagaatgctcacaaacctgcaggcatatcattggcgtatggcactcattaaaaaggatcagagaccattaaaagaggaccatacctattaaaaaaaaatgtggagttggagggctaacatatttaattaaataaataaataaatctgggtctgcatctcttattaaataaaaatataaaaatatgtacattacattttgcttattttcatataaaaggtaagacagagtttgcaaagcatttgtggctttttgtagtttacttaagccaaaatgtgtttttttccccttgatagcttcgctaatattttaaacagtcctgtaaaaaaccaaaaaggactttttgtatagaaagcactaccctaagccatgaagaactccatgctttgctaaccaagataactgttttctctttgtagaagttttgtttttgaaatgtgtatttctaattatataaaatattaagaatcttttaaaaaaatctgtgaaattaacatgcttgtgtatagctttctaatatatataatattatggtaatagcagaagttttgttatcttaatagcgggaggggggtatatttgtgcagttgcacatttgagtaactattttctttctgttttcttttactctgcttacattttataagtttaaggtcagctgtcaaaaggataacctgtggggttagaacatatcacattgcaacaccctaaattgtttttaatacattagcaatctattgggtcaactgacatccattgtatatactagtttctttcatgctatttttattttgttttttgcatttttatcaaatgcagggcccctttctgatctcaccatttcaccatgcatcttggaattcagtaagtgcatatcctaacttgcccatattctaaatcatctggttggttttcagcctagaatttgatacgctttttagaaatatgcccagaatagaaaagctatgttggggcacatgtcctgcaaatatggccctagaaacaagtgatatggaatttacttggtgaataagttataaattcccacagaagaaaaatgtgaaagactgggtgctagacaagaaggaagcaggtaaagggatagttgctttgtcatccgtttttaattattttaactgacccttgacaatcttgtcagcaatataggactgttgaacaatcccggtgtgtcaggacccccaaatgtcacttctgcataaagcatgtatgtcatctattttttcttcaataaagagatttaatagccatttcaagaaatcccataaagaacctctctatgtccctttttttaatttaaaaaaaatgactcttgtctaatattcgtctataagggattaattttcagaccctttaataagtgagtgccataagaaagtcaatatatattgtttaaaagatatttcagtctaggaaagattttccttctcttggaatgtgaagatctgtcgattcatctccaatcatatgcattgacatacacagcaaagaagatataggcagtaatatcaacactgctatatcatgtgtaggacatttcttatccattttttctcttttacttgcatagttgctatgtgtttctcattgtaaaaggctgccgctgggtggcagaagccaagagaccttattaactaggctatatttttcttaacttgatctgaaatccacaattagaccacaatgcacctttggttgtatccataaaggatgctagcctgccttgtactaatgttttatatattaaaaaaaaaaaaatctatcaaccatttcatatatatcccactactcaaggtatccatggaacatgaaagaataacatttatgcagaggaaaaacaaaaacatccctgaaaatatacacactcatacacacacacgcacaggggaataaaataagaaaaccattttcctcaccatagacttgatcccatccttacaacccatccttctaacttgatgtgtataaaatatgcaaacatttcacaaatgttctttgtcatttcaaaatactttagtatatcaatatcagtagataccagtgggtgggaaagggtcattacatgaaaatatgaagaaatagccatattagttttttaacctgcaatttgcctcagcaacaaagaaaaagtgaatttttaatgctgaagataaagtaagctaaagtaccagcagaagccttggctatttatagcagttctgacaatagttttataagaacatgaagagaacagaatcacttgaaaatggatgccagtcatctcttgttcccactactgaattcttataaagtggtggcaagatagggaagggataatctgagaatttttaaaagatgatttaatgagaagaagcacaattttgattgtgatgagtcactttctgtaaacaatcttggtctatctttacccttataccttatctgtaatttaccatttattgtatttgcaaagctagtatggtttttaatcacagtaaatcctttgtattccagactttagggcagagccctgagggagtattattttacataacccgtcctagagtaacattttaggcaacattcttcattgcaagtaaaagatccataagtggcattttacacggctgcgagtattgttatatctaatcctattttaaaagatttttggtaatatgaagcttgaatactggtaacagtgatgcaatatacgcaagctgcacaacctgtatattgtatgcattgctgcgtggaggctgtttatttcaacctttttaaaaattgtgttttttagtaaaatggcttattttttcccaaaggtggaatttagcattttgtaatgatgaatataaaaatacctgtcatccccagatcatttaaaagttaactaaagtgagaatgaaaaaacaaaattccaagacactttttaaaagaatgtctgccctcacacacttttatggatttgtttttcttacatacccatcttttaacttagagatagcattttttgccctctttattttgttgtttgtttctccagagagtaaacgctttgtagttctttctttaaaaaacattttttttaaagaagaagaagccacttgaaccctcaataaaggctgttgcctaagcatggcatacttcatctgttctcatttgtgccatctgccgtgatgtcgtcacttttatggggtattcctgcctaagacttgcacattgcggcccgggctcgttgaagtccaccccgagtataaggggctaaatgttcctgattggggccgcccatttactacatcctggggtaaagatggtggcggacccagtactcatagcaggcctctgtgtgtcgtttcttattatttttttgtacattcatatagtatgncgaaaaacacccactccaatcatatatcactcaacatacagggcgtccagatggacagaacacgagacaaagagagagagtagcagcagaagagaatcagcacgcaacgcgccagaactgggcaaagcagagacggaagcgagcagaagaggccagagcgagaggagaaggggggcgcgctgcgacgcggcacggagaaaggaaggaaacggggagacaaggctagcagcagcagagagacgaccgagcgacacccgaagagcagacacgcagtaagagccgacaacacggcgacggaggaccggcgctggcgatcacgctgcagcagaggggttccaggggcagcgacaaacaaaggagacaacacacctcaacaacaacgacaggtcgcaagacccaagcacgacacgcgcgagagacacacaacagccccaggacagagactaaccgcgaacactaaccgagagagacgcggcccagacacagcacgaaacaccaccaccaaacgacacaacacacaccac

SEQ ID NO: 303389 - DNA, 3826 bp, Homo sapiens
  misc_feature (244)..(244): n is a, c, g, or t
  misc_feature (249)..(249): n is a, c, g, or t
aagatgcatggtgaaatggtgagatcagaaaggggccctgcatttgataaaaatgcaaaaaacaaaataaaaatagcatgaaagaaactagtatatacaatggatgtcagttgacccaatagattgctaatgtattaaaaacaatttagggtgttgcaatgtgatatgttctaaccccacaggttatccttttgacagctgaccttaaacttataaaatgtaagcagagtaaaagaaaacaganagaanatagttactcaaatgtgcaactgcacaaatatacccccctcccgctattaagataacaaaacttctgctattaccataatattatatatattagaaagctatacacaagcatgttaatttcacagatttttttaaaagattcttaatattttatataattagaaatacacacatttcaaaaacaaacttctacaaagagaaaacagttatcttggttagcaaagcatggagttcttcatggcttagggtagtgctttctatacacaaagtcctttttggttttttacaggactgtttaaaatattagcgacgctatcaaggaaaaaatacataatttcagggacgagaaaggaaggaaaaaatacataatttcagggacgagagagagaagaaaaacggggactatggggagaaaaaagattcagattacgaggattatggatgaacgtaacagacaggtgacatttacaaagaggaaatttgggttgatgaagaaggcttatgagctgagcgtgctgtgtgactgtgagattgcgctgatcatcttcaacagcaccaacaagctgttccagtatgccagcaccgacatggacaaagtgcttctcaagtacacggagtacaacgagccgcatgagagccggacaaactcagacatcgtggagacgttgagaaagaagggccttaatggctgtgacagcccagaccccgatgcggacgattccgtaggtcacagccctgagtctgaggacaagtacaggaaaattaacgaagatattgatctaatgatcagcaggcaaagattgtgtgctgttccacctcccaacttcgagatgccagtctccatcccagtgtccagccacaacagtttggtgtacagcaaccctgtcagctcactgggaaaccccaacctattgccactggctcacccttctctgcagaggaatagtatgtctcctggtgtaacacatcgacctccaagtgcaggtaacacaggtggtctgatgggtggagacctcacgtctggtgcaggcaccagtgcagggaacgggtatggcaatccccgaaactcaccaggtctgctggtctcacctggtaacttgaacaagaatatgcaagcaaaatctcctcccccaatgaatttaggaatgaataaccgtaaaccagatctccgagttcttattccaccaggcagcaagaatacgatgccatcagtgaatcaaaggataaataactcccagtcggctcagtcattggctaccccagtggtttccgtagcaactcctactttaccaggacaaggaatgggaggatatccatcagccatttcaacaacatatggtaccgagtactctctgagtagtgcagacctgtcatctctgtctgggtttaacaccgccagcgctcttcaccttggttcagtaactggctggcaacagcaacacctacataacatgccaccatctgccctcagtcagttgggagcttgcactagcactcatttatctcagagttcaaatctctccctgccttctactcaaagcctcaacatcaagtcagaacctgtttctcctcctagagaccgtaccaccaccccttcgagatacccacaacacacgcgccacgaggcggggagatctcctgttgacagcttgagcagctgtagcagttcgtacgacgggagcgaccgagaggatcaccggaacgaattccactcccccattggactcaccagaccttcgccggacgaaagggaaagtccctcagtcaagcgcatgcgactttctgaaggatgggcaacatgatcagattattacttactagtttttttttttttcttgcagtgtgtgtgtgtgctataccttaatggggaaggggggtcgatatgcattatatgtgccgtgtgtggaaaaaaaaaaagtcaggtactctgttttgtaaaagtacttttaaattgcctcagtgatacagtataaagataaacagaaatgctgagataagcttagcacttgagttgtacaacagaacacttgtacaaaatagattttaaggctaacttcttttcactgttgtgctcctttgcaaaatgtatgttacaatagatagtgtcatgttgcaggttcaacgttatttacatgtaaatagacaaaaggaaacatttgccaaaagcggcagatctttactgaaagagagagcagctgttatgcaacatatagaaaaatgtatagatgcttggacagacccggtaatgggtggccattggtaaatgttaggaacacaccaggtcacctgacatcccaagaatgctcacaaacctgcaggcatatcattggcgtatggcactcattaaaaaggatcagagaccattaaaagaggaccatacctattaaaaaaaaatgtggagttggagggctaacatatttaattaaataaataaataaatctgggtctgcatctcttattaaataaaaatataaaaatatgtacattacattttgcttattttcatataaaaggtaagacagagtttgcaaagcatttgtggctttttgtagtttacttaagccaaaatgtgtttttttccccttgatagcttcgctaatattttaaacagtcctgtaaaaaaccaaaaaggactttttgtatagaaagcactaccctaagccatgaagaactccatgctttgctaaccaagataactgttttctctttgtagaagttttgtttttgaaatgtgtatttctaattatataaaatattaagaatcttttaaaaaaatctgtgaaattaacatgcttgtgtatagctttctaatatatataatattatggtaatagcagaagttttgttatcttaatagcgggaggggggtatatttgtgcagttgcacatttgagtaactattttctttctgttttcttttactctgcttacattttataagtttaaggtcagctgtcaaaaggataacctgtggggttagaacatatcacattgcaacaccctaaattgtttttaatacattagcaatctattgggtcaactgacatccattgtatatactagtttctttcatgctatttttattttgttttttgcatttttatcaaatgcagggcccctttctgatctcaccatttcaccatgcatcttggaattcagtaagtgcatatcctaacttgcccatattctaaatcatctggttggttttcagcctagaatttgatacgctttttagaaatatgcccagaatagaaaagctatgttggggcacatgtcctgcaaatatggccctagaaacaagtgatatggaatttacttggtgaataagttataaattcccacagaagaaaaatgtgaaagactgggtgctagacaagaaggaagcaggtaaagggatagttgctttgtcatccgtttttaattattttaactgacccttgacaatcttgtcagcaatataggactgttgaacaatcccggtgtgtcaggacccccaaatgtcacttctgcataaagcatgtatgtcatctattttttcttcaataaagagatttaatagccatttcaagaaatccca

SEQ ID NO: 303390 - DNA, 2069 bp, Homo sapiens
  misc_feature (2036)..(2037): n is a, c, g, or t
agcgggctcccatcgcgcgcacacacgcacacatcgtctccagctctctgctcgctctgctcgcagtcacagacacttgagcacacgcgtacacccagacatcttcgggctgctattggattgactttgaaggttctgtgtgggtcgccgtggctgcatgtttgaatcaggtggagaagcacttcaacgctggacgaagtaaagattattgttgttattttttttttctctctctctctctcttaagaaaggaaaatatcccaaggactaatctgatcgggtcttccttcatcaggaacgaatgcaggaatttgggaactgagctgtgcaagtgctgaagaaggagatttgtttggaggaaacaggaaagagaaagaaaaggaaggaaaaaatacataatttcagggacgagagagagaagaaaaacggggactatggggagaaaaaagattcagattacgaggattatggatgaacgtaacagacaggtgacatttacaaagaggaaatttgggttgatgaagaaggcttatgagctgagcgtgctgtgtgactgtgagattgcgctgatcatcttcaacagcaccaacaagctgttccagtatgccagcaccgacatggacaaagtgcttctcaagtacacggagtacaacgagccgcatgagagccggacaaactcagacatcgtggagacgttgagaaagaagggccttaatggctgtgacagcccagaccccgatgcggacgattccgtaggtcacagccctgagtctgaggacaagtacaggaaaattaacgaagatattgatctaatgatcagcaggcaaagattgtgtgctgttccacctcccaacttcgagatgccagtctccatcccagtgtccagccacaacagtttggtgtacagcaaccctgtcagctcactgggaaaccccaacctattgccactggctcacccttctctgcagaggaatagtatgtctcctggtgtaacacatcgacctccaagtgcaggtaacacaggtggtctgatgggtggagacctcacgtctggtgcaggcaccagtgcagggaacgggtatggcaatccccgaaactcaccaggtctgctggtctcacctggtaacttgaacaagaatatgcaagcaaaatctcctcccccaatgaatttaggaatgaataaccgtaaaccagatctccgagttcttattccaccaggcagcaagaatacgatgccatcagtgaatcaaaggataaataactcccagtcggctcagtcattggctaccccagtggtttccgtagcaactcctactttaccaggacaaggaatgggaggatatccatcagccatttcaacaacatatggtaccgagtactctctgagtagtgcagacctgtcatctctgtctgggtttaacaccgccagcgctcttcaccttggttcagtaactggctggcaacagcaacacctacataacatgccaccatctgccctcagtcagttgggagcttgcactagcactcatttatctcagagttcaaatctctccctgccttctactcaaagcctcaacatcaagtcagaacctgtttctcctcctagagaccgtaccaccaccccttcgagatacccacaacacacgcgccacgaggcggggagatctcctgttgacagcttgagcagctgtagcagttcgtacgacgggagcgaccgagaggatcaccggaacgaattccactcccccattggactcaccagaccttcgccggacgaaagggaaagtccctcagtcaagcgcatgcgactttcttgataaagcccagttttcttcctgcctttttaataatgcattttgtagactctgagaatagaagagagagttcccggccaattttcgagtttcagcagaaacggggtttcgccatgttgcccaggctggtcttgaactcctgacctcaagcgatccacatgcttcggcctcccaaagtgctgggattacgggtgtgagccactgcacctgttcttctccganncgggcatgccggcggtcctcatgccgcccaca

SEQ ID NO: 303391 - DNA, 1539 bp, Homo sapiens
agcgggctcccatcgcgcgcacacacgcacacatcgtctccagctctctgctcgctctgctcgcagtcacagacacttgagcacacgcgtacacccagacatcttcgggctgctattggattgactttgaaggttctgtgtgggtcgccgtggctgcatgtttgaatcaggtggagaagcacttcaacgctggacgaagtaaagattattgttgttattttttttttctctctctctctctcttaagaaaggaaaatatcccaaggactaatctgatcgggtcttccttcatcaggaacgaatgcaggaatttgggaactgagctgtgcaagtgctgaagaaggagatttgtttggaggaaacaggaaagagaaagaaaaggaaggaaaaaatacataatttcagggacgagagagagaagaaaaacggggactatggggagaaaaaagattcagattacgaggattatggatgaacgtaacagacaggtgacatttacaaagaggaaatttgggttgatgaagaaggcttatgagctgagcgtgctgtgtgactgtgagattgcgctgatcatcttcaacagcaccaacaagctgttccagtatgccagcaccgacatggacaaagtgcttctcaagtacacggagtacaacgagccgcatgagagccggacaaactcagacatcgtggagacgttgagaaagaagggccttaatggctgtgacagcccagaccccgatgcggacgattccgtaggtcacagccctgagtctgaggacaagtacaggaaaattaacgaagatattgatctaatgatcagcaggcaaagattgtgtgctgttccacctcccaacttcgagatgccagtctccatcccagtgtccagccacaacagtttggtgtacagcaaccctgtcagctcactgggaaaccccaacctattgccactggctcacccttctctgcagaggaatagtatgtctcctggtgtaacacatcgacctccaagtgcaggtaacacaggtggtctgatgggtggagacctcacgtctggtgcaggcaccagtgcagggaacgggtatggcaatccccgaaactcaccaggtctgctggtctcacctggtaacttgaacaagaatatgcaagcaaaatctcctcccccaatgaatttaggaatgaataaccgtaaaccagatctccgagttcttattccaccaggcagcaagaatacgatgccatcagtggtaatacaaaactacattttaaataaatattgataatgttttgtatatgttttgctgtttttatatttgtctaacttgatgaattacttaacattctcccagaaaattaacataacagtgccattgacagagccttgcttgtatttagctattatttctggtaactggtttgcatttcccttttccgtgtaaaaaaaatatatatatatatctggtgaacttcactaggctgatgttctaggataagaaaaacattttcttttaaggctttcaatttatagttggaaaaaaatca

SEQ ID NO: 303392 - DNA, 811 bp, Homo sapiens
agcgggctcccatcgcgcgcacacacgcacacatcgtctccagctctctgctcgctctgctcgcagtcacagacacttgagcacacgcgtacacccagacatcttcgggctgctattggattgactttgaaggttctgtgtgggtcgccgtggctgcatgtttgaatcaggtggagaagcacttcaacgctggacgaagtaaagattattgttgttattttttttttctctctctctctctcttaagaaaggaaaatatcccaaggactaatctgatcgggtcttccttcatcaggaacgaatgcaggaatttgggaactgagctgtgcaagtgctgaagaaggagatttgtttggaggaaacaggaaagagaaagaaaaggaaggaaaaaatacataatttcagggacgagagagagaagaaaaacggggactatggggagaaaaaagattcagattacgaggattatggatgaacgtaacagacaggtgacatttacaaagaggaaatttgggttgatgaagaaggcttatgagctgagcgtgctgtgtgactgtgagattgcgctgatcatcttcaacagcaccaacaagctgttccagtatgccagcaccgacatggacaaagtgcttctcaagtacacggagtacaacgagccgcatgagagccggacaaactcagacatcgtggagcgacgtggggtcggacgggcgcttcctccgcgggtaccaccagtacgcctacgacggcaaggattacatcgccctgaaagaggacctgcgctcttggaccgcggcggacacgatgttca

SEQ ID NO: 303393 - DNA, 251 bp, Homo sapiens
gggttgtactttacaagtttatgactattgcaagaggacaaaatactgaggttgctgaaggtaaagtgttttgttctgtgggcctttagcctttctcgttttgatcttcctctttaatccataggtggtctgatgggtggagacctcacgtctggtgcaggcaccagtgcaggtaagcccagactccatactgcagtatgtatcattgttctgagttcttctactaggtgatttgcaggacaaagtctttt

SEQ ID NO: 303394 - DNA, 2285 bp, Homo sapiens
tcagctcctaaaatgcaggctgccaagaccctacacctgccctggctctacagccacttacctggtttctggactgtcaccctcccagctgacctgcccgtagccaaggaatgaggacctaacttgagttggcccaaagtctgacctggctgtatgtccctgtggcccacacccagcctgtcttgctcattcatgcagcctcaacactggcctccaaagttcccttaacacttgcaaagtcctttttacctgtgcatttggacttgaggacactggtttctatcacaggtgagagccatgttcaatacctccagcaagctctcctggctccctgcactgtgcacgctcctcttcccaaggtcccaataccagcacctctagttagagttagggtcagggtcaggcctctcccaacatcccagtagtttctcctctgagacacatgggcaagagacaatttggagtcaagattttccatttggatctattttaaatcttttagaaatgcatttgaaacagtgtgtttgttttttcccttctagttaagggactatttatatgtgtataggaaagctgtctctttttttgtttttcctttaacaaggtccaaagaaagatgcaaaaggagatcacacccttgccccgctgagccccgtgataacaagtcactccagactaacctgtgtgccagacatttgtgcattgttgcactttgaggttattatttatcaagttcttgaaggaagcagaaagagggactcctctctccctccgtgtatagtctctatgtttgtgctagtttttcttttttttctctgtgtccagtcagccacagggcccgcctccctgcaggaataaggggtaaaacgttaggtgttgtttggcaagaaaccacactgactgatgaggggtaaaatggaaccaggtagagccactccgggcagctgtcacccattcagaacttctttccgcagctgaagaaatgttcagtaacctgtttgacgctaattaaaacagagcctgcaggaagtggggctaaagtggcattcagtgatcctgttctgtagacttttctttctttttttaaccaaatccaaaggatgttacagaaaagctagccactggtattttgttttgtttaaaaaaaaaaagaaagaaagaaagaaagaaaaacggaaaggaacctagctgcctgtatctttcatttttaaaatagcacttgagttattttctgagtaatccaataaagaacttttgatgacagccagaatgtgttagaactctggctgaacatttcatctcctgtgagtcagaagggctttatttctccctttgatggggccccttcttctttctggtgctctggaagttgtttagaggaaagaattctaattttaattaattgcgcagtgagttaatctcactcgcttttctgcttccaggcatcttaggaaaaacaaatggttttagtagataagggatgcctactaatgcttttttaaaacaaacagggacatttttattatagatttgatttttttaatgaatgtttttaaaaatatataaataggacaccaaagcggcagggtttttttgggggggagggggtttgttttccaactcaagatggcacattagtggccagcaatattttttaactcattccaaccaggaagcttttttatacattgcctaaatctacgccaaccagaaaatagtctcatctctttttttctcaaatgagatccgtgttttattttagcattaaattagttacactgtgatgactggcctattacctgactcagctccctctaccttgaaattgacatttttaaaaaatgcaactaagtggttaatagtgtgtgacgctcaaagttaatgtaaactggaaaggttgtgtgtcgttgctttttgtgttttggttaggcttggttttgttttttaatttttatactttctaataaatttgcagtttcattcttgaaaaaaaaaaaaaaaaaaaaaaaaaaacatttttgggggggcttgggcctcggaaaaagtttttaacaccacttcgggtggggcggcggggcccacgtaggtacggcgaccacgcgggcccaaacgggaccccagaaggaaaccctggccaagaaaaaggtggcgagaattctccacaccagaaaaaaacgcgccgggggaaaccgcagagtgttgcgtaaaccacacccgaagagagaactcagaagcacacaagcgggactcaaccaggaggacccaagggaacccgatagagtacg

SEQ ID NO: 303395 - DNA, 2011 bp, Homo sapiens
tcagctcctaaaatgcaggctgccaagaccctacacctgccctggctctacagccacttacctggtttctggactgtcaccctcccagctgacctgcccgtagccaaggaatgaggacctaacttgagttggcccaaagtctgacctggctgtatgtccctgtggcccacacccagcctgtcttgctcattcatgcagcctcaacactggcctccaaagttcccttaacacttgcaaagtcctttttacctgtgcatttggacttgaggacactggtttctatcacaggtgagagccatgttcaatacctccagcaagctctcctggctccctgcactgtgcacgctcctcttcccaaggtcccaataccagcacctctagttagagttagggtcagggtcaggcctctcccaacatcccagtagtttctcctctgagacacatgggcaagagacaatttggagtcaagattttccatttggatctattttaaatcttttagaaatgcatttgaaacagtgtgtttgttttttcccttctagttaagggactatttatatgtgtataggaaagctgtctctttttttgtttttcctttaacaaggtccaaagaaagatgcaaaaggagatcacacccttgccccgctgagccccgtgataacaagtcactccagactaacctgtgtgccagacatttgtgcattgttgcactttgaggttattatttatcaagttcttgaaggaagcagaaagagggactcctctctccctccgtgtatagtctctatgtttgtgctagtttttcttttttttctctgtgtccagtcagccacagggcccgcctccctgcaggaataaggggtaaaacgttaggtgttgtttggcaagaaaccacactgactgatgaggggtaaaatggaaccaggtagagccactccgggcagctgtcacccattcagaacttctttccgcagctgaagaaatgttcagtaacctgtttgacgctaattaaaacagagcctgcaggaagtggggctaaagtggcattcagtgatcctgttctgtagacttttctttctttttttaaccaaatccaaaggatgttacagaaaagctagccactggtattttgttttgtttaaaaaaaaaaagaaagaaagaaagaaagaaaaacggaaaggaacctagctgcctgtatctttcatttttaaaatagcacttgagttattttctgagtaatccaataaagaacttttgatgacagccagaatgtgttagaactctggctgaacatttcatctcctgtgagtcagaagggctttatttctccctttgatggggccccttcttctttctggtgctctggaagttgtttagaggaaagaattctaattttaattaattgcgcagtgagttaatctcactcgcttttctgcttccaggcatcttaggaaaaacaaatggttttagtagataagggatgcctactaatgcttttttaaaacaaacagggacatttttattatagatttgatttttttaatgaatgtttttaaaaatatataaataggacaccaaagcggcagggtttttttgggggggagggggtttgttttccaactcaagatggcacattagtggccagcaatattttttaactcattccaaccaggaagcttttttatacattgcctaaatctacgccaaccagaaaatagtctcatctctttttttctcaaatgagatccgtgttttattttagcattaaattagttacactgtgatgactggcctattacctgactcagctccctctaccttgaaattgacatttttaaaaaatgcaactaagtggttaatagtgtgtgacgctcaaagttaatgtaaactggaaaggttgtgtgtcgttgctttttgtgttttggttaggcttggttttgttttttaatttttatactttctaataaatttgcagtttcattcttaaaaaaaagtcgacgcggccgcgaat

SEQ ID NO: 303396 - DNA, 1557 bp, Homo sapiens
cggacgcgtgggtcgacccacgcgtcgggactcctctctccctccgtgtatagtctctatgtttgtgctagtttttcttttttttctctgtgtccagtcagccacagggcccgcctccctgcaggaataaggggtaaaacgttaggtgttgtttggcaagaaaccacactgactgatgaggggtaaaatggaaccaggtagagccactccgggcagctgtcacccattcagaacttctttccgcagctgaagaaatgttcagtaacctgtttgacgctaattaaaacagagcctgcaggaagtggggctaaagtggcattcagtgatcctgttctgtagacttttctttctttttttaaccaaatccaaaggatgttacagaaaagctagccactggtattttgttttgtttaaaaaaaaaaagaaagaaagaaagaaagaaaaacggaaaggaacctagctgcctgtatctttcatttttaaaatagcacttgagttattttctgagtaatccaataaagaacttttgatgacagccagaatgtgttagaactctggctgaacatttcatctcctgtgagtcagaagggctttatttctccctttgatggggccccttcttctttctggtgctctggaagttgtttagaggaaagaattctaattttaattaattgcgcagtgagttaatctcactcgcttttctgcttccaggcatcttaggaaaaacaaatggttttagtagataagggatgcctactaatgcttttttaaaacaaacagggacatttttattatagatttgatttttttaatgaatgtttttaaaaatatataaataggacaccaaagcggcagggtttttttgggggggagggggtttgttttccaactcaagatggcacattagtggccagcaatattttttaactcattccaaccaggaagcttttttatacattgcctaaatctacgccaaccagaaaatagtctcatctctttttttctcaaatgagatccgtgttttattttagcattaaattagttacactgtgatgactggcctattacctgactcagctccctctaccttgaaattgacatttttaaaaaatgcaactaagtggttaatagtgtgtgacgctcaaagttaatgtaaactggaaaggttgtgtgtcgttgctttttgtgttttggttaggcttggttttgttttttaatttttatactttctaataaatttgcagtttcattcttgaaaaaaaaaaaaaaaaaaaaaaaaaaacatttttgggggggcttgggcctcggaaaaagtttttaacaccacttcgggtggggcggcggggcccacgtaggtacggcgaccacgcgggcccaaacgggaccccagaaggaaaccctggccaagaaaaaggtggcgagaattctccacaccagaaaaaaacgcgccgggggaaaccgcagagtgttgcgtaaaccacacccgaagagagaactcagaagcacacaagcgggactcaaccaggaggacccaagggaacccgatagagtacg

SEQ ID NO: 303397 - DNA, 1828 bp, Homo sapiens
tcagctcctaaaatgcaggctgccaagaccctacacctgccctggctctacagccacttacctggtttctggactgtcaccctcccagctgacctgcccgtagccaaggaatgaggacctaacttgagttggcccaaagtctgacctggctgtatgtccctgtggcccacacccagcctgtcttgctcattcatgcagcctcaacactggcctccaaagttcccttaacacttgcaaagtcctttttacctgtgcatttggacttgaggacactggtttctatcacaggtgagagccatgttcaatacctccagcaagctctcctggctccctgcactgtgcacgctcctcttcccaaggtcccaataccagcacctctagttagagttagggtcagggtcaggcctctcccaacatcccagtagtttctcctctgagacacatgggcaagagacaatttggagtcaagattttccatttggatctattttaaatcttttagaaatgcatttgaaacagtgtgtttgttttttcccttctagttaagggactatttatatgtgtataggaaagctgtctctttttttgtttttcctttaacaaggtccaaagaaagatgcaaaaggagatcacacccttgccccgctgagccccgtgataacaagtcactccagactaacctgtgtgccagacatttgtgcattgttgcactttgaggttattatttatcaagttcttgaaggaagcagaaagagggactcctctctccctccgtgtatagtctctatgtttgtgctagtttttcttttttttctctgtgtccagtcagccacagggcccgcctccctgcaggaataaggggtaaaacgttaggtgttgtttggcaagaaaccacactgactgatgaggggtaaaatggaaccaggtagagccactccgggcagctgtcacccattcagaacttctttccgcagctgaagaaatgttcagtaacctgtttgacgctaattaaaacagagcctgcaggaagtggggctaaagtggcattcagtgatcctgttctgtagacttttctttctttttttaaccaaatccaaaggatgttacagaaaagctagccactggtattttgttttgtttaaaaaaaaaaagaaagaaagaaagaaagaaaaacggaaaggaacctagctgcctgtatctttcatttttaaaatagcacttgagttattttctgagtaatccaataaagaacttttgatgacagccagaatgtgttagaactctggctgaacatttcatctcctgtgagtcagaagggctttatttctccctttgatggggccccttcttctttctggtgctctggaagttgtttagaggaaagaattctaattttaattaattgcgcagtgagttaatctcactcgcttttctgcttccaggcatcttaggaaaaacaaatggttttagtagataagggatgcctactaatgcttttttatacattgcctaaatctacgccaaccagaaaatagtctcatctctttttttctcaaatgagatccgtgttttattttagcattaaattagttacactgtgatgactggcctattacctgactcagctccctctaccttgaaattgacatttttaaaaaatgcaactaagtggttaatagtgtgtgacgctcaaagttaatgtaaactggaaaggttgtgtgtcgttgctttttgtgttttggttaggcttggttttgttttttaatttttatactttctaataaatttgcagtttcattcttaaaaaaaagtcgacgcggccgcgaat

SEQ ID NO: 303398 - DNA, 943 bp, Homo sapiens
cggacgcgtgggtcgacccacgcgtcgttgtttagaggaaagaattctaattttaattaattgcgcagtgagttaatctcactcgcttttctgcttccaggcatcttaggaaaaacaaatggttttagtagataagggatgcctactaatgcttttttaaaacaaacagggacatttttattatagatttgatttttttaatgaatgtttttaaaaatatataaataggacaccaaagcggcagggtttttttgggggggagggggtttgttttccaactcaagatggcacattagtggccagcaatattttttaactcattccaaccaggaagcttttttatacattgcctaaatctacgccaaccagaaaatagtctcatctctttttttctcaaatgagatccgtgttttattttagcattaaattagttacactgtgatgactggcctattacctgactcagctccctctaccttgaaattgacatttttaaaaaatgcaactaagtggttaatagtgtgtgacgctcaaagttaatgtaaactggaaaggttgtgtgtcgttgctttttgtgttttggttaggcttggttttgttttttaatttttatactttctaataaatttgcagtttcattcttgaaaaaaaaaaaaaaaaaaaaaaaaaaacatttttgggggggcttgggcctcggaaaaagtttttaacaccacttcgggtggggcggcggggcccacgtaggtacggcgaccacgcgggcccaaacgggaccccagaaggaaaccctggccaagaaaaaggtggcgagaattctccacaccagaaaaaaacgcgccgggggaaaccgcagagtgttgcgtaaaccacacccgaagagagaactcagaagcacacaagcgggactcaaccaggaggacccaagggaacccgatagagtacg

SEQ ID NO: 303399 - DNA, 2970 bp, Homo sapiens
aagagatgatttctccatcctgaacgtgcagcgagcttgtcaggaagatcggaggtgccaagtagcagagaaagcatcccccagctctgacagggagacagcacatgtctaaggcccacaagccttggccctaccggaggagaagtcaattttcttctcgaaaatacctgaaaaaagaaatgaattccttccagcaacagccaccgccattcggcacagtgccaccacaaatgatgtttcctccaaactggcagggggcagagaaggacgctgctttcctcgccaaggacttcaactttctcactttgaacaatcagccaccaccaggaaacaggagccaaccaagggcaatggggcccgagaacaacctgtacagccagtacgagcagaaggtgcgcccctgcattgacctcatcgactccctgcgggctctgggtgtggagcaggacctggccctgccagccatcgccgtcatcggggaccagagctcgggcaagagctctgtgctggaggcactgtcaggagtcgcgcttcccagaggcagcggaatcgtaaccaggtgtccgctggtgctgaaactgaaaaagcagccctgtgaggcatgggccggaaggatcagctaccggaacaccgagctagagcttcaggaccctggccaggtggagaaagagatacacaaagcccagaacgtcatggccgggaatggccggggcatcagccatgagctcatcagcctggagatcacctcccctgaggttccagacctgaccatcattgaccttcccggcatcaccagggtggctgtggacaaccagccccgagacatcggactgcagatcaaggctctcatcaagaagtacatccagaggcagcagacgatcaacttggtggtggttccctgtaacgtggacattgccaccacggaggcgctgagcatggcccatgaggtggacccggaaggggacaggaccatcggtatcctgaccaaaccagatctaatggacaggggcactgagaaaagcgtcatgaatgtggtgcggaacctcacgtaccccctcaagaagggctacatgattgtgaagtgccggggccagcaggagatcacaaacaggctgagcttggcagaggcaaccaagaaagaaattacattctttcaaacacatccatatttcagagttctcctggaggaggggtcagccacggttccccgactggcagaaagacttaccactgaactcatcatgcatatccaaaaatcgctcccgttgttagaaggacaaataagggagagccaccagaaggcgaccgaggagctgcggcgttgcggggctgacatccccagccaggaggccgacaagatgttctttctaattgagaaaatcaagatgtttaatcaggacatcgaaaagttagtagaaggagaagaagttgtaagggagaatgagacccgtttatacaacaaaatcagagaggattttaaaaactgggtaggcatacttgcaactaatacccaaaaagttaaaaatattatccacgaagaagttgaaaaatatgaaaagcagtatcgaggcaaggagcttctgggatttgtcaactacaagacatttgagatcatcgtgcatcagtacatccagcagctggtggagcccgcccttagcatgctccagaaagccatggaaattatccagcaagctttcattaacgtggccaaaaaacattttggcgaatttttcaaccttaaccaaactgttcagagcacgattgaagacataaaagtgaaacacacagcaaaggcagaaaacatgatccaacttcagttcagaatggagcagatggttttttgtcaagatcagatttacagtgttgttctgaagaaagtccgagaagagatttttaaccctctggggacgccttcacagaatatgaagttgaactctcattttcccagtaatgagtcttcggtttcctcctttactgaaataggcatccacctgaatgcctacttcttggaaaccagcaaacgtctcgccaaccagatcccatttataattcagtattttatgctccgagagaatggtgactccttgcagaaagccatgatgcagatactacaggaaaaaaatcgctattcctggctgcttcaagagcagagtgagaccgctaccaagagaagaatccttaaggagagaatttaccggctcactcaggcgcgacacgcactctgtcaattctccagcaaagagatccactgaagggcggcgatgcctgtggttgttttcttgtgcgtactcattcattctaaggggagtcggtgcaggatgccgcttctgctttggggccaaactcttctgtcactatcagtgtccatctctactgtactccctcagcatcagagcatgcatcaggggtccacacaggctcagctctctccaccacccagctcttccctgaccttcacgaagggatggctctccagtccttgggtcccgtagcacacagttacagtgtcctaagatactgctatcattcttcgctaatttgtatttgtattcccttccccctacaagattatgagaccccagagggggaaggtctgggtcaaattcttcttttgtatgtccagtctcctgcacagcacctgcagcattgtaactgcttaataaatgacatctcactgaacgaatgagtgctgtgtaagtgatggagatacctgaggctattgctcaagcccaggccttggacatttagtgactgttagccggtccctttcagatccagtggccatgccccctgcttcccatggttcactgtcattgtgtttcccagcctctccactcccccgccagaaaggagcctgagtgattctcttttcttcttgtttccctgattatgatgagcttccattgttctgttaagtcttgaagaggaatttaataaagcaaagaaactttttaaaaacgtagccaggtt

SEQ ID NO: 303400 - DNA, 1548 bp, Homo sapiens
ccccacaagataggaatgaaatttcctttccctagattttgtgacccagtgaactttttggcctctgactgtctatccaatatgcaagtatcactgttcccaggaagaaaaaatagcttttaaactgcaaagacacccacctcccgaagccctttctcaatcagaatagagtggtttcccagccatgggcacctggctgccaggcatactggctatgcctatgaagaaggaatgaggggaggattcgaaacggccctggtgcatacccagaagggagccaggggagtcctgggctgggggagtttctccagcagggaggagctgtggggatgcccagaggtgatatgggcttgctagcctaccagggggcttcttagtgctagaggggatgcctggaagtaaagaggggtcagcgcaaatagaaccttcacggggcttgatgctgaccaccggagtggaggtgggcgagaccaccagggcttcgccaggcaaccatgtgcgcatccaggaactccatgccttctctctgcaaccacaggccttgggctgagaccactccagcaaacccttctttctccctcttccaggaaaccagcaaacgtctcgccaaccagatcccatttataattcagtattttatgctccgagagaatggtgactccttgcagaaagccatgatgcagatactacaggaaaaaaatcgctattcctggctgcttcaagagcagagtgagaccgctaccaagagaagaatccttaaggagagaatttaccggctcactcaggcgcgacacgcactctgtcaattctccagcaaagagatccactgaagggcggcgatgcctgtggttgttttcttgtgcgtactcattcattctaaggggagtcggtgcaggatgccgcttctgctttggggccaaactcttctgtcactatcagtgtccatctctactgtactccctcagcatcagagcatgcatcaggggtccacacaggctcagctctctccaccacccagctcttccctgaccttcacgaagggatggctctccagtccttgggtcccgtagcacacagttacagtgtcctaagatactgctatcattcttcgctaatttgtatttgtattcccttccccctacaagattatgagaccccagagggggaaggtctgggtcaaattcttcttttgtatgtccagtctcctgcacagcacctgcagcattgtaactgcttaataaatgacatctcactgaacgaatgagtgctgtgtaagtgatggagatacctgaggctattgctcaagcccaggccttggacatttagtgactgttagccggtccctttcagatccagtggccatgccccctgcttcccatggttcactgtcattgtgtttcccagcctctccactcccccgccagaaaggagcctgagtgattctcttttcttcttgtttccctgattatgatgagcttccattgttctgttaagtcttgaagaggaatttaataaagcaaagaaactttttaaaaacgtagccaggtt

SEQ ID NO: 303401 - DNA, 1028 bp, Homo sapiens
ctagaggatcccccttatttgccttctttatggaaataggcatccacctgtaatgcctacttacttggaaaccagcaaacgtctcgccaaccagatcccatttataattcagtattttatgctccgagagaatggtgactccttgcagaaagccatgatgcagatactacaggaaaaaaatcgctattcctggctgcttcaagagcagagtgagaccgctaccaagagaagaatccttaaggagagaatttaccggctcactcaggcgcgacacgcactctgtcaattctccagcaaagagatccactgaagggcggcgatgcctgtggttgttttcttgtgcgtactcattcattctaaggggagtcggtgcaggatgccgcttctgctttggggccaaactcttctgtcactatcagtgtccatctctactgtactccctcagcatcagagcatgcatcaggggtccacacaggctcagctctctccaccacccagctcttccctgaccttcacgaagggatggctctccagtccttgggtcccgtagcacacagttacagtgtcctaagatactgctatcattcttcgctaatttgtatttgtattcccttccccctacaagattatgagaccccagagggggaaggtctgggtcaaattcttcttttgtatgtccagtctcctgcacagcacctgcagcattgtaactgcttaataaatgacatctcactgaacgaatgagtgctgtgtaagtgatggagatacctgaggctattgctcaagcccaggccttggacatttagtgactgttagccggtccctttcagatccagtggccatgccccctgcttcccatggttcactgtcattgtgtttcccagcctctccactcccccgccagaaaggagcctgagtgattctcttttcttcttgtttccctgattatgatgagcttccattgttctgttaagtcttgaagaggaatttaataaagcaaagaaactttttaaaaacgtagccaggtt

SEQ ID NO: 303402 - DNA, 730 bp, Homo sapiens
aagaccttcaagttaattgttggaacctgcggctctaacacttccagcaaagctacttctgtgaaagctgtgacgagcagaggaaatgggacaggagaggagctgaatcctgagattgtatcgctaggagcccccaaagtacgatgacggtcctcgggccagcatgggggtgcattggcaccatgtaaggaaaggggccctcccgtggcaccgttggagtggggcggtgtggggttgttcggagagaaaagtttcccatgagctctgtttcagcaaacggcgatgaccacttccgtggcaactaaacagtcttgccttcctgcacgtggacatttttcttcatgcatatttctcttgcaaatggttctattgtttgtataacagtatttcatgagcggagaagagttggaagcaaaaatctgttcatgagaaatcctttattaagctcctactgtatgccaggtactttgggctgcaggtacagctgtgaaaaaaaacagcaggcgggaaccagccctgggacaggctccacacactcactgagcaccgcctcctgcacagcgcagtccctgctctcagcctgagcaggcgcagcagccctgccctcccaagaaaggggatggtgagaagcctagtgtcccctccacagagaccagcgccacacatgacagccacacatgacagtgttggtaccagcactcagtctttgagccacaagtgcttataagat

SEQ ID NO: 303403 - DNA, 3371 bp, Homo sapiens
aagaccttcaagttaattgttggaacctgcggctctaacacttccagcaaagctacttctgtgaaagctgtgacgagcagaggaaatgggacaggagaggagctgaatcctgagattgtatcgctaggagcccccaaagtacgatgacggtcctcgggccagcatgggggtgcattggcaccatgtaaggaaaggggccctcccgtggcaccgttggagtggggcggtgtggggttgttcggagagaaaagtttcccatgagctctgtttcagcaaacggcgatgaccacttccgtggcaactaaacagtcttgccttcctgcacgtggacatttttcttcatgcatatttctcttgcaaatggttctattgtttgtataacagtatttcatgagcggagaagagttggaagcaaaaatctgttcatgagaaatagcttgtcaggaagatcggaggtgccaagtagcagagaaagcatcccccagctctgacagggagacagcacatgtctaaggcccacaagccttggccctaccggaggagaagtcaattttcttctcgaaaatacctgaaaaaagaaatgaattccttccagcaacagccaccgccattcggcacagtgccaccacaaatgatgtttcctccaaactggcagggggcagagaaggacgctgctttcctcgccaaggacttcaactttctcactttgaacaatcagccaccaccaggaaacaggagccaaccaagggcaatggggcccgagaacaacctgtacagccagtacgagcagaaggtgcgcccctgcattgacctcatcgactccctgcgggctctgggtgtggagcaggacctggccctgccagccatcgccgtcatcggggaccagagctcgggcaagagctctgtgctggaggcactgtcaggagtcgcgcttcccagaggcagcggaatcgtaaccaggtgtccgctggtgctgaaactgaaaaagcagccctgtgaggcatgggccggaaggatcagctaccggaacaccgagctagagcttcaggaccctggccaggtggagaaagagatacacaaagcccagaacgtcatggccgggaatggccggggcatcagccatgagctcatcagcctggagatcacctcccctgaggttccagacctgaccatcattgaccttcccggcatcaccagggtggctgtggacaaccagccccgagacatcggactgcagatcaaggctctcatcaagaagtacatccagaggcagcagacgatcaacttggtggtggttccctgtaacgtggacattgccaccacggaggcgctgagcatggcccatgaggtggacccggaaggggacaggaccatcggtatcctgaccaaaccagatctaatggacaggggcactgagaaaagcgtcatgaatgtggtgcggaacctcacgtaccccctcaagaagggctacatgattgtgaagtgccggggccagcaggagatcacaaacaggctgagcttggcagaggcaaccaagaaagaaattacattctttcaaacacatccatatttcagagttctcctggaggaggggtcagccacggttccccgactggcagaaagacttaccactgaactcatcatgcatatccaaaaatcgctcccgttgttagaaggacaaataagggagagccaccagaaggcgaccgaggagctgcggcgttgcggggctgacatccccagccaggaggccgacaagatgttctttctaattgagaaaatcaagatgtttaatcaggacatcgaaaagttagtagaaggagaagaagttgtaagggagaatgagacccgtttatacaacaaaatcagagaggattttaaaaactgggtaggcatacttgcaactaatacccaaaaagttaaaaatattatccacgaagaagttgaaaaatatgaaaagcagtatcgaggcaaggagcttctgggatttgtcaactacaagacatttgagatcatcgtgcatcagtacatccagcagctggtggagcccgcccttagcatgctccagaaagccatggaaattatccagcaagctttcattaacgtggccaaaaaacattttggcgaatttttcaaccttaaccaaactgttcagagcacgattgaagacataaaagtgaaacacacagcaaaggcagaaaacatgatccaacttcagttcagaatggagcagatggttttttgtcaagatcagatttacagtgttgttctgaagaaagtccgagaagagatttttaaccctctggggacgccttcacagaatatgaagttgaactctcattttcccagtaatgagtcttcggtttcctcctttactgaaataggcatccacctgaatgcctacttcttggaaaccagcaaacgtctcgccaaccagatcccatttataattcagtattttatgctccgagagaatggtgactccttgcagaaagccatgatgcagatactacaggaaaaaaatcgctattcctggctgcttcaagagcagagtgagaccgctaccaagagaagaatccttaaggagagaatttaccggctcactcaggcgcgacacgcactctgtcaattctccagcaaagagatccactgaagggcggcgatgcctgtggttgttttcttgtgcgtactcattcattctaaggggagtcggtgcaggatgccgcttctgctttggggccaaactcttctgtcactatcagtgtccatctctactgtactccctcagcatcagagcatgcatcaggggtccacacaggctcagctctctccaccacccagctcttccctgaccttcacgaagggatggctctccagtccttgggtcccgtagcacacagttacagtgtcctaagatactgctatcattcttcgctaatttgtatttgtattcccttccccctacaagattatgagaccccagagggggaaggtctgggtcaaattcttcttttgtatgtccagtctcctgcacagcacctgcagcattgtaactgcttaataaatgacatctcactgaacgaatgagtgctgtgtaagtgatggagatacctgaggctattgctcaagcccaggccttggacatttagtgactgttagccggtccctttcagatccagtggccatgccccctgcttcccatggttcactgtcattgtgtttcccagcctctccactcccccgccagaaaggagcctgagtgattctcttttcttcttgtttccctgattatgatgagcttccattgttctgttaagtcttgaagaggaatttaataaagcaaagaaactttttaaaaacgtagccaggtt

SEQ ID NO: 303404 - DNA, 2321 bp, Homo sapiens
aagaccttcaagttaattgttggaacctgcggctctaacacttccagcaaagctacttctgtgaaagctgtgacgagcagaggaaatgggacaggagaggagctgaatcctgagattgtatcgctaggagcccccaaagtacgatgacggtcctcgggccagcatgggggtgcattggcaccatgtaaggaaaggggccctcccgtggcaccgttggagtggggcggtgtggggttgttcggagagaaaagtttcccatgagctctgtttcagcaaacggcgatgaccacttccgtggcaactaaacagtcttgccttcctgcacgtggacatttttcttcatgcatatttctcttgcaaatggttctattgtttgtataacagtatttcatgagcggagaagagttggaagcaaaaatctgttcatgagaaatagcttgtcaggaagatcggaggtgccaagtagcagagaaagcatcccccagctctgacagggagacagcacatgtctaaggcccacaagccttggccctaccggaggagaagtcaattttcttctcgaaaatacctgaaaaaagaaatgaattccttccagcaacagccaccgccattcggcacagtgccaccacaaatgatgtttcctccaaactggcagggggcagagaaggacgctgctttcctcgccaaggacttcaactttctcactttgaacaatcagccaccaccaggaaacaggagccaaccaagggcaatggggcccgagaacaacctgtacagccagtacgagcagaaggtgcgcccctgcattgacctcatcgactccctgcgggctctgggtgtggagcaggacctggccctgccagccatcgccgtcatcggggaccagagctcgggcaagagctctgtgctggaggcactgtcaggagtcgcgcttcccagaggcagcggaatcgtaaccaggtgtccgctggtgctgaaactgaaaaagcagccctgtgaggcatgggccggaaggatcagctaccggaacaccgagctagagcttcaggaccctggccaggtggagaaagagatacacaaagcccagaacgtcatggccgggaatggccggggcatcagccatgagctcatcagcctggagatcacctcccctgaggttccagacctgaccatcattgaccttcccggcatcaccagggtggctgtggacaaccagccccgagacatcggactgcagatcaaggctctcatcaagaagtacatccagaggcagcagacgatcaacttggtggtggttccctgtaacgtggacattgccaccacggaggcgctgagcatggcccatgaggtggacccggaaggggacaggaccatcggtatcctgaccaaaccagatctaatggacaggggcactgagaaaagcgtcatgaatgtggtgcggaacctcacgtaccccctcaagaagggctacatgattgtgaagtgccggggccagcaggagatcacaaacaggctgagcttggcagaggcaaccaagaaagaaattacattctttcaaacacatccatatttcagagttctcctggaggaggggtcagccacggttccccgactggcagaaagacttaccactgaactcatcatgcatatccaaaaatcgctcccgttgttagaaggacaaataagggagagccaccagaaggcgaccgaggagctgcggcgttgcggggctgacatccccagccaggaggccgacaagatgttctttctaattgagaaaatcaagatgtttaatcaggacatcgaaaagttagtagaaggagaagaagttgtaagggagaatgagacccgtttatacaacaaaatcagagaggattttaaaaactgggtaggcatacttgcaactaatacccaaaaaggtaagttctgggcagggctccctgcaaaacagggtggtatttacccagaccagaggctatgtccagcacatgataagtgtgccaagagtggaacacgcccatccaagaccgtggaacccttggtaatcagcaactgtctctcaacgaacaaaacccagaaatatggggcgtcgacctcagcaactcaacacagggcaattccactgcctctgatgtcctcgtgtcttgattttgttttgttttgttgagacagggtctccctctgttgcctaggctggagtgtagtggcgcaatcatgactcactgcagcctcaacctcccaggctcaagtgatcctcccacctcagcctcctgagtagttgggaccacaggcatgaaccaccatacccagataatttttgt

SEQ ID NO: 303405 - DNA, 1169 bp, Homo sapiens
aagaccttcaagttaattgttggaacctgcggctctaacacttccagcaaagctacttctgtgaaagctgtgacgagcagaggaaatgggacaggagaggagctgaatcctgagattgtatcgctaggagcccccaaagtacgatgacggtcctcgggccagcatgggggtgcattggcaccatgtaaggaaaggggccctcccgtggcaccgttggagtggggcggtgtggggttgttcggagagaaaagtttcccatgagctctgtttcagcaaacggcgatgaccacttccgtggcaactaaacagtcttgccttcctgcacgtggacatttttcttcatgcatatttctcttgcaaatggttctattgtttgtataacagtatttcatgagcggagaagagttggaagcaaaaatctgttcatgagaaatagcttgtcaggaagatcggaggtgccaagtagcagagaaagcatcccccagctctgacagggagacagcacatgtctaaggcccacaagccttggccctaccggaggagaagtcaattttcttctcgaaaatacctgaaaaaagaaatgaattccttccagcaacagccaccgccattcggcacagtgccaccacaaatgatgtttcctccaaactggcagggggcagagaaggacgctgctttcctcgccaaggacttcaactttctcactttgaacaatcagccaccaccaggaaacaggagccaaccaagggcaatggggcccgagaacaacctgtacagccagtacgagcagaaggtgcgcccctgcattgacctcatcgactccctgcgggctctgggtgtggagcaggacctggccctgccagccatcgccgtcatcggggaccagagctcgggcaagagctctgtgctggaggcactgtcaggagtcgcgcttcccagaggcagcggaatcgtaaccaggtgtccgctggtgctgaaactgaaaaagcagccctgtgaggcatgggccggaaggatcagctaccggaacaccgagctagagcttcaggaccctggccaggtggagaaagagatacacaaagataaaatcaagtaggggaaaagatagggagcagacaaggaaagagggcagaggggggtgctctatcttctagtaaacccggggccgg

SEQ ID NO: 303406 - DNA, 385 bp, Homo sapiens
cctcgccacccctctccatgcttcggccacagtggcacatgccttcccttgctcacctcgaggccaccgcacatgcagtggcttcctgctggaatgcccttcacttccacccctcctcacctggccaactcctcattcaagactcaggtcagctgtcaactcctccaggagattttcttgggtgcccccaactaccccagggagatcaggtgtccccttttctgggatcctatagtacccctattacagcggttcccatctaaaggcaggtgtaatgggtagaatgacctccaatgacgccctcatcctaatctctggaacctgtgaacgtgctgttacaagacaaaggggagttaaggctaccaatggaattaagtttgctaat

SEQ ID NO: 303407 - DNA, 4767 bp, Homo sapiens
  misc_feature (37)..(37): n is a, c, g, or t
cggacggcgtgggcaacttgatacctctaatgaatcngctgagccaaaggcagagggcgatgaggaaggacccagtggtgccagtgaagaagaggacacatgaaggcttgctacccccagtggaaaatcatcccctccccttgtgtgtatgtgacagcgtgtatgtaacggcttctgatttctgtgaaagctgctcagcaacaaacgtacttccaccagatgtgtccccagatccacagcaggcacatatctctccaagggatgaccagttttatgcttactgtgtgcttctcatcccctggttgtggtaggtcaaggaaaagagcccctttgatccaccaggagcaattaagaaaggtccttcaggtaatccctcaatggctgctttgaacttactcaggaaagccagcccccataatattgtattaccaaacagtatcgctttgttaggaaggatctggaataatcttgaagggaagtcagagttttctccctgcctattaacaaaaacccaattttgttcatattgaagcatgaaataaatgagagcaaggtagggccaaattaactcttgtggacagtccctaaaagtccagttctacatttgtgaaaattgtggtgccatgaattaagatggatgactggaaaaaggtgttggagaaagagttaaagatgaggaagagatatttttagtatatgaagttatccaggacttgatattcataattcagtgctgtggaaatgaaaaaaatgattgaagaggtggaacggaaatgaccttagggggaaaaaaaaggaccaaagaagtctgattaaaagttgaaatcagtatttctgaattcaaattgcttgaatttccaaaatagtcagtaaaggatctaatagaaccagaattatttgggtgaattctgcaggttttatgggcttgtcacaacgtgaaggggctggaatgtatattaccaaatgggaatttccattgtaggtttttgctagtcccacccccattttagcctaatttggcttaaacgcagtatggggagaattgttcccattccatgtgttctgaattcagctcatctcccagcatatagatatatcctcctttaactccgaccagaacccttcttcctgtggcactccccacccatagaccttcagatcatctcccacagcctggatctcactctcctcttagtaacagagacactcctgaggttggacttccttgcttttctctacttccaaatcacaatttcttacaaccaagctttgtgctcccgagtaagcagggatgtactaggggaatgtaaaactgcaaacttaaaaacctgcatcttcttgaagcatcagttttacttaccaaatggtttagagtcataagatgacctatttttatataaaagttatattatagaataaaatgttcatacgcatagactgttaagataaaaaaataggaatcttgcaaggtaattcttatttgcaagtgggttatgtgttcactctcctctacctttatggtattttggtgttcacttacgaagcatacaactagaaccatatccaagcagactctgggttgctgttaacccagggcctagacttctagtgcctctgaggcagaaccaaaggagcctgcactgggggaaatcccttttcctgcctgcctgtctgcctgtgacctgtgtacgtattacaggctttaggaccagctgattgttatgcttgcaggatggttttgaaacagaaacaatacttgtttactgtaggaatcctatttatattatttttcagtcctgtgaatgctgtgaaaagatttattcctttgaggccaggaagctcccaggcatatatgcttctaggttaggattgtcctgactcactaaagatgccaggatattggggctgaggggagtttgaggtgttaaaaaaaaaaaaaaagcatttttctctcaaactgatggccaagaaatggctaggacaattttggtgctttacctatctctgcaaagactggagaatttggcataccattaattacaaccaccaatcatatccaacaaaagtaccctaaaagaaggaccagtggccactctcgaaaaaatttaagtatcagaagattaaaaagattttaggatttggaagcttgtattgtctttccccaataatcattgtttgatctccaaatagtagccttatattagcaatagacagatcattggttctccatatctgatcatatgttactactttgaatcagtatttgggaaattcaagcatttatgcagtggatataaatggaaatataaaaatatttgccaacctgtctcagtaacttatcatatctctgtgatcctcaaggaaagcacttttgcttttacttagaaagcgtttcagatttgctttatagactcctgctgtcttcagtacctgataaaactttaaccagggaagcattaaacacagtgcagcagcttttgcccaggcttctaagttcctgccggcagcatttatcaatgtaagaactaggatgcttcctgcagtggcactaccttcccctagagctggagcatgctgcttggccttaagccccagcatgatgaggcttccctcctgccaggtcagtaaaagttagagagctcagaattgggtcttgcctgggtgcaggtggcagggtttgctgaaacccctaaagagaagtcaccaagggaggcaggtaatgaatgtttccagaatcagtcggatactcatagcaatttctggctatctttcaaatgttgaatttctggatgctgagagggactttgatttgatatcattaaatccaggacagtcccaagaagtgcttggagtctcggctctgacagcccaagaagggaaataacttgtattaaggaacaactatgagccaggccctgagctgtctcttagataataaaacagatggggagtggaagagtcatttgcttcaagttatacagctaggaaatactcaagccaaatcttgaacgcagctccccctaattctgtggacaggcactttgtaccacacaccatggtccacctaaaaacagaaggataaaaagacttcaggttttcccactgtgtgctgaccatcccaatttatgaatcttcttcaaaatgacatttcacagttatagttagggctcagaaatggcattgaggtagccttatttctcccctttagcagatgctttaagtacacattgctgacttgagcccacccccaggagttaggagaacatttcctttttcatgccatcttccataaataaggtgtttcttggccttcaaagatatagaactttgcagcagtagtaaaagtgaagggtgttctgctctctactcaactttatttgaaaatgtctgcagcttcactcctgtagaaaaggaaatcttcatattttagtaaacttagccgccagtgtactctgtgaggatgtggcaattcaaagtccagtgaatctggactctcttactgattcctggttttagtgtgtgtgtcgggggagtgtgtacctatatataaaggacaagtgtgatatgtgtgtatatgtatatacatacatacatgtccacacacacacacacaatatttgagagctaaggaaaactcaaagcagccccttcattatcttgcgtactacttcaaagatttctgtcagccctaattacaagtgtcaccatatagttggggcttaggtacttgcttacaggaagagcaattccctagcaaaggtcattagctcctaaggcactgagtcaaagtgacagccctgaaggaaattgcactccagccctcctccaggatgtctaataagatgggaaacttggatgcccagccattttggtgacctgagagtctaactactccagttagacctaagggcacaaatgcagaattcatgaccttgtagttgtggcagggtctaggaagtcctctctccccaagtagaaaatattctcttgccattcctgaaattccacattcatataatggctgtgcaatacatgcttctcaataagaaaattaactgcatgtttactgtgtgctgatcacatcagatttttatgtttaaaaaaatctcattatggattgagtccagcccagctctaagagaaaaagaaggcccatatgggagacttcagtctcattattattgcctttatccagcagtgcttatgaagccccctaccctgtcccattccagaaaccataagactcaggcagttcttgattctggaggcctgcctggtaagataagatagtataatttggaactgagaacataccagaaacagcagaacgagggccagagcagaaaaatgaaaataagtggagacacttatggatacattggtgcaaaaaaagccacggagcccatactgggcttgatatgactttgaggggacagcagattaatacttaatgagggttaaacctgaccagtctttctacagtgacaggccacactgcatgaatggggagaaccaatgaatccattgtcctctgcctattttcctgtgcacagtcacattccctccttaggaatcttccccttccaccctttacattaaacaagggaacactgaatctttcaagggaattacacgtttgggttaatgtttcagtatatcattttcatactgtaaattattttgtaagagagatttactgctatcccaggatgttcggacttggtgcccctgtgcatttggaaatcaataaactattactggaaatgc

SEQ ID NO: 303408 - DNA, 3747 bp, Homo sapiens
tctcccagcttcagatgtcagctctaatacattgtaaaaagctttaagatcttaaaaggtttccttttttcacatcaggattttctcatttaagttgatcaaacacttcctttccatagctgtccatagttccttctgcagtttcctacgtcactggttaagaatctcctcttagtaacagagacactcctgaggttggacttccttgcttttctctacttccaaatcacaatttcttacaaccaagctttgtgctcccgagtaagcagggatgtactaggggaatgtaaaactgcaaacttaaaaacctgcatcttcttgaagcatcagttttacttaccaaatggtttagagtcataagatgacctatttttatataaaagttatattatagaataaaatgttcatacgcatagactgttaagataaaaaaataggaatcttgcaaggtaattcttatttgcaagtgggttatgtgttcactctcctctacctttatggtattttggtgttcacttacgaagcatacaactagaaccatatccaagcagactctgggttgctgttaacccagggcctagacttctagtgcctctgaggcagaaccaaaggagcctgcactgggggaaatcccttttcctgcctgcctgtctgcctgtgacctgtgtacgtattacaggctttaggaccagctgattgttatgcttgcaggatggttttgaaacagaaacaatacttgtttactgtaggaatcctatttatattatttttcagtcctgtgaatgctgtgaaaagatttattcctttgaggccaggaagctcccaggcatatatgcttctaggttaggattgtcctgactcactaaagatgccaggatattggggctgaggggagtttgaggtgttaaaaaaaaaaaaaaagcatttttctctcaaactgatggccaagaaatggctaggacaattttggtgctttacctatctctgcaaagactggagaatttggcataccattaattacaaccaccaatcatatccaacaaaagtaccctaaaagaaggaccagtggccactctcgaaaaaatttaagtatcagaagattaaaaagattttaggatttggaagcttgtattgtctttccccaataatcattgtttgatctccaaatagtagccttatattagcaatagacagatcattggttctccatatctgatcatatgttactactttgaatcagtatttgggaaattcaagcatttatgcagtggatataaatggaaatataaaaatatttgccaacctgtctcagtaacttatcatatctctgtgatcctcaaggaaagcacttttgcttttacttagaaagcgtttcagatttgctttatagactcctgctgtcttcagtacctgataaaactttaaccagggaagcattaaacacagtgcagcagcttttgcccaggcttctaagttcctgccggcagcatttatcaatgtaagaactaggatgcttcctgcagtggcactaccttcccctagagctggagcatgctgcttggccttaagccccagcatgatgaggcttccctcctgccaggtcagtaaaagttagagagctcagaattgggtcttgcctgggtgcaggtggcagggtttgctgaaacccctaaagagaagtcaccaagggaggcaggtaatgaatgtttccagaatcagtcggatactcatagcaatttctggctatctttcaaatgttgaatttctggatgctgagagggactttgatttgatatcattaaatccaggacagtcccaagaagtgcttggagtctcggctctgacagcccaagaagggaaataacttgtattaaggaacaactatgagccaggccctgagctgtctcttagataataaaacagatggggagtggaagagtcatttgcttcaagttatacagctaggaaatactcaagccaaatcttgaacgcagctccccctaattctgtggacaggcactttgtaccacacaccatggtccacctaaaaacagaaggataaaaagacttcaggttttcccactgtgtgctgaccatcccaatttatgaatcttcttcaaaatgacatttcacagttatagttagggctcagaaatggcattgaggtagccttatttctcccctttagcagatgctttaagtacacattgctgacttgagcccacccccaggagttaggagaacatttcctttttcatgccatcttccataaataaggtgtttcttggccttcaaagatatagaactttgcagcagtagtaaaagtgaagggtgttctgctctctactcaactttatttgaaaatgtctgcagcttcactcctgtagaaaaggaaatcttcatattttagtaaacttagccgccagtgtactctgtgaggatgtggcaattcaaagtccagtgaatctggactctcttactgattcctggttttagtgtgtgtgtcgggggagtgtgtacctatatataaaggacaagtgtgatatgtgtgtatatgtatatacatacatacatgtccacacacacacacacaatatttgagagctaaggaaaactcaaagcagccccttcattatcttgcgtactacttcaaagatttctgtcagccctaattacaagtgtcaccatatagttggggcttaggtacttgcttacaggaagagcaattccctagcaaaggtcattagctcctaaggcactgagtcaaagtgacagccctgaaggaaattgcactccagccctcctccaggatgtctaataagatgggaaacttggatgcccagccattttggtgacctgagagtctaactactccagttagacctaagggcacaaatgcagaattcatgaccttgtagttgtggcagggtctaggaagtcctctctccccaagtagaaaatattctcttgccattcctgaaattccacattcatataatggctgtgcaatacatgcttctcaataagaaaattaactgcatgtttactgtgtgctgatcacatcagatttttatgtttaaaaaaatctcattatggattgagtccagcccagctctaagagaaaaagaaggcccatatgggagacttcagtctcattattattgcctttatccagcagtgcttatgaagccccctaccctgtcccattccagaaaccataagactcaggcagttcttgattctggaggcctgcctggtaagataagatagtataatttggaactgagaacataccagaaacagcagaacgagggccagagcagaaaaatgaaaataagtggagacacttatggatacattggtgcaaaaaaagccacggagcccatactgggcttgatatgactttgaggggacagcagattaatacttaatgagggttaaacctgaccagtctttctacagtgacaggccacactgcatgaatggggagaaccaatgaatccattgtcctctgcctattttcctgtgcacagtcacattccctccttaggaatcttccccttccaccctttacattaaacaagggaacactgaatctttcaagggaattacacgtttgggttaatgtttcagtatatcattttcatactgtaaattattttgtaagagagatttactgctatcccaggatgttcggacttggtgcccctgtgcatttggaaatcaataaactattactggaaatgc

SEQ ID NO: 303409 - DNA, 4713 bp, Homo sapiens
  misc_feature (37)..(37): n is a, c, g, or t
cggacggcgtgggcaacttgatacctctaatgaatcngctgagccaaaggcagagggcgatgaggaaggacccagtggtgccagtgaagaagaggacacatgaaggcttgctacccccagtggaaaatcatcccctccccttgtgtgtatgtgacagcgtgtatgtaacggcttctgatttctgtgaaagctgctcagcaacaaacgtacttccaccagatgtgtccccagatccacagcaggcacatatctctccaagggatgaccagttttatgcttactgtgtgcttctcatcccctggttgtggtaggtcaaggaaaagagcccctttgatccaccaggagcaattaagaaaggtccttcaggtaatccctcaatggctgctttgaacttactcaggaaagccagcccccataatattgtattaccaaacagtatcgctttgttaggaaggatctggaataatcttgaagggaagtcagagttttctccctgcctattaacaaaaacccaattttgttcatattgaagcatgaaataaatgagagcaaggtagggccaaattaactcttgtggacagtccctaaaagtccagttctacatttgtgaaaattgtggtgccatgaattaagatggatgactggaaaaaggtgttggagaaagagttaaagatgaggaagagatatttttagtatatgaagttatccaggacttgatattcataattcagtgctgtggaaatgaaaaaaatgattgaagaggtggaacggaaatgaccttagggggaaaaaaaaggaccaaagaagtctgattaaaagttgaaatcagtatttctgaattcaaattgcttgaatttccaaaatagtcagtaaaggatctaatagaaccagaattatttgggtgaattctgcaggttttatgggcttgtcacaacgtgaaggggctggaatgtatattaccaaatgggaatttccattgtaggtttttgctagtcccacccccattttagcctaatttggcttaaacgcagtatggggagaattgttcccattccatgtgttctgaattcagctcatctcccagcatatagatatatcctcctttaactccgaccagaacccttcttcctgtggcactccccacccatagaccttcagatcatctcccacagcctggatctcactctcctcttagtaacagagacactcctgaggttggacttccttgcttttctctacttccaaatcacaatttcttacaaccaagctttgtgctcccgagtaagcagggatgtactaggggaatgtaaaactgcaaacttaaaaacctgcatcttcttgaagcatcagttttacttaccaaatggtttagagtcataagatgacctatttttatataaaagttatattatagaataaaatgttcatacgcatagactgttaagataaaaaaataggaatcttgcaaggtaattcttatttgcaagtgggttatgtgttcactctcctctacctttatggtattttggtgttcacttacgaagcatacaactagaaccatatccaagcagactctgggttgctgttaacccagggcctagacttctagtgcctctgaggcagaaccaaaggagcctgcactgggggaaatcccttttcctgcctgcctgtctgcctgtgacctgtgtacgtattacaggctttaggaccagctgattgttatgcttgcaggatggttttgaaacagaaacaatacttgtttactgtaggaatcctatttatattatttttcagtcctgtgaatgctgtgaaaagatttattcctttgaggccaggaagctcccaggcatatatgcttctaggttaggattgtcctgactcactaaagatgccaggatattggggctgaggggagtttgaggtgttaaaaaaaaaaaaaaagcatttttctctcaaactgatggccaagaaatggctaggacaattttggtgctttacctatctctgcaaagactggagaatttggcataccattaattacaaccaccaatcatatccaacaaaagtaccctaaaagaaggaccagtggccactctcgaaaaaatttaagtatcagaagattaaaaagattttaggatttggaagcttgtattgtctttccccaataatcattgtttgatctccaaatagtagccttatattagcaatagacagatcattggttctccatatctgatcatatgttactactttgaatcagtatttgggaaattcaagcatttatgcagtggatataaatggaaatataaaaatatttgccaacctgtctcagtaacttatcatatctctgtgatcctcaaggaaagcacttttgcttttacttagaaagcgtttcagatttgctttatagactcctgctgtcttcagtacctgataaaactttaaccagggaagcattaaacacagtgcagcagcttttgcccaggcttctaagttcctgccggcagcatttatcaatgtaagaactaggatgcttcctgcagtggcactaccttcccctagagctggagcatgctgcttggccttaagccccagcatgatgaggcttccctcctgccaggtcagtaaaagttagagagctcagaattgggtcttgcctgggtgcaggtggcagggtttgctgaaacccctaaagagaagtcaccaagggaggcaggtaatgaatgtttccagaatcagtcggatactcatagcaatttctggctatctttcaaatgttgaatttctggatgctgagagggactttgatttgatatcattaaatccaggacagtcccaagaagtgcttggagtctcggctctgacagcccaagaagggaaataacttgtattaaggaacaactatgagccaggccctgagctgtctcttagataataaaacagatggggagtggaagagtcatttgcttcaagttatacagctaggaaatactcaagccaaatcttgaacgcagctccccctaattctgtggacaggcactttgtaccacacaccatggtccacctaaaaacagaaggataaaaagacttcaggttttcccactgtgtgctgaccatcccaatttatgaatcttcttcaaaatgacatttcacagttatagttagggctcagaaatggcattgaggtagccttatttctcccctttagcagatgctttaagtacacattgctgacttgagcccacccccaggagttaggagaacatttcctttttcatgccatcttccataaataaggtgtttcttggccttcaaagatatagaactttgcagcagtagtaaaagtgaagggtgttctgctctctactcaactttatttgaaaatgtctgcagcttcactcctgtagaaaaggaaatcttcatattttagtaaacttagccgccagtgtactctgtgaggatgtggcaattcaaagtccagtgaatctggactctcttactgattcctggttttagtgtgtgtgtcgggggagtgtgtacctatatataaaggacaagtgtgatatgtgtgtatatgtatatacatacatacatgtccacacacacacacacaatatttgagagctaaggaaaactcaaagcagccccttcattatcttgcgtactacttcaaagatttctgtcagccctaattacaagtgtcaccatatagttggggcttaggtacttgcttacaggaagagcaattccctagcaaaggtcattagctcctaaggcactgagtcaaagtgacagccctgaaggaaattgcactccagccctcctccaggatgtctaataagatgggaaacttggatgcccagccattttggtgacctgagagtctaactactccagttagacctaagggcacaaatgcagaattcatgaccttgtagttgtggcagggtctaggaagtcctctctccccaagtagaaaatattctcttgccattcctgaaattccacattcatataatggctgtgcaatacatgcttctcaataagaaaattaactgcatgtttactgtgtgctgatcacatcagatttttatgtttaaaaaaatctcattatggattgagtccagcccagctctaagagaagtgcttatgaagccccctaccctgtcccattccagaaaccataagactcaggcagttcttgattctggaggcctgcctggtaagataagatagtataatttggaactgagaacataccagaaacagcagaacgagggccagagcagaaaaatgaaaataagtggagacacttatggatacattggtgcaaaaaaagccacggagcccatactgggcttgatatgactttgaggggacagcagattaatacttaatgagggttaaacctgaccagtctttctacagtgacaggccacactgcatgaatggggagaaccaatgaatccattgtcctctgcctattttcctgtgcacagtcacattccctccttaggaatcttccccttccaccctttacattaaacaagggaacactgaatctttcaagggaattacacgtttgggttaatgtttcagtatatcattttcatactgtaaattattttgtaagagagatttactgctatcccaggatgttcggacttggtgcccctgtgcatttggaaatcaataaactattactggaaatgc

SEQ ID NO: 303410 - DNA, 3517 bp, Homo sapiens
cgggtgatctagaggatcccgtgtgtacgagataagcagggatgtactaggggaatgtaaaactgcaaacttaaaaacctgcatcttcttgaagcatcagttttacttaccaaatggtttagagtcataagatgacctatttttatataaaagttatattatagaataaaatgttcatacgcatagactgttaagataaaaaaataggaatcttgcaaggtaattcttatttgcaagtgggttatgtgttcactctcctctacctttatggtattttggtgttcacttacgaagcatacaactagaaccatatccaagcagactctgggttgctgttaacccagggcctagacttctagtgcctctgaggcagaaccaaaggagcctgcactgggggaaatcccttttcctgcctgcctgtctgcctgtgacctgtgtacgtattacaggctttaggaccagctgattgttatgcttgcaggatggttttgaaacagaaacaatacttgtttactgtaggaatcctatttatattatttttcagtcctgtgaatgctgtgaaaagatttattcctttgaggccaggaagctcccaggcatatatgcttctaggttaggattgtcctgactcactaaagatgccaggatattggggctgaggggagtttgaggtgttaaaaaaaaaaaaaaagcatttttctctcaaactgatggccaagaaatggctaggacaattttggtgctttacctatctctgcaaagactggagaatttggcataccattaattacaaccaccaatcatatccaacaaaagtaccctaaaagaaggaccagtggccactctcgaaaaaatttaagtatcagaagattaaaaagattttaggatttggaagcttgtattgtctttccccaataatcattgtttgatctccaaatagtagccttatattagcaatagacagatcattggttctccatatctgatcatatgttactactttgaatcagtatttgggaaattcaagcatttatgcagtggatataaatggaaatataaaaatatttgccaacctgtctcagtaacttatcatatctctgtgatcctcaaggaaagcacttttgcttttacttagaaagcgtttcagatttgctttatagactcctgctgtcttcagtacctgataaaactttaaccagggaagcattaaacacagtgcagcagcttttgcccaggcttctaagttcctgccggcagcatttatcaatgtaagaactaggatgcttcctgcagtggcactaccttcccctagagctggagcatgctgcttggccttaagccccagcatgatgaggcttccctcctgccaggtcagtaaaagttagagagctcagaattgggtcttgcctgggtgcaggtggcagggtttgctgaaacccctaaagagaagtcaccaagggaggcaggtaatgaatgtttccagaatcagtcggatactcatagcaatttctggctatctttcaaatgttgaatttctggatgctgagagggactttgatttgatatcattaaatccaggacagtcccaagaagtgcttggagtctcggctctgacagcccaagaagggaaataacttgtattaaggaacaactatgagccaggccctgagctgtctcttagataataaaacagatggggagtggaagagtcatttgcttcaagttatacagctaggaaatactcaagccaaatcttgaacgcagctccccctaattctgtggacaggcactttgtaccacacaccatggtccacctaaaaacagaaggataaaaagacttcaggttttcccactgtgtgctgaccatcccaatttatgaatcttcttcaaaatgacatttcacagttatagttagggctcagaaatggcattgaggtagccttatttctcccctttagcagatgctttaagtacacattgctgacttgagcccacccccaggagttaggagaacatttcctttttcatgccatcttccataaataaggtgtttcttggccttcaaagatatagaactttgcagcagtagtaaaagtgaagggtgttctgctctctactcaactttatttgaaaatgtctgcagcttcactcctgtagaaaaggaaatcttcatattttagtaaacttagccgccagtgtactctgtgaggatgtggcaattcaaagtccagtgaatctggactctcttactgattcctggttttagtgtgtgtgtcgggggagtgtgtacctatatataaaggacaagtgtgatatgtgtgtatatgtatatacatacatacatgtccacacacacacacacaatatttgagagctaaggaaaactcaaagcagccccttcattatcttgcgtactacttcaaagatttctgtcagccctaattacaagtgtcaccatatagttggggcttaggtacttgcttacaggaagagcaattccctagcaaaggtcattagctcctaaggcactgagtcaaagtgacagccctgaaggaaattgcactccagccctcctccaggatgtctaataagatgggaaacttggatgcccagccattttggtgacctgagagtctaactactccagttagacctaagggcacaaatgcagaattcatgaccttgtagttgtggcagggtctaggaagtcctctctccccaagtagaaaatattctcttgccattcctgaaattccacattcatataatggctgtgcaatacatgcttctcaataagaaaattaactgcatgtttactgtgtgctgatcacatcagatttttatgtttaaaaaaatctcattatggattgagtccagcccagctctaagagaaaaagaaggcccatatgggagacttcagtctcattattattgcctttatccagcagtgcttatgaagccccctaccctgtcccattccagaaaccataagactcaggcagttcttgattctggaggcctgcctggtaagataagatagtataatttggaactgagaacataccagaaacagcagaacgagggccagagcagaaaaatgaaaataagtggagacacttatggatacattggtgcaaaaaaagccacggagcccatactgggcttgatatgactttgaggggacagcagattaatacttaatgagggttaaacctgaccagtctttctacagtgacaggccacactgcatgaatggggagaaccaatgaatccattgtcctctgcctattttcctgtgcacagtcacattccctccttaggaatcttccccttccaccctttacattaaacaagggaacactgaatctttcaagggaattacacgtttgggttaatgtttcagtatatcattttcatactgtaaattattttgtaagagagatttactgctatcccaggatgttcggacttggtgcccctgtgcatttggaaatcaataaactattactggaaatgc

SEQ ID NO: 303411 - DNA, 4636 bp, Homo sapiens
  misc_feature (37)..(37): n is a, c, g, or t
cggacggcgtgggcaacttgatacctctaatgaatcngctgagccaaaggcagagggcgatgaggaaggacccagtggtgccagtgaagaagaggacacatgaaggcttgctacccccagtggaaaatcatcccctccccttgtgtgtatgtgacagcgtgtatgtaacggcttctgatttctgtgaaagctgctcagcaacaaacgtacttccaccagatgtgtccccagatccacagcaggcacatatctctccaagggatgaccagttttatgcttactgtgtgcttctcatcccctggttgtggtaggtcaaggaaaagagcccctttgatccaccaggagcaattaagaaaggtccttcaggtaatccctcaatggctgctttgaacttactcaggaaagccagcccccataatattgtattaccaaacagtatcgctttgttaggaaggatctggaataatcttgaagggaagtcagagttttctccctgcctattaacaaaaacccaattttgttcatattgaagcatgaaataaatgagagcaaggtagggccaaattaactcttgtggacagtccctaaaagtccagttctacatttgtgaaaattgtggtgccatgaattaagatggatgactggaaaaaggtgttggagaaagagttaaagatgaggaagagatatttttagtatatgaagttatccaggacttgatattcataattcagtgctgtggaaatgaaaaaaatgattgaagaggtggaacggaaatgaccttagggggaaaaaaaaggaccaaagaagtctgattaaaagttgaaatcagtatttctgaattcaaattgcttgaatttccaaaatagtcagtaaaggatctaatagaaccagaattatttgggtgaattctgcaggttttatgggcttgtcacaacgtgaaggggctggaatgtatattaccaaatgggaatttccattgtaggtttttgctagtcccacccccattttagcctaatttggcttaaacgcagtatggggagaattgttcccattccatgtgttctgaattcagctcatctcccagcatatagatatatcctcctttaactccgaccagaacccttcttcctgtggcactccccacccatagaccttcagatcatctcccacagcctggatctcactctcctcttagtaacagagacactcctgaggttggacttccttgcttttctctacttccaaatcacaatttcttacaaccaagctttgtgctcccgagtaagcagggatgtactaggggaatgtaaaactgcaaacttaaaaacctgcatcttcttgaagcatcagttttacttaccaaatggtttagagtcataagatgacctatttttatataaaagttatattatagaataaaatgttcatacgcatagactgttaagataaaaaaataggaatcttgcaaggtaattcttatttgcaagtgggttatgtgttcactctcctctacctttatggtattttggtgttcacttacgaagcatacaactagaaccatatccaagcagactctgggttgctgttaacccagggcctagacttctagtgcctctgaggcagaaccaaaggagcctgcactgggggaaatcccttttcctgcctgcctgtctgcctgtgacctgtgtacgtattacaggctttaggaccagctgattgttatgcttgcaggatggttttgaaacagaaacaatacttgtttactgtaggaatcctatttatattatttttcagtcctgtgaatgctgtgaaaagatttattcctttgaggccaggaagctcccaggcatatatgcttctaggttaggattgtcctgactcactaaagatgccaggatattggggctgaggggagtttgaggtgttaaaaaaaaaaaaaaagcatttttctctcaaactgatggccaagaaatggctaggacaattttggtgctttacctatctctgcaaagactggagaatttggcataccattaattacaaccaccaatcatatccaacaaaagtaccctaaaagaaggaccagtggccactctcgaaaaaatttaagtatcagaagattaaaaagattttaggatttggaagcttgtattgtctttccccaataatcattgtttgatctccaaatagtagccttatattagcaatagacagatcattggttctccatatctgatcatatgttactactttgaatcagtatttgggaaattcaagcatttatgcagtggatataaatggaaatataaaaatatttgccaacctgtctcagtaacttatcatatctctgtgatcctcaaggaaagcacttttgcttttacttagaaagcgtttcagatttgctttatagactcctgctgtcttcagtacctgataaaactttaaccagggaagcattaaacacagtgcagcagcttttgcccaggcttctaagttcctgccggcagcatttatcaatgtaagaactaggatgcttcctgcagtggcactaccttcccctagagctggagcatgctgcttggccttaagccccagcatgatgaggcttccctcctgccaggtcagtaaaagttagagagctcagaattgggtcttgcctgggtgcaggtggcagggtttgctgaaacccctaaagagaagtcaccaagggaggcaggtaatgaatgtttccagaatcagtcggatactcatagcaatttctggctatctttcaaatgttgaatttctggatgctgagagggactttgatttgatatcattaaatccaggacagtcccaagaagtgcttggagtctcggctctgacagcccaagaagggaaataacttgtattaaggaacaactatgagccaggccctgagctgtctcttagataataaaacagatggggagtggaagagtcatttgcttcaagttatacagctaggaaatactcaagccaaatcttgaacgcagctccccctaattctgtggacaggcactttgtaccacacaccatggtccacctaaaaacagaaggataaaaagacttcaggttttcccactgtgtgctgaccatcccaatttatgaatcttcttcaaaatgacatttcacagttatagttagggctcagaaatggcattgaggtagccttatttctcccctttagcagatgctttaagtacacattgctgacttgagcccacccccaggagttaggagaacatttcctttttcatgccatcttccataaataaggtgtttcttggccttcaaagatatagaactttgcagcagtagtaaaagtgaagggtgttctgctctctactcaactttatttgaaaatgtctgcagcttcactcctgtagaaaaggaaatcttcatattttagtaaacttagccgccagtgtactctgtgaggatgtggcaattcaaagtccagtgaatctggactctcttactgattcctggttttagtgtgtgtgtcgggggagtgtgtacctatatataaaggacaagtgtgatatgtgtgtatatgtatatacatacatacatgtccacacacacacacacaatatttgagagctaaggaaaactcaaagcagccccttcattatcttgcgtactacttcaaagatttctgtcagcccctcctccaggatgtctaataagatgggaaacttggatgcccagccattttggtgacctgagagtctaactactccagttagacctaagggcacaaatgcagaattcatgaccttgtagttgtggcagggtctaggaagtcctctctccccaagtagaaaatattctcttgccattcctgaaattccacattcatataatggctgtgcaatacatgcttctcaataagaaaattaactgcatgtttactgtgtgctgatcacatcagatttttatgtttaaaaaaatctcattatggattgagtccagcccagctctaagagaaaaagaaggcccatatgggagacttcagtctcattattattgcctttatccagcagtgcttatgaagccccctaccctgtcccattccagaaaccataagactcaggcagttcttgattctggaggcctgcctggtaagataagatagtataatttggaactgagaacataccagaaacagcagaacgagggccagagcagaaaaatgaaaataagtggagacacttatggatacattggtgcaaaaaaagccacggagcccatactgggcttgatatgactttgaggggacagcagattaatacttaatgagggttaaacctgaccagtctttctacagtgacaggccacactgcatgaatggggagaaccaatgaatccattgtcctctgcctattttcctgtgcacagtcacattccctccttaggaatcttccccttccaccctttacattaaacaagggaacactgaatctttcaagggaattacacgtttgggttaatgtttcagtatatcattttcatactgtaaattattttgtaagagagatttactgctatcccaggatgttcggacttggtgcccctgtgcatttggaaatcaataaactattactggaaatgc

SEQ ID NO: 303412 - DNA, 2121 bp, Homo sapiens
  misc_feature (37)..(37): n is a, c, g, or t
cggacggcgtgggcaacttgatacctctaatgaatcngctgagccaaaggcagagggcgatgaggaaggacccagtggtgccagtgaagaagaggacacatgaaggcttgctacccccagtggaaaatcatcccctccccttgtgtgtatgtgacagcgtgtatgtaacggcttctgatttctgtgaaagctgctcagcaacaaacgtacttccaccagatgtgtccccagatccacagcaggcacatatctctccaagggatgaccagttttatgcttactgtgtgcttctcatcccctggttgtggtaggtcaaggaaaagagcccctttgatccaccaggagcaattaagaaaggtccttcaggtaatccctcaatggctgctttgaacttactcaggaaagccagcccccataatattgtattaccaaacagtatcgctttgttaggaaggatctggaataatcttgaagggaagtcagagttttctccctgcctattaacaaaaacccaattttgttcatattgaagcatgaaataaatgagagcaaggtagggccaaattaactcttgtggacagtccctaaaagtccagttctacatttgtgaaaattgtggtgccatgaattaagatggatgactggaaaaaggtgttggagaaagagttaaagatgaggaagagatatttttagtatatgaagttatccaggacttgatattcataattcagtgctgtggaaatgaaaaaaatgattgaagaggtggaacggaaatgaccttagggggaaaaaaaaggaccaaagaagtctgattaaaagttgaaatcagtatttctgaattcaaattgcttgaatttccaaaatagtcagtaaaggatctaatagaaccagaattatttgggtgaattctgcaggttttatgggcttgtcacaacgtgaaggggctggaatgtatattaccaaatgggaatttccattgtaggtttttgctagtcccacccccattttagcctaatttggcttaaacgcagtatggggagaattgttcccattccatgtgttctgaattcagctcatctcccagcatatagatatatcctcctttaactccgaccagaacccttcttcctgtggcactccccacccatagaccttcagatcatctcccacagcctggatctcactctcctcttagtaacagagacactcctgaggttggacttccttgcttttctctacttccaaatcacaatttcttacaaccaagctttgtgctcccgagtaagcagggatgtactaggggaatgtaaaactgcaaacttaaaaacctgcatcttcttgaagcatcagttttacttaccaaatggtttagagtcataagatgacctatttttatataaaagttatattatagaataaaatgttcatacgcatagactgttaagataaaaaaataggaatcttgcaaggtaattcttatttgcaagtgggttatgtgttcactctcctctacctttatggtattttggtgttcacttacgaagcatacaactagaaccatatccaagcagactctgggttgctgttaacccagggcctagacttctagtgcctctgaggcagaaccaaaggagcctgcactgggggaaatcccttttcctgcctgcctgtctgcctgtgacctgtgtacgtattacaggctttaggaccagctgattgttatgcttgcaggatggttttgaaacagaaacaatacttgtttactgtaggaatcctatttatattatttttcagtcctgtgaatgctgtgaaaagatttattcctttgaggccaggaagctcccaggcatatatgcttctaggttaggattgtcctgactcactaaagatgccaggatattggggctgaggggagtttgaggtgttaaaaaaaaaaaaaaaccggggggcccctaatgcgggggcgcgcgaaaacacggcgtaacggaaaggggcccaggggccaaaggcggtacctggacccaagtttttctgggtacaaggtgcgacaactcgcgcgcgtcccccataaggggaggcggatataaatccagataaggccagggtaaaccggataatgga

SEQ ID NO: 303413 - DNA, 228 bp, Homo sapiens
catttgtctctcagagttgtgcacaaaggaccctgcaaggtgtaaatatttatgacgagctgcatacttgactgtggtaatgctggagatgatggtgttttggttactagatgtgggagtctaatttactcctgacttttccacagtgccttaggagagagctctgggaagtggcaaaagaacagacttaagatcattattatttagtgataagttttctcctcaaag

SEQ ID NO: 303414 - DNA, 324 bp, Homo sapiens
tgtataccaggtactgtgcattttatatgtattctcttatttaatcctctagtaactcaagaaagtaagttttatcatcattccccctatggccagataaagaaatcagaatttagagaaacgaagtaacttgcctttggccatattgctcaatcatggtagttaagacttaattccaggtatgtctgacataaagtctgtgctatcaaccagtagactaggctgcctcccttcttgtgatatcttaactcacctggttctccttttcctttgtagtggtgccagtgaagaagaggacacatgaaggcttgctacccccagtgg

SEQ ID NO: 303415 - DNA, 4820 bp, Homo sapiens
  misc_feature (37)..(37): n is a, c, g, or t
cggacggcgtgggcaacttgatacctctaatgaatcngctgagccaaaggcagagggcgatgaggaaggacccagtggtgccagtgaagaagaggacacatgaaggcttgctacccccagtggaaaatcatcccctccccttgtgtgtatgtgacagcgtgtatgtaacggcttctgatttctgtgaaagctgctcagcaacaaacgtacttccaccagatgtgtccccagatccacagcaggcacatatctctccaagggatgaccagttttatgcttactgtgtgcttctcatcccctggttgtggtaggtcaaggaaaagagcccctttgatccaccaggagcaattaagaaaggtccttcaggtaatccctcaatggctgctttgaacttactcaggaaagccagcccccataatattgtattaccaaacagtatcgctttgttaggaaggatctggaataatcttgaagggaagtcagagttttctccctgcctattaacaaaaacccaattttgttcatattgaagcatgaaataaatgagagcaaggtagggccaaattaactcttgtggacagtccctaaaagtccagttctacatttgtgaaaattgtggtgccatgaattaagatggatgactggaaaaaggtgttggagaaagagttaaagatgaggaagagatatttttagtatatgaagttatccaggacttgatattcataattcagtgctgtggaaatgaaaaaaatgattgaagaggtggaacggaaatgaccttagggggaaaaaaaaggaccaaagaagtctgattaaaagttgaaatcagtatttctgaattcaaattgcttgaatttccaaaatagtcagtaaaggatctaatagaaccagaattatttgggtgaattctgcaggttttatgggcttgtcacaacgtgaaggggctggaatgtatattaccaaatgggaatttccattgtaggtttttgctagtcccacccccattttagcctaatttggcttaaacgcagtatggggagaattgttcccattccatgtgttctgaattcagctcatctcccagcatatagatatatcctcctttaactccgaccagaacccttcttcctgtggcactccccacccatagaccttcagatcatctcccacagcctggatctcactctcctcttagtaacagagacactcctgaggttggacttccttgcttttctctacttccaaatcacaatttcttacaaccaagctttgtgctcccgagtaagcagggatgtactaggggaatgtaaaactgcaaacttaaaaacctgcatcttcttgaagcatcagttttacttaccaaatggtttagagtcataagatgacctatttttatataaaagttatattatagaataaaatgttcatacgcatagactgttaagataaaaaaataggaatcttgcaaggtaattcttatttgcaagtgggttatgtgttcactctcctctacctttatggtattttggtgttcacttacgaagcatacaactagaaccatatccaagcagactctgggttgctgttaacccagggcctagacttctagtgcctctgaggcagaaccaaaggagcctgcactgggggaaatcccttttcctgcctgcctgtctgcctgtgacctgtgtacgtattacaggctttaggaccagctgattgttatgcttgcaggatggttttgaaacagaaacaatacttgtttactgtaggaatcctatttatattatttttcagtcctgtgaatgctgtgaaaagatttattcctttgaggccaggaagctcccaggcatatatgcttctaggttaggattgtcctgactcactaaagatgccaggatattggggctgaggggagtttgaggtgttaaaaaaaaaaaaaaagcatttttctctcaaactgatggccaagaaatggctaggacaattttggtgctttacctatctctgcaaagactggagaatttggcataccattaattacaaccaccaatcatatccaacaaaagtaccctaaaagaaggaccagtggccactctcgaaaaaatttaagtatcagaagattaaaaagattttaggatttggaagcttgtattgtctttccccaataatcattgtttgatctccaaatagtagccttatattagcaatagacagatcattggttctccatatctgatcatatgttactactttgaatcagtatttgggaaattcaagcatttatgcagtggatataaatggaaatataaaaatatttgccaacctgtctcagtaacttatcatatctctgtgatcctcaaggaaagcacttttgcttttacttagaaagcgtttcagatttgctttatagactcctgctgtcttcagtacctgataaaactttaaccagggaagcattaaacacagtgcagcagcttttgcccaggcttctaagttcctgccggcagcatttatcaatgtaagaactaggatgcttcctgcagtggcactaccttcccctagagctggagcatgctgcttggccttaagccccagcatgatgaggcttccctcctgccaggtcagtaaaagttagagagctcagaattgggtcttgcctgggtgcaggtggcagggtttgctgaaacccctaaagagaagtcaccaagggaggcaggtaatgaatgtttccagaatcagtcggatactcatagcaatttctggctatctttcaaatgttgaatttctggatgctgagagggactttgatttgatatcattaaatccaggacagtcccaagaagtgcttggagtctcggctctgacagcccaagaagggaaataacttgtattaaggaacaactatgagccaggccctgagctgtctcttagataataaaacagatggggagtggaagagtcatttgcttcaagttatacagctaggaaatactcaagccaaatcttgaacgcagctccccctaattctgtggacaggcactttgtaccacacaccatggtccacctaaaaacagaaggataaaaagacttcaggttttcccactgtgtgctgaccatcccaatttatgaatcttcttcaaaatgacatttcacagttatagttagggctcagaaatggcattgaggtagccttatttctcccctttagcagatgctttaagtacacattgctgacttgagcccacccccaggagttaggagaacatttcctttttcatgccatcttccataaataaggtgtttcttggccttcaaagatatagaactttgcagcagtagtaaaagtgaagggtgttctgctctctactcaactttatttgaaaatgtctgcagcttcactcctgtagaaaaggaaatcttcatattttagtaaacttagccgccagtgtactctgtgaggatgtggcaattcaaagtccagtgaatctggactctcttactgattcctggttttagtgtgtgtgtcgggggagtgtgtacctatatataaaggacaagtgtgatatgtgtgtatatgtatatacatacatacatgtccacacacacacacacaatatttgagagctaaggaaaactcaaagcagccccttcattatcttgcgtactacttcaaagatttctgtcagccctaattacaagtgtcaccatatagttggggcttaggtacttgcttacaggaagagcaattccctagcaaaggtcattagctcctaaggcactgagtcaaagtgacagccctgaaggaaattgcactccagccctcctccaggatgtctaataagatgggaaacttggatgcccagccattttggtgacctgagagtctaactactccagttagacctaagggcacaaatgcagaattcatgaccttgtagttgtggcagggtctaggaagtcctctctccccaagtagaaaatattctcttgccattcctgaaattccacattcatataatggctgtgcaatacatgcttctcaataagaaaattaactgcatgtttactgtgtgctgatcacatcagatttttatgtttaaaaaaatctcattatggattgagtccagcccagctctaagagaaaaagaaggcccatatgggagacttcagtctcattattattgcctttatccagcagtgcttatgaagccccctaccctgtcccattccagaaaccataagactcaggcagttcttgattctggaggcctgcctggtaagataagatagtataatttggaactgagaacataccagaaacagcagaacgagggccagagcagaaaaatgaaaataagtggagacacttatggatacattggtgcaaaaaaagccacggagcccatactgggcttgatatgactttgaggggacagcagattaatacttaatgagggttaaacctgaccagtctttctacagtgacaggccacactgcatgaatggggagaaccaatgaatccattgtcctctgcctattttcctgtgcacagtcacattccctccttaggaatcttccccttccaccctttacattaaacaagggaacactgaatctttcaagggaattacacgtttgggttaatgtttcagtatatcattttcatactgtaaattattttgtaagagagatttactgctatcccaggatgttcggacttggtgcccctgtgcatttggaaatcaataaactattactggaaatgcaaaaaaaaagggggggaaaaaaacccaagggcaagatacgaccatctggaaag

SEQ ID NO: 303416 - DNA, 4396 bp, Homo sapiens
  misc_feature (37)..(37): n is a, c, g, or t
cggacggcgtgggcaacttgatacctctaatgaatcngctgagccaaaggcagagggcgatgaggaaggacccagtggtgccagtgaagaagaggacacatgaaggcttgctacccccagtggaaaatcatcccctccccttgtgtgtatgtgacagcgtgtatgtaacggcttctgatttctgtgaaagctgctcagcaacaaacgtacttccaccagatgtgtccccagatccacagcaggcacatatctctccaagggatgaccagttttatgcttactgtgtgcttctcatcccctggttgtggtaggtcaaggaaaagagcccctttgatccaccaggagcaattaagaaaggtccttcaggtaatccctcaatggctgctttgaacttactcaggaaagccagcccccataatattgtattaccaaacagtatcgctttgttaggaaggatctggaataatcttgaagggaagtcagagttttctccctgcctattaacaaaaacccaattttgttcatattgaagcatgaaataaatgagagcaaggtagggccaaattaactcttgtggacagtccctaaaagtccagttctacatttgtgaaaattgtggtgccatgaattaagatggatgactggaaaaaggtgttggagaaagagttaaagatgaggaagagatatttttagtatatgaagttatccaggacttgatattcataattcagtgctgtggaaatgaaaaaaatgattgaagaggtggaacggaaatgaccttagggggaaaaaaaaggaccaaagaagtctgattaaaagttgaaatcagtatttctgaattcaaattgcttgaatttccaaaatagtcagtaaaggatctaatagaaccagaattatttgggtgaattctgcaggttttatgggcttgtcacaacgtgaaggggctggaatgtatattaccaaatgggaatttccattgtaggtttttgctagtcccacccccattttagcctaatttggcttaaacgcagtatggggagaattgttcccattccatgtgttctgaattcagctcatctcccagcatatagatatatcctcctttaactccgaccagaacccttcttcctgtggcactccccacccatagaccttcagatcatctcccacagcctggatctcactctcctcttagtaacagagacactcctgaggttggacttccttgcttttctctacttccaaatcacaatttcttacaaccaagctttgtgctcccgagtaagcagggatgtactaggggaatgtaaaactgcaaacttaaaaacctgcatcttcttgaagcatcagttttacttaccaaatggtttagagtcataagatgacctatttttatataaaagttatattatagaataaaatgttcatacgcatagactgttaagataaaaaaataggaatcttgcaaggtaattcttatttgcaagtgggttatgtgttcactctcctctacctttatggtattttggtgttcacttacgaagcatacaactagaaccatatccaagcagactctgggttgctgttaacccagggcctagacttctagtgcctctgaggcagaaccaaaggagcctgcactgggggaaatcccttttcctgcctgcctgtctgcctgtgacctgtgtacgtattacaggctttaggaccagctgattgttatgcttgcaggatggttttgaaacagaaacaatacttgtttactgtaggaatcctatttatattatttttcagtcctgtgaatgctgtgaaaagatttattcctttgaggccaggaagctcccaggcatatatgcttctaggttaggattgtcctgactcactaaagatgccaggatattggggctgaggggagtttgaggtgttaaaaaaaaaaaaaaagcatttttctctcaaactgatggccaagaaatggctaggacaattttggtgctttacctatctctgcaaagactggagaatttggcataccattaattacaaccaccaatcatatccaacaaaagtaccctaaaagaaggaccagtggccactctcgaaaaaatttaagtatcagaagattaaaaagattttaggatttggaagcttgtattgtctttccccaataatcattgtttgatctccaaatagtagccttatattagcaatagacagatcattggttctccatatctgatcatatgttactactttgaatcagtatttgggaaattcaagcatttatgcagtggatataaatggaaatataaaaatatttgccaacctgtctcagtaacttatcatatctctgtgatcctcaaggaaagcacttttgcttttacttagaaagcgtttcagatttgctttatagactcctgctgtcttcagtacctgataaaactttaaccagggaagcattaaacacagtgcagcagcttttgcccaggcttctaagttcctgccggcagcatttatcaatgtaagaactaggatgcttcctgcagtggcactaccttcccctagagctggagcatgctgcttggccttaagccccagcatgatgaggcttccctcctgccaggtcagtaaaagttagagagctcagaattgggtcttgcctgggtgcaggtggcagggtttgctgaaacccctaaagagaagtcaccaagggaggcaggtaatgaatgtttccagaatcagtcggatactcatagcaatttctggctatctttcaaatgttgaatttctggatgctgagagggactttgatttgatatcattaaatccaggacagtcccaagaagtgcttggagtctcggctctgacagcccaagaagggaaataacttgtattaaggaacaactatgagccaggccctgagctgtctcttagataataaaacagatggggagtggaagagtcatttgcttcaagttatacagctaggaaatactcaagccaaatcttgaacgcagctccccctaattctgtggacaggcactttgtaccacacaccatggtccacctaaaaacagaaggataaaaagacttcaggttttcccactgtgtgctgaccatcccaatttatgaatcttcttcaaaatgacatttcacagttatagttagggctcagaaatggcattgaggtagccttatttctcccctttagcagatgctttaagtacacattgctgacttgagcccacccccaggagttaggagaacatttcctttttcatgccatcttccataaataaggtgtttcttggccttcaaagatatagaactttgcagcagtagtaaaagtgaagggtgttctgctctctactcaactttatttgaaaatgtctgcagcttcactcctgtagaaaaggaaatcttcatattttagtaaacttagccgccagtgtactctgtgaggatgtggcaattcaaagtccagtgaatctggactctcttactgattcctggttttagtgtgtgtgtcgggggagtgtgtacctatatataaaggacaagtgtgatatgtgtgtatatgtatatacatacatacatgtccacacacacacacacaatatttgagagctaaggaaaactcaaagcagccccttcattatcttgcgtactacttcaaagatttctgtcagccctaattacaagtgtcaccatatagttggggcttaggtacttgcttacaggaagagcaattccctagcaaaggtcattagctcctaaggcactgagtcaaagtgacagccctgaaggaaattgcactccagccctcctccaggatgtctaataagatgggaaacttggatgcccagccattttggtgacctgagagtctaactactccagttagacctaagggcacaaatgcagaattcatgaccttgtagttgtggcagggtctaggaagtcctctctccccaagtagaaaatattctcttgccattcctgaaattccacattcatataatggctgtgcaatacatgcttctcaataagaaaattaactgcatgtttactgtgtgctgatcacatcagatttttatgtttaaaaaaatctcattatggattgagtccagcccagctctaagagaaaaagaaggcccatatgggagacttcagtctcattattattgcctttatccagcagtgcttatgaagccccctaccctgtcccattccagaaaccataagactcaggcagttcttgattctggaggcctgcctggtaagataagatagtataatttggaactgagaacataccagaaacagccacagccattaggtacaggcatttaggtaacagccatttaggtaacagccatttaggtaacagccatttagg

SEQ ID NO: 303417 - DNA, 2018 bp, Homo sapiens
tgcagggcggtaactgggggccagggtggcgccagggctggacagcacagtccctctgagctgcacggagacctcgcaggccccgagaactgtcgcccttccacgatgtggctccgtgctcttgtcctggccactctctctgcttccgcggcttgggcagggcatccgtcctcgccacctgtggtggacaccgtgcatggcaaagtgctggggaagttcgtcagcttagaaggatttgcacagcctgtggccattttcctgggaatcccttttgccaagccgcctcttggacccctgaggtttactccaccgcagcctgcagaaccatggagctttgtgaagaatgccacctcgtaccctcctatgtgcacccaagatcccaaggcggggcagttactctcagagctatttacaaaccgaaaggagaacattcctctcaagctttctgaagactgtctttacctcaatatttacactcctgctgacttgaccaagaaaaacaggctgccggtgatggtgtggatccacggaggggggctgatggtgggtgcggcatcaacctatgatgggctggcccttgctgcccatgaaaacgtggtggtggtgaccattcaatatcgcctgggcatctggggattcttcagcacaggggatgaacacagccgggggaactggggtcacctggaccaggtggctgccctgcgctgggtccaggacaacattgccagctttggagggaacccaggctctgtgaccatctttggagagtcagcgggaggagaaagtgtctctgttcttgttttgtctccattggccaagaacctcttccaccgggccatttctgagagtggcgtggccctcacttctgttctggtgaagaaaggtgatgtcaagcccttggctgagcaaattgctatcactgctgggtgcaaaaccaccacctctgctgtcatggttcactgcctgcgacagaagacggaagaggagctcttggagacgacattgaaaatgaaattcttatctctggacttacagggagaccccagagagagtcaaccccttctgggcactgtgattgatgggatgctgctgctgaaaacacctgaagagcttcaagctgaaaggaatttccacactgtcccctacatggtcggaattaacaagcaggagtttggctggttgattccaatgcagttgatgagctatccactctccgaagggcaactggaccagaagacagccatgtcactcctgtggaagtcctatccccttgtttgcattgctaaggaactgattccagaagccactgagaaatacttaggaggaacagacgacactgtcaaaaagaaagacctgttcctggacttgatagcagatgtgatgtttggtgtcccatctgtgattgtggcccggaaccacagagatgctggagcacccacctacatgtatgagtttcagtaccgtccaagcttctcatcagacatgaaacccaagacggtgataggagaccacggggatgagctcttctccgtctttggggccccatttttaaaagagggtgcctcagaagaggagatcagacttagcaagatggtgatgaaattctgggccaactttgctcgcaatggaaaccccaatggggaagggctgccccactggccagagtacaaccagaaggaagggtatctgcagattggtgccaacacccaggcggcccagaagctgaaggacaaagaagtagctttctggaccaacctctttgccaagaaggcagtggagaagccaccccagacagaacacatagagctgtgaatgaagatccagccggccttgggagcctggaggagcaaagactggggtcttttgcgaaagggattgcaggttcagaaggcatcttaccatggctggggaattgtctggtggtggggggcaggggacagaggccatgaaggagcaagttttgtatttgtgacctcagctttgggaataaaggatcttttgaaggccaaaaaaaaaaa

SEQ ID NO: 303418 - DNA, 1980 bp, Homo sapiens
tctttcttcatccccgcattcccaatatacccaggccacaagagccgagaactgtcgcccttccacgatgtggctccgtgctcttgtcctggccactctctctgcttccgcggcttgggcagggcatccgtcctcgccacctgtggtggacaccgtgcatggcaaagtgctggggaagttcgtcagcttagaaggatttgcacagcctgtggccattttcctgggaatcccttttgccaagccgcctcttggacccctgaggtttactccaccgcagcctgcagaaccatggagctttgtgaagaatgccacctcgtaccctcctatgtgcacccaagatcccaaggcggggcagttactctcagagctatttacaaaccgaaaggagaacattcctctcaagctttctgaagactgtctttacctcaatatttacactcctgctgacttgaccaagaaaaacaggctgccggtgatggtgtggatccacggaggggggctgatggtgggtgcggcatcaacctatgatgggctggcccttgctgcccatgaaaacgtggtggtggtgaccattcaatatcgcctgggcatctggggattcttcagcacaggggatgaacacagccgggggaactggggtcacctggaccaggtggctgccctgcgctgggtccaggacaacattgccagctttggagggaacccaggctctgtgaccatctttggagagtcagcgggaggagaaagtgtctctgttcttgttttgtctccattggccaagaacctcttccaccgggccatttctgagagtggcgtggccctcacttctgttctggtgaagaaaggtgatgtcaagcccttggctgagcaaattgctatcactgctgggtgcaaaaccaccacctctgctgtcatggttcactgcctgcgacagaagacggaagaggagctcttggagacgacattgaaaatgaaattcttatctctggacttacagggagaccccagagagagtcaaccccttctgggcactgtgattgatgggatgctgctgctgaaaacacctgaagagcttcaagctgaaaggaatttccacactgtcccctacatggtcggaattaacaagcaggagtttggctggttgattccaatgcagttgatgagctatccactctccgaagggcaactggaccagaagacagccatgtcactcctgtggaagtcctatccccttgtttgcattgctaaggaactgattccagaagccactgagaaatacttaggaggaacagacgacactgtcaaaaagaaagacctgttcctggacttgatagcagatgtgatgtttggtgtcccatctgtgattgtggcccggaaccacagagatgctggagcacccacctacatgtatgagtttcagtaccgtccaagcttctcatcagacatgaaacccaagacggtgataggagaccacggggatgagctcttctccgtctttggggccccatttttaaaagagggtgcctcagaagaggagatcagacttagcaagatggtgatgaaattctgggccaactttgctcgcaatggaaaccccaatggggaagggctgccccactggccagagtacaaccagaaggaagggtatctgcagattggtgccaacacccaggcggcccagaagctgaaggacaaagaagtagctttctggaccaacctctttgccaagaaggcagtggagaagccaccccagacagaacacatagagctgtgaatgaagatccagccggccttgggagcctggaggagcaaagactggggtcttttgcgaaagggattgcaggttcagaaggcatcttaccatggctggggaattgtctggtggtggggggcaggggacagaggccatgaaggagcaagttttgtatttgtgacctcagctttgggaataaaggatcttttgaaggccaaaaaaaaaaa

SEQ ID NO: 303419 - DNA, 2309 bp, Homo sapiens
tgcagggcggtaactgggggccagggtggcgccagggctggacagcacagtccctctgagctgcacggagacctcgcaggccccgagaactgtcgcccttccacgatgtggctccgtgctcttgtcctggccactctctctgcttccgcggcttgggcagggcatccgtcctcgccacctgtggtggacaccgtgcatggcaaagtgctggggaagttcgtcagcttagaaggatttgcacagcctgtggccattttcctgggaatcccttttgccaagccgcctcttggacccctgaggtttactccaccgcagcctgcagaaccatggagctttgtgaagaatgccacctcgtaccctcctatgtgcacccaagatcccaaggcggggcagttactctcagagctatttacaaaccgaaaggagaacattcctctcaagctttctgaagactgtctttacctcaatatttacactcctgctgacttgaccaagaaaaacaggctgccggtgatggtgtggatccacggaggggggctgatggtgggtgcggcatcaacctatgatgggctggcccttgctgcccatgaaaacgtggtggtggtgaccattcaatatcgcctgggcatctggggattcttcagcacaggggatgaacacagccgggggaactggggtcacctggaccaggtggctgccctgcgctgggtccaggacaacattgccagctttggagggaacccaggctctgtgaccatctttggagagtcagcgggaggagaaagtgtctctgttcttgttttgtctccattggccaagaacctcttccaccgggccatttctgagagtggcgtggccctcacttctgttctggtgaagaaaggtgatgtcaagcccttggctgaggtaggtctccggctggtacgtctctggctggacacccacacctccttggctctatgctcctgaatcctcagggatctctcttgtggttggttgtagctaatgttctcctagaatcactgaggcaccaatggctgagcaggaagggcgaggagacaccttgatcagcgtcccagtttcacagccaggcaaaccgacacagggcttggaagggatttgccaagggcagcaggtgatccgggcagagctgggactccagctcatggccctagcagccagtacagtgccctgtctgtgaccacactccacctatgtgccagggcctggtgccatgttgggcagtgatggtgtcttgtgtctctcagggtctgagttctgtggacccacttgtgggctgtgggcctgaagcagttccacactgagcgcctgataaccagggttggttcctggagaattcactcattgattcatttgttcacacaacaaaactaggtgactaagtgaaggcaaaaacaagaaatgggcagacgtcatcctttggctcaaagccagatgtccgtgtggaggggacatagacactgcatgggccctatgtggctctgcattctagtcagacatctaacacctccccaagcttcttgctataatgtaggaatagatgaatagctacagaatcacacaactagaaagtgtcacctatgacaagagcagtgaaggtgaggtacttgctgccacagcagaatctaaagaaagcattgagtcctggggctggacgaggttaccagggaaggcttgcttggaaaagtgactaatgagtcaggagcaaggaacgtccagggagtgggagcagcacatgcgcgtgctgtggcaggaggacgcatcccaatcgggagggagagacagagacagagccgatggggccagagcaggcagaacaggcggagcacggcgagtactgacagaggggacgttgggaggggccaccctgcacaggaccctggcaaggattttgtcatcatctggagagtggttgaaagccaaaggaagaggtgatcgataggaatccagacctaggctgaggatcgcccactggagccagtggcatggaggatttcggtagatttgaaagcttgtttggggaaagcatccaaatttaaagggccggtacataggaggagagaaaatggggatgccaagaatttttagaatttttgagaattttttaagaattcattggttataagcaacagttgcccattgaccagacttaagtcaagaaggagcattagcctggtgtggtggctcatgcctgtaatccctgcaatttgggagaccaaatgagaaggattgcttgagcccaggagtttgagaccagccagggcaacaaagtgataccctgtctctac

SEQ ID NO: 303420 - DNA, 1987 bp, Homo sapiens
tgcagggcggtaactgggggccagggtggcgccagggctggacagcacagtccctctgagctgcacggagacctcgcaggccccgagaactgtcgcccttccacgatgtggctccgtgctcttgtcctggccactctctctgcttccgcggcttgggcagggcatccgtcctcgccacctgtggtggacaccgtgcatggcaaagtgctggggaagttcgtcagcttagaaggatttgcacagcctgtggccattttcctgggaatcccttttgccaagccgcctcttggacccctgaggtttactccaccgcagcctgcagaaccatggagctttgtgaagaatgccacctcgtaccctcctatgtgcacccaagatcccaaggcggggcagttactctcagagctatttacaaaccgaaaggagaacattcctctcaagctttctgaagactgtctttacctcaatatttacactcctgctgacttgaccaagaaaaacaggctgccggtgatggtgtggatccacggaggggggctgatggtgggtgcggcatcaacctatgatgggctggcccttgctgcccatgaaaacgtggtggtggtgaccattcaatatcgcctgggcatctggggattcttcagcacaggggatgaacacagccgggggaactggggtcacctggaccaggtggctgccctgcgctgggtccaggacaacattgccagctttggagggaacccaggctctgtgaccatctttggagagtcagcgggaggagaaagtgtctctgttcttgttttgtctccattggccaagaacctcttccaccgggccatttctgagagtggcgtggccctcacttctgttctggtgaagaaaggtgatgtcaagcccttggctgagcaaattgctatcactgctgggtgcaaaaccaccacctctgctgtcatggttcactgcctgcgacagaagacggaagaggagctcttggagacgacattgaaaatgaaattcttatctctggacttacagggagaccccagagagagtcaaccccttctgggcactgtgattgatgggatgctgctgctgaaaacacctgaagagcttcaagctgaaaggaatttccacactgtcccctacatggtcggaattaacaagcaggagtttggctggttgattccaatgcagttgatgagctatccactctccgaagggcaactggaccagaagacagccatgtcactcctgtggaagtcctatccccttgtttgcattgctaaggaactgattccagaagccactgagaaatacttaggaggaacagacgacactgtcaaaaagaaagacctgttcctggacttgatagcagatgtgatgtttggtgtcccatctgtgattgtggcccggaaccacagagatgctggagcacccacctacatgtatgagtttcagtaccgtccaagcttctcatcagacatgaaacccaagacggtgataggagaccacggggatgagctcttctccgtctttggggccccatttttaaaagagggtgcctcagaagaggagatcagacttagcaagatggtgatgaaattctgggccaactttgctcgcaatggaaaccccaatggggaagggctgccccactggccagagtacaaccagaaggaagggtatctgcagattggtgccaacacccaggcggcccagaagctgaaggacaaagaagtagctttctggaccaacctctttgccaagaaggcagtggagaagccaccccagacagaacacatagagctgtgaatgaagatccagccggccttgggagcctggaggagcaaagactggggtcttttgcgaaagggattgcaggttcagaaggcatcttaccatggctggggaattgtctggtggtggggggcaggggacagatattactcgtataaccgggatactctagaacagactctgcagcctg

SEQ ID NO: 303421 - DNA, 1944 bp, Homo sapiens
aattggcctcaccatcactccccagggtaggaaggaccctacagacatcagagcagaccctgctcatctcagcagccaggtgttcggaggctttccagcagcccaccagtggccgccttcttttcttcccttttttaaaaaataatgtttactgtttttattttctgagtgcaaatgtaatatatacttattacagaaaatttaggaaatacagagaaaggaaagtaagaaaattaagatcacatacaatattccaccacccagagagaacaactatcagtattttagatggtgcacccaagatcccaaggcggggcagttactctcagagctatttacaaaccgaaaggagaacattcctctcaagctttctgaagactgtctttacctcaatatttacactcctgctgacttgaccaagaaaaacaggctgccggtgatggtgtggatccacggaggggggctgatggtgggtgcggcatcaacctatgatgggctggcccttgctgcccatgaaaacgtggtggtggtgaccattcaatatcgcctgggcatctggggattcttcagcacaggggatgaacacagccgggggaactggggtcacctggaccaggtggctgccctgcgctgggtccaggacaacattgccagctttggagggaacccaggctctgtgaccatctttggagagtcagcgggaggagaaagtgtctctgttcttgttttgtctccattggccaagaacctcttccaccgggccatttctgagagtggcgtggccctcacttctgttctggtgaagaaaggtgatgtcaagcccttggctgagcaaattgctatcactgctgggtgcaaaaccaccacctctgctgtcatggttcactgcctgcgacagaagacggaagaggagctcttggagacgacattgaaaatgaaattcttatctctggacttacagggagaccccagagagagtcaaccccttctgggcactgtgattgatgggatgctgctgctgaaaacacctgaagagcttcaagctgaaaggaatttccacactgtcccctacatggtcggaattaacaagcaggagtttggctggttgattccaatgcagttgatgagctatccactctccgaagggcaactggaccagaagacagccatgtcactcctgtggaagtcctatccccttgtttgcattgctaaggaactgattccagaagccactgagaaatacttaggaggaacagacgacactgtcaaaaagaaagacctgttcctggacttgatagcagatgtgatgtttggtgtcccatctgtgattgtggcccggaaccacagagatgctggagcacccacctacatgtatgagtttcagtaccgtccaagcttctcatcagacatgaaacccaagacggtgataggagaccacggggatgagctcttctccgtctttggggccccatttttaaaagagggtgcctcagaagaggagatcagacttagcaagatggtgatgaaattctgggccaactttgctcgcaatggaaaccccaatggggaagggctgccccactggccagagtacaaccagaaggaagggtatctgcagattggtgccaacacccaggcggcccagaagctgaaggacaaagaagtagctttctggaccaacctctttgccaagaaggcagtggagaagccaccccagacagaacacatagagctgtgaatgaagatccagccggccttgggagcctggaggagcaaagactggggtcttttgcgaaagggattgcaggttcagaaggcatcttaccatggctggggaattgtctggtggtggggggcaggggacagaggccatgaaggagcaagttttgtatttgtgacctcagctttgggaataaaggatcttttgaaggccaaaaaaaaaaa

SEQ ID NO: 303422 - DNA, 1964 bp, Homo sapiens
tgcagggcggtaactgggggccagggtggcgccagggctggacagcacagtccctctgagctgcacggagacctcgcaggccccgagaactgtcgcccttccacgatgtggctccgtgctcttgtcctggccactctctctgcttccgcggcttgggcagggcatccgtcctcgccacctgtggtggacaccgtgcatggcaaagtgctggggaagttcgtcagcttagaaggatttgcacagcctgtggccattttcctgggaatcccttttgccaagccgcctcttggacccctgaggtttactccaccgcagcctgcagaaccatggagctttgtgaagaatgccacctcgtaccctcctatgtgcacccaagatcccaaggcggggcagttactctcagagctatttacaaaccgaaaggagaacattcctctcaagctttctgaagactgtctttacctcaatatttacactcctgctgacttgaccaagaaaaacaggctgccggtgatggtgtggatccacggaggggggctgatggtgggtgcggcatcaacctatgatgggctggcccttgctgcccatgacacaggggatgaacacagccgggggaactggggtcacctggaccaggtggctgccctgcgctgggtccaggacaacattgccagctttggagggaacccaggctctgtgaccatctttggagagtcagcgggaggagaaagtgtctctgttcttgttttgtctccattggccaagaacctcttccaccgggccatttctgagagtggcgtggccctcacttctgttctggtgaagaaaggtgatgtcaagcccttggctgagcaaattgctatcactgctgggtgcaaaaccaccacctctgctgtcatggttcactgcctgcgacagaagacggaagaggagctcttggagacgacattgaaaatgaaattcttatctctggacttacagggagaccccagagagagtcaaccccttctgggcactgtgattgatgggatgctgctgctgaaaacacctgaagagcttcaagctgaaaggaatttccacactgtcccctacatggtcggaattaacaagcaggagtttggctggttgattccaatgcagttgatgagctatccactctccgaagggcaactggaccagaagacagccatgtcactcctgtggaagtcctatccccttgtttgcattgctaaggaactgattccagaagccactgagaaatacttaggaggaacagacgacactgtcaaaaagaaagacctgttcctggacttgatagcagatgtgatgtttggtgtcccatctgtgattgtggcccggaaccacagagatgctggagcacccacctacatgtatgagtttcagtaccgtccaagcttctcatcagacatgaaacccaagacggtgataggagaccacggggatgagctcttctccgtctttggggccccatttttaaaagagggtgcctcagaagaggagatcagacttagcaagatggtgatgaaattctgggccaactttgctcgcaatggaaaccccaatggggaagggctgccccactggccagagtacaaccagaaggaagggtatctgcagattggtgccaacacccaggcggcccagaagctgaaggacaaagaagtagctttctggaccaacctctttgccaagaaggcagtggagaagccaccccagacagaacacatagagctgtgaatgaagatccagccggccttgggagcctggaggagcaaagactggggtcttttgcgaaagggattgcaggttcagaaggcatcttaccatggctggggaattgtctggtggtggggggcaggggacagaggccatgaaggagcaagttttgtatttgtgacctcagctttgggaataaaggatcttttgaaggccaaaaaaaaaaa

SEQ ID NO: 303423 - DNA, 1822 bp, Homo sapiens
tgcagggcggtaactgggggccagggtggcgccagggctggacagcacagtccctctgagctgcacggagacctcgcaggccccgagaactgtcgcccttccacgatgtggctccgtgctcttgtcctggccactctctctgcttccgcggcttgggcagggcatccgtcctcgccacctgtggtggacaccgtgcatggcaaagtgctggggaagttcgtcagcttagaaggatttgcacagcctgtggccattttcctgggaatcccttttgccaagccgcctcttggacccctgaggtttactccaccgcagcctgcagaaccatggagctttgtgaagaatgccacctcgtaccctcctatgtgcacccaagatcccaaggcggggcagttactctcagagctatttacaaaccgaaaggagaacattcctctcaagctttctgaagactgtctttacctcaatatttacactcctgctgactggaccaggtggctgccctgcgctgggtccaggacaacattgccagctttggagggaacccaggctctgtgaccatctttggagagtcagcgggaggagaaagtgtctctgttcttgttttgtctccattggccaagaacctcttccaccgggccatttctgagagtggcgtggccctcacttctgttctggtgaagaaaggtgatgtcaagcccttggctgagcaaattgctatcactgctgggtgcaaaaccaccacctctgctgtcatggttcactgcctgcgacagaagacggaagaggagctcttggagacgacattgaaaatgaaattcttatctctggacttacagggagaccccagagagagtcaaccccttctgggcactgtgattgatgggatgctgctgctgaaaacacctgaagagcttcaagctgaaaggaatttccacactgtcccctacatggtcggaattaacaagcaggagtttggctggttgattccaatgcagttgatgagctatccactctccgaagggcaactggaccagaagacagccatgtcactcctgtggaagtcctatccccttgtttgcattgctaaggaactgattccagaagccactgagaaatacttaggaggaacagacgacactgtcaaaaagaaagacctgttcctggacttgatagcagatgtgatgtttggtgtcccatctgtgattgtggcccggaaccacagagatgctggagcacccacctacatgtatgagtttcagtaccgtccaagcttctcatcagacatgaaacccaagacggtgataggagaccacggggatgagctcttctccgtctttggggccccatttttaaaagagggtgcctcagaagaggagatcagacttagcaagatggtgatgaaattctgggccaactttgctcgcaatggaaaccccaatggggaagggctgccccactggccagagtacaaccagaaggaagggtatctgcagattggtgccaacacccaggcggcccagaagctgaaggacaaagaagtagctttctggaccaacctctttgccaagaaggcagtggagaagccaccccagacagaacacatagagctgtgaatgaagatccagccggccttgggagcctggaggagcaaagactggggtcttttgcgaaagggattgcaggttcagaaggcatcttaccatggctggggaattgtctggtggtggggggcaggggacagaggccatgaaggagcaagttttgtatttgtgacctcagctttgggaataaaggatcttttgaaggccaaaaaaaaaaa

SEQ ID NO: 303424 - DNA, 922 bp, Homo sapiens
  misc_feature (8)..(8): n is a, c, g, or t
gtgcgagntgttctagagtatcccggtttagagtaatatctgtcccctacatggtcggaattaacaagcaggagtttggctggttgattccaatgcagttgatgagctatccactctccgaagggcaactggaccagaagacagccatgtcactcctgtggaagtcctatccccttgtttgcattgctaaggaactgattccagaagccactgagaaatacttaggaggaacagacgacactgtcaaaaagaaagacctgttcctggacttgatagcagatgtgatgtttggtgtcccatctgtgattgtggcccggaaccacagagatgctggagcacccacctacatgtatgagtttcagtaccgtccaagcttctcatcagacatgaaacccaagacggtgataggagaccacggggatgagctcttctccgtctttggggccccatttttaaaagagggtgcctcagaagaggagatcagacttagcaagatggtgatgaaattctgggccaactttgctcgcaatggaaaccccaatggggaagggctgccccactggccagagtacaaccagaaggaagggtatctgcagattggtgccaacacccaggcggcccagaagctgaaggacaaagaagtagctttctggaccaacctctttgccaagaaggcagtggagaagccaccccagacagaacacatagagctgtgaatgaagatccagccggccttgggagcctggaggagcaaagactggggtcttttgcgaaagggattgcaggttcagaaggcatcttaccatggctggggaattgtctggtggtggggggcaggggacagaggccatgaaggagcaagttttgtatttgtgacctcagctttgggaataaaggatcttttgaaggccaaaaaaaaaaa

SEQ ID NO: 303425 - DNA, 911 bp, Homo sapiens
ttcttgagtacctggtacgaaatatattctgtcccctacatggtcggaattaacaagcaggagtttggctggttgattccaatgcagttgatgagctatccactctccgaagggcaactggaccagaagacagccatgtcactcctgtggaagtcctatccccttgtttgcattgctaaggaactgattccagaagccactgagaaatacttaggaggaacagacgacactgtcaaaaagaaagacctgttcctggacttgatagcagatgtgatgtttggtgtcccatctgtgattgtggcccggaaccacagagatgctggagcacccacctacatgtatgagtttcagtaccgtccaagcttctcatcagacatgaaacccaagacggtgataggagaccacggggatgagctcttctccgtctttggggccccatttttaaaagagggtgcctcagaagaggagatcagacttagcaagatggtgatgaaattctgggccaactttgctcgcaatggaaaccccaatggggaagggctgccccactggccagagtacaaccagaaggaagggtatctgcagattggtgccaacacccaggcggcccagaagctgaaggacaaagaagtagctttctggaccaacctctttgccaagaaggcagtggagaagccaccccagacagaacacatagagctgtgaatgaagatccagccggccttgggagcctggaggagcaaagactggggtcttttgcgaaagggattgcaggttcagaaggcatcttaccatggctggggaattgtctggtggtggggggcaggggacagaggccatgaaggagcaagttttgtatttgtgacctcagctttgggaataaaggatcttttgaaggccaaaaaaaaaaa

SEQ ID NO: 303426 - DNA, 915 bp, Homo sapiens
cctgtgtatccctggttatacgagaatgtattctgtcccctacatggtcggaattaacaagcaggagtttggctggttgattccaatgcagttgatgagctatccactctccgaagggcaactggaccagaagacagccatgtcactcctgtggaagtcctatccccttgtttgcattgctaaggaactgattccagaagccactgagaaatacttaggaggaacagacgacactgtcaaaaagaaagacctgttcctggacttgatagcagatgtgatgtttggtgtcccatctgtgattgtggcccggaaccacagagatgctggagcacccacctacatgtatgagtttcagtaccgtccaagcttctcatcagacatgaaacccaagacggtgataggagaccacggggatgagctcttctccgtctttggggccccatttttaaaagagggtgcctcagaagaggagatcagacttagcaagatggtgatgaaattctgggccaactttgctcgcaatggaaaccccaatggggaagggctgccccactggccagagtacaaccagaaggaagggtatctgcagattggtgccaacacccaggcggcccagaagctgaaggacaaagaagtagctttctggaccaacctctttgccaagaaggcagtggagaagccaccccagacagaacacatagagctgtgaatgaagatccagccggccttgggagcctggaggagcaaagactggggtcttttgcgaaagggattgcaggttcagaaggcatcttaccatggctggggaattgtctggtggtggggggcaggggacagaggccatgaaggagcaagttttgtatttgtgacctcagctttgggaataaaggatcttttgaaggccaaaaaaaaaaa

SEQ ID NO: 303427 - DNA, 884 bp, Homo sapiens
tggctgctcttgaggatcccagttacaagcaagagtagggctgcttgattccaagtgcagttgatgagctatccactctccgaagggcaactggaccagaagacagccatgtcactcctgtggaagtcctatccccttgtttgcattgctaaggaactgattccagaagccactgagaaatacttaggaggaacagacgacactgtcaaaaagaaagacctgttcctggacttgatagcagatgtgatgtttggtgtcccatctgtgattgtggcccggaaccacagagatgctggagcacccacctacatgtatgagtttcagtaccgtccaagcttctcatcagacatgaaacccaagacggtgataggagaccacggggatgagctcttctccgtctttggggccccatttttaaaagagggtgcctcagaagaggagatcagacttagcaagatggtgatgaaattctgggccaactttgctcgcaatggaaaccccaatggggaagggctgccccactggccagagtacaaccagaaggaagggtatctgcagattggtgccaacacccaggcggcccagaagctgaaggacaaagaagtagctttctggaccaacctctttgccaagaaggcagtggagaagccaccccagacagaacacatagagctgtgaatgaagatccagccggccttgggagcctggaggagcaaagactggggtcttttgcgaaagggattgcaggttcagaaggcatcttaccatggctggggaattgtctggtggtggggggcaggggacagaggccatgaaggagcaagttttgtatttgtgacctcagctttgggaataaaggatcttttgaaggccaaaaaaaaaaa

SEQ ID NO: 303428 - DNA, 1645 bp, Homo sapiens
tgcagggcggtaactgggggccagggtggcgccagggctggacagcacagtccctctgagctgcacggagacctcgcaggccccgagaactgtcgcccttccacgatgtggctccgtgctcttgtcctggccactctctctgcttccgcggcttgggcagggcatccgtcctcgccacctgtggtggacaccgtgcatggcaaagtgctggggaagttcgtcagcttagaaggatttgcacagcctgtggccattttcctgggaatcccttttgccaagccgcctcttggacccctgaggtttactccaccgcagcctgcagaaccatggagctttgtgaagaatgccacctcgtaccctcctatgtgcacccaagatcccaaggcggggcagttactctcagagctatttacaaaccgaaaggagaacattcctctcaagctttctgaagactgtctttacctcaatatttacactcctgctgacttgaccaagaaaaacaggctgccggtgatggtgtggatccacggaggggggctgatggtgggtgcggcatcaacctatgatgggctggcccttgctgcccatgaaaacgtggtggtggtgaccattcaatatcgcctgggcatctggggattcttcagcacaggggatgaacacagccgggggaactggggtcacctggaccaggtggctgccctgcgctgggtccaggacaacattgccagctttggagggaacccaggctctgtgaccatctttggagagtcagcgggaggagaaagtgtctctgttcttgttttgtctccattggccaagaacctcttccaccgggccatttctgagagtggcgtggccctcacttctgttctggtgaagaaaggtgatgtcaagcccttggctgagcaaattgctatcactgctgggtgcaaaaccaccacctctgctgtcatggttcactgcctgcgacagaagacggaagaggagctcttggagacgacattgaaaatgaaattcttatctctggacttacagggagaccccagagagatgctggagcacccacctacatgtatgagtttcagtaccgtccaagcttctcatcagacatgaaacccaagacggtgataggagaccacggggatgagctcttctccgtctttggggccccatttttaaaagagggtgcctcagaagaggagatcagacttagcaagatggtgatgaaattctgggccaactttgctcgcaatggaaaccccaatggggaagggctgccccactggccagagtacaaccagaaggaagggtatctgcagattggtgccaacacccaggcggcccagaagctgaaggacaaagaagtagctttctggaccaacctctttgccaagaaggcagtggagaagccaccccagacagaacacatagagctgtgaatgaagatccagccggccttgggagcctggaggagcaaagactggggtcttttgcgaaagggattgcaggttcagaaggcatcttaccatggctggggaattgtctggtggtggggggcaggggacagaggccatgaaggagcaagttttgtatttgtgacctcagctttgggaataaaggatcttttgaaggccaaaaaaaaaaa

SEQ ID NO: 303429 - DNA, 1971 bp, Homo sapiens
tgcagggcggtaactgggggccagggtggcgccagggctggacagcacagtccctctgagctgcacggagacctcgcaggccccgagaactgtcgcccttccacgatgtggctccgtgctcttgtcctggccactctctctgcttccgcggcttgggcagggcatccgtcctcgccacctgtggtggacaccgtgcatggcaaagtgctggggaagttcgtcagcttagaaggatttgcacagcctgtggccattttcctgggaatcccttttgccaagccgcctcttggacccctgaggtttactccaccgcagcctgcagaaccatggagctttgtgaagaatgccacctcgtaccctcctatgtgcacccaagatcccaaggcggggcagttactctcagagctatttacaaaccgaaaggagaacattcctctcaagctttctgaagactgtctttacctcaatatttacactcctgctgacttgaccaagaaaaacaggctgccggtgatggtgtggatccacggaggggggctgatggtgggtgcggcatcaacctatgatgggctggcccttgctgcccatgaaaacgtggtggtggtgaccattcaatatcgcctgggcatctggggattcttcagcacaggggatgaacacagccgggggaactggggtcacctggaccaggtggctgccctgcgctgggtccaggacaacattgccagctttggagggaacccaggctctgtgaccatctttggagagtcagcgggaggagaaagtgtctctgttcttgttttgtctccattggccaagaacctcttccaccgggccatttctgagagtggcgtggccctcacttctgttctggtgaagaaaggtgatgtcaagcccttggctgagcaaattgctatcactgctgggtgcaaaaccaccacctctgctgtcatggttcactgcctgcgacagaagacggaagaggagctcttggagacgacattgaaaatgaaattcttatctctggacttacagggagaccccagagagagtcaaccccttctgggcactgtgattgatgggatgctgctgctgaaaacacctgaagagcttcaagctgaaaggaatttccacactgtcccctacatggtcggaattaacaagcaggagtttggctggttgattccaatgcagttgatgagctatccactctccgaagggcaactggaccagaagacagccatgtcactcctgtggaagtcctatccccttgtttgcattgctaaggaactgattccagaagccactgagaaatacttaggaggaacagacgacactgtcaaaaagaaagacctgttcctggacttgatagcagatgtgatgtttggtgtcccatctgtgattgtggcccggaaccacagagatgctggagcacccacctacatgtatgagtttcagtaccgtccaagcttctcatcagacatgaaacccaagacggtgataggagaccacggggatgagctcttctccgtctttggggccccatttttaaaagttctgggccaactttgctcgcaatggaaaccccaatggggaagggctgccccactggccagagtacaaccagaaggaagggtatctgcagattggtgccaacacccaggcggcccagaagctgaaggacaaagaagtagctttctggaccaacctctttgccaagaaggcagtggagaagccaccccagacagaacacatagagctgtgaatgaagatccagccggccttgggagcctggaggagcaaagactggggtcttttgcgaaagggattgcaggttcagaaggcatcttaccatggctggggaattgtctggtggtggggggcaggggacagaggccatgaaggagcaagttttgtatttgtgacctcagctttgggaataaaggatcttttgaaggccaaaaaaaaaaa

SEQ ID NO: 303430 - DNA, 1886 bp, Homo sapiens
tgcagggcggtaactgggggccagggtggcgccagggctggacagcacagtccctctgagctgcacggagacctcgcaggccccgagaactgtcgcccttccacgatgtggctccgtgctcttgtcctggccactctctctgcttccgcggcttgggcagggcatccgtcctcgccacctgtggtggacaccgtgcatggcaaagtgctggggaagttcgtcagcttagaaggatttgcacagcctgtggccattttcctgggaatcccttttgccaagccgcctcttggacccctgaggtttactccaccgcagcctgcagaaccatggagctttgtgaagaatgccacctcgtaccctcctatgtgcacccaagatcccaaggcggggcagttactctcagagctatttacaaaccgaaaggagaacattcctctcaagctttctgaagactgtctttacctcaatatttacactcctgctgacttgaccaagaaaaacaggctgccggtgatggtgtggatccacggaggggggctgatggtgggtgcggcatcaacctatgatgggctggcccttgctgcccatgaaaacgtggtggtggtgaccattcaatatcgcctgggcatctggggattcttcagcacaggggatgaacacagccgggggaactggggtcacctggaccaggtggctgccctgcgctgggtccaggacaacattgccagctttggagggaacccaggctctgtgaccatctttggagagtcagcgggaggagaaagtgtctctgttcttgttttgtctccattggccaagaacctcttccaccgggccatttctgagagtggcgtggccctcacttctgttctggtgaagaaaggtgatgtcaagcccttggctgagcaaattgctatcactgctgggtgcaaaaccaccacctctgctgtcatggttcactgcctgcgacagaagacggaagaggagctcttggagacgacattgaaaatgaaattcttatctctggacttacagggagaccccagagagagtcaaccccttctgggcactgtgattgatgggatgctgctgctgaaaacacctgaagagcttcaagctgaaaggaatttccacactgtcccctacatggtcggaattaacaagcaggagtttggctggttgattccaatgcagttgatgagctatccactctccgaagggcaactggaccagaagacagccatgtcactcctgtggaagtcctatccccttgtttgcattgctaaggaactgattccagaagccactgagaaatacttaggaggaacagacgacactgtcaaaaagaaagacctgttcctggacttgatagcagatgtgatgtttggtgtcccatctgtgattgtggcccggaaccacagagagggtgcctcagaagaggagatcagacttagcaagatggtgatgaaattctgggccaactttgctcgcaatggaaaccccaatggggaagggctgccccactggccagagtacaaccagaaggaagggtatctgcagattggtgccaacacccaggcggcccagaagctgaaggacaaagaagtagctttctggaccaacctctttgccaagaaggcagtggagaagccaccccagacagaacacatagagctgtgaatgaagatccagccggccttgggagcctggaggagcaaagactggggtcttttgcgaaagggattgcaggttcagaaggcatcttaccatggctggggaattgtctggtggtggggggcaggggacagaggccatgaaggagcaagttttgtatttgtgacctcagctttgggaataaaggatcttttgaaggccaaaaaaaaaaa

SEQ ID NO: 303431 - DNA, 1918 bp, Homo sapiens
tgcagggcggtaactgggggccagggtggcgccagggctggacagcacagtccctctgagctgcacggagacctcgcaggccccgagaactgtcgcccttccacgatgtggctccgtgctcttgtcctggccactctctctgcttccgcggcttgggcagggcatccgtcctcgccacctgtggtggacaccgtgcatggcaaagtgctggggaagttcgtcagcttagaaggatttgcacagcctgtggccattttcctgggaatcccttttgccaagccgcctcttggacccctgaggtttactccaccgcagcctgcagaaccatggagctttgtgaagaatgccacctcgtaccctcctatgtgcacccaagatcccaaggcggggcagttactctcagagctatttacaaaccgaaaggagaacattcctctcaagctttctgaagactgtctttacctcaatatttacactcctgctgacttgaccaagaaaaacaggctgccggtgatggtgtggatccacggaggggggctgatggtgggtgcggcatcaacctatgatgggctggcccttgctgcccatgaaaacgtggtggtggtgaccattcaatatcgcctgggcatctggggattcttcagcacaggggatgaacacagccgggggaactggggtcacctggaccaggtggctgccctgcgctgggtccaggacaacattgccagctttggagggaacccaggctctgtgaccatctttggagagtcagcgggaggagaaagtgtctctgttcttgttttgtctccattggccaagaacctcttccaccgggccatttctgagagtggcgtggccctcacttctgttctggtgaagaaaggtgatgtcaagcccttggctgagcaaattgctatcactgctgggtgcaaaaccaccacctctgctgtcatggttcactgcctgcgacagaagacggaagaggagctcttggagacgacattgaaaatgaaattcttatctctggacttacagggagaccccagagagagtcaaccccttctgggcactgtgattgatgggatgctgctgctgaaaacacctgaagagcttcaagctgaaaggaatttccacactgtcccctacatggtcggaattaacaagcaggagtttggctggttgattccaatgcagttgatgagctatccactctccgaagggcaactggaccagaagacagccatgtcactcctgtggaagtcctatccccttgtttgcattgctaaggaactgattccagaagccactgagaaatacttaggaggaacagacgacactgtcaaaaagaaagacctgttcctggacttgatagcagatgtgatgtttggtgtcccatctgtgattgtggcccggaaccacagagatgctggagcacccacctacatgtatgagtttcagtaccgtccaagcttctcatcagacttagcaagatggtgatgaaattctgggccaactttgctcgcaatggaaaccccaatggggaagggctgccccactggccagagtacaaccagaaggaagggtatctgcagattggtgccaacacccaggcggcccagaagctgaaggacaaagaagtagctttctggaccaacctctttgccaagaaggcagtggagaagccaccccagacagaacacatagagctgtgaatgaagatccagccggccttgggagcctggaggagcaaagactggggtcttttgcgaaagggattgcaggttcagaaggcatcttaccatggctggggaattgtctggtggtggggggcaggggacagaggccatgaaggagcaagttttgtatttgtgacctcagctttgggaataaaggatcttttgaaggccaaaaaaaaaaa

SEQ ID NO: 303432 - DNA, 901 bp, Homo sapiens
acgggtctgtctcttgcgttaacagtgtttggacggaacagatccggggactctcttccagcctccgaccgcgctccgatgtcctgtccgcttgcgacctccaggagtttggatggttgattccaatgcagttgatgagctatccactctccgaagggcaactggaccagaagacagccatgtcactcctgtggaagtcctatccccttgtttgcattgctaaggaactgattccagaagccactgagaaatacttaggaggaacagacgacactgtcactgtgattgtggcccggaaccacagagatgctggagcacccacctacatgtatgagtttcagtaccgtccaagcttctcatcagacatgaaacccaagacggtgataggagaccacggggatgagctcttctccgtctttggggccccatttttaaaagagggtgcctcagaagaggagatcagacttagcaagatggtgatgaaattctgggccaactttgctcgcaatggaaaccccaatggggaagggctgccccactggccagagtacaaccagaaggaagggtatctgcagattggtgccaacacccaggcggcccagaagctgaaggacaaagaagtagctttctggaccaacctctttgccaagaaggcagtggagaagccaccccagacagaacacatagagctgtgaatgaagatccagccggccttgggagcctggaggagcaaagactggggtcttttgcgaaagggattgcaggttcagaaggcatcttaccatggctggggaattgtctggtggtggggggcaggggacagaggccatgaaggagcaagttttgtatttgtgacctcagctttgggaataaaggatcttttgaaggccaaaaaaaaaaa

SEQ ID NO: 303433 - DNA, 1483 bp, Homo sapiens
tgcagggcggtaactgggggccagggtggcgccagggctggacagcacagtccctctgagctgcacggagacctcgcaggccccgagaactgtcgcccttccacgatgtggctccgtgctcttgtcctggccactctctctgcttccgcggcttgggcagggcatccgtcctcgccacctgtggtggacaccgtgcatggcaaagtgctggggaagttcgtcagcttagaaggatttgcacagcctgtggccattttcctgggaatcccttttgccaagccgcctcttggacccctgaggtttactccaccgcagcctgcagaaccatggagctttgtgaagaatgccacctcgtaccctcctatgtgcacccaagatcccaaggcggggcagttactctcagagctatttacaaaccgaaaggagaacattcctctcaagctttctgaagactgtctttacctcaatatttacactcctgctgacttgaccaagaaaaacaggctgccggtgatggtgtggatccacggaggggggctgatggtgggtgcggcatcaacctatgatgggctggcccttgctgcccatgaaaacgtggtggtggtgaccattcaatatcgcctgggcatctggggattcttcagcacaggggatgaacacagccgggggaactggggtcacctggaccaggtggctgccctgcgctgggtccaggacaacattgccagctttggagggaacccaggctctgtgaccatctttggagagtcagcgggaggagaaagtgtctctgttcttgttttgtctccattggccaagaacctcttccaccgggccatttctgagagtggcgtggccctcacttctgttctggtgaagaaaggtgatgtcaagcccttggctgagcaaattgctatcactgctgggtgcaaaaccaccacctctgctgtcatggttcactgcctgcgacagaagacggaagaggagctcttggagacgacattgaaaatgaaattcttatctctggacttacagggagaccccagagagagtcaaccccttctgggcactgtgattgatgggatgctgctgctgaaaacacctgaagagcttcaagctgaaaggaatttccacactgtcccctacatggtcggaattaacaagcaggagtttggctggttgattccaatgcagttgatgagctatccactctccgaagggcaactggaccagaagacagccatgtcactcctgtggaagtcctatccccttgttgtaagagtctaggaatcatgggaattggctgagacccagagagggacaaggacttgcccaaatcatagagcaattaaatggcagaatgaagactggggcctcagggtttcccccatctttccacctttcccacttcattttccaccctagcggggagttgcacagggcttatggggttcaccattgaggcaggactttctggtgggct

SEQ ID NO: 303434 - DNA, 552 bp, Homo sapiens
gtggccgccttcttttcttcccttttttaaaaaataatgtttactgtttttattttctgagtgcaaatgtaatatatacttattacagaaaatttaggaaatacagagaaaggaaagtaagaaaattaagatcacatacaatattccaccacccagagagaacaactatcagtattttagatggtaaagtattatgatgtaatatattgtttgtattccagtttttttgcctgttgatatactttctttctttaaaagggaatgctatattgagataatttggatgcctgctttgctcatttataagtatatcatgagcataattccatgccattaaatagcacagcctggtattaaaagctgcattacattgggtattgaaccataattaatttccccaagcttttatttggggtcattaagttatatatgatgtttttaataatataacatcatgaatgtgaaacatttatgcacattcatgaatagtttaggataacttctcagaaatgacatttctgagtcaaagagtatatatttcttgtttgattt

SEQ ID NO: 303435 - DNA, 281 bp, Homo sapiens
gcggccgcctactactactactgctcgaattcaagcttctaacgatgtacggggcatggtagtcaccgcgaagccgggcaccgtcccacagcatctcctagaagcagccggcacaggagggaaggtggccaggctcgaagcagtctctgtttccagcactgcaccctcaggaagtcgcccgccccaggacacgcagggaccaccctaagggctgggtggctgtctcaaggacacattgaatacgttgtgaccatccagaaaataaatgctgaggggacaca

SEQ ID NO: 303436 - DNA, 6633 bp, Homo sapiens
atagggttcgtccgaccagcgtcgggcggtgcgtcgccatacgggttgcagccgcggcctccaggcggcacgcagctgtcagtgccgccgcaactgcgaggctggagcggatgcccgagtggccgagggaggggacccctgcgagagggcccgcgcgccggccgccgcgccccggcgcccaggctcggtgctggagagtcatgcctgtgagccctgggcacctcctgatgtcctgcgaggtcacggtgttcccaaacctcagggttgccctgccccactccagaggctctcaggccccaccccggagccctctgtgcggagccgcctcctcctggccagttccccagtagtcctgaagggagacctgctgtgtggagcctcttctgggacccagccatgagtgtggagctgagcaactgaacctgaaactcttccactgtgagtcaaggaggcttttccgcacatgaaggacgctgagcgggaaggactcctctctgcctgcagttgtagcgagtggaccagcaccaggggctctctagactgcccctcctccatcgccttccctgcctctccaggacagagcagccacgtctgcacacctcgccctctttacactcagttttcagagcacgtttctcctatttcctgcgggttgcagcgcctacttgaacttactcagaccacctacttctctagcagcactgggcgtccctttcagcaagacgatggctgtgctcaggcagctggcgctcctcctctggaagaactacaccctgcagaagcggaaggtcctggtgacggtcctggaactcttcctgccattgctgttttctgggatcctcatctggctccgcttgaagattcagtcggaaaatgtgcccaacgccaccatctacccgggccagtccatccaggagctgcctctgttcttcaccttccctccgccaggagacacctgggagcttgcctacatcccttctcacagtgacgctgccaagaccgtcactgagacagtgcgcagggcacttgtgatcaacatgcgagtgcgcggctttccctccgagaaggactttgaggactacattaggtacgacaactgctcgtccagcgtgctggccgccgtggtcttcgagcaccccttcaaccacagcaaggagcccctgccgctggcggtgaaatatcacctacggttcagttacacacggagaaattacatgtggacccaaacaggctcctttttcctgaaagagacagaaggctggcacactacttcccttttcccgcttttcccaaacccaggaccaagggaacctacatcccctgatggcggagaacctgggtacatccgggaaggcttcctggccgtgcagcatgctgtggaccgggccatcatggagtaccatgccgatgccgccacacgccagctgttccagagactgacggtgaccatcaagaggttcccgtacccgccgttcatcgcagaccccttcctcgtggccatccagtaccagctgcccctgctgctgctgctcagcttcacctacaccgcgctcaccattgcccgtgctgtcgtgcaggagaaggaaaggaggctgaaggagtacatgcgcatgatggggctcagcagctggctgcactggagtgcctggttcctcttgttcttcctcttcctcctcatcgccgcctccttcatgaccctgctcttctgtgtcaaggtgaagccaaatgtagccgtgctgtcccgcagcgacccctccctggtgctcgccttcctgctgtgcttcgccatctctaccatctccttcagcttcatggtcagcaccttcttcagcaaagccaacatggcagcagccttcggaggcttcctctacttcttcacctacatcccctacttcttcgtggcccctcggtacaactggatgactctgagccagaagctctgctcctgcctcctgtctaatgtcgccatggcaatgggagcccagctcattgggaaatttgaggcgaaaggcatgggcatccagtggcgagacctcctgagtcccgtcaacgtggacgacgacttctgcttcgggcaggtgctggggatgctgctgctggactctgtgctctatggcctggtgacctggtacatggaggccgtcttcccagggcagttcggcgtgcctcagccctggtacttcttcatcatgccctcctattggtgtgggaagccaagggcggttgcagggaaggaggaagaagacagtgaccccgagaaagcactcagaaacgagtactttgaagccgagccagaggacctggtggcggggatcaagatcaagcacctgtccaaggtgttcagggtgggaaataaggacagggcggccgtcagagacctgaacctcaacctgtacgagggacagatcaccgtcctgctgggccacaacggtgccgggaagaccaccaccctctccatgctcacaggtctctttccccccaccagtggacgggcatacatcagcgggtatgaaatttcccaggacatggttcagatccggaagagcctgggcctgtgcccgcagcacgacatcctgtttgacaacttgacagtcgcagagcacctttatttctacgcccagctgaagggcctgtcacgtcagaagtgccctgaagaagtcaagcagatgctgcacatcatcggcctggaggacaagtggaactcacggagccgcttcctgagcgggggcatgaggcgcaagctctccatcggcatcgccctcatcgcaggctccaaggtgctgatactggacgagcccacctcgggcatggacgccatctccaggagggccatctgggatcttcttcagcggcagaaaagtgaccgcaccatcgtgctgaccacccacttcatggacgaggctgacctgctgggagaccgcatcgccatcatggccaagggggagctgcagtgctgcgggtcctcgctgttcctcaagcagaaatacggtgccggctatcacatgacgctggtgaaggagccgcactgcaacccggaagacatctcccagctggtccaccaccacgtgcccaacgccacgctggagagcagcgctggggccgagctgtctttcatccttcccagagagagcacgcacaggtttgaaggtctctttgctaaactggagaagaagcagaaagagctgggcattgccagctttggggcatccatcaccaccatggaggaagtcttccttcgggtcgggaagctggtggacagcagtatggacatccaggccatccagctccctgccctgcagtaccagcacgagaggcgcgccagcgactgggctgtggacagcaacctctgtggggccatggacccctccgacggcattggagccctcatcgaggaggagcgcaccgctgtcaagctcaacactgggctcgccctgcactgccagcaattctgggccatgttcctgaagaaggccgcatacagctggcgcgagtggaaaatggtggcggcacaggtcctggtgcctctgacctgcgtcaccctggccctcctggccatcaactactcctcggagctcttcgacgaccccatgctgaggctgaccttgggcgagtacggcagaaccgtcgtgcccttctcagttcccgggacctcccagctgggtcagcagctgtcagagcatctgaaagacgcactgcaggctgagggacaggagccccgcgaggtgctcggtgacctggaggagttcttgatcttcagggcttctgtggaggggggcggctttaatgagcggtgccttgtggcagcgtccttcagagatgtgggagagcgcacggtcgtcaacgccttgttcaacaaccaggcgtaccactctccagccactgccctggccgtcgtggacaaccttctgttcaagctgctgtgcgggcctcacgcctccattgtggtctccaacttcccccagccccggagcgccctgcaggctgccaaggaccagtttaacgagggccggaagggattcgacattgccctcaacctgctcttcgccatggcattcttggccagcacgttctccatcctggcggtcagcgagagggccgtgcaggccaagcatgtgcagtttgtgagtggagtccacgtggccagtttctggctctctgctctgctgtgggacctcatctccttcctcatccccagtctgctgctgctggtggtgtttaaggccttcgacgtgcgtgccttcacgcgggacggccacatggctgacaccctgctgctgctcctgctctacggctgggccatcatccccctcatgtacctgatgaacttcttcttcttgggggcggccactgcctacacgaggctgaccatcttcaacatcctgtcaggcatcgccaccttcctgatggtcaccatcatgcgcatcccagctgtaaaactggaagaactttccaaaaccctggatcacgtgttcctggtgctgcccaaccactgtctggggatggcagtcagcagtttctacgagaactacgagacgcggaggtactgcacctcctccgaggtcgccgcccactactgcaagaaatataacatccagtaccaggagaacttctatgcctggagcgccccgggggtcggccggtttgtggcctccatggccgcctcagggtgcgcctacctcatcctgctcttcctcatcgagaccaacctgcttcagagactcaggggcatcctctgcgccctccggaggaggcggacactgacagaattatacacccggatgcctgtgcttcctgaggaccaagatgtagcggacgagaggacccgcatcctggcccccagcccggactccctgctccacacacctctgattatcaaggagctctccaaggtgtacgagcagcgggtgcccctcctggccgtggacaggctctccctcgcggtgcagaaaggggagtgcttcggcctgctgggcttcaatggagccgggaagaccacgactttcaaaatgctgaccggggaggagagcctcacttctggggatgcctttgtcgggggtcacagaatcagctctgatgtcggaaaggtgcggcagcggatcggctactgcccgcagtttgatgccttgctggaccacatgacaggccgggagatgctggtcatgtacgctcggctccggggcatccctgagcgccacatcggggcctgcgtggagaacactctgcggggcctgctgctggagccacatgccaacaagctggtcaggacgtacagtggtggtaacaagcggaagctgagcaccggcatcgccctgatcggagagcctgctgtcatcttcctggacgagccgtccactggcatggaccccgtggcccggcgcctgctttgggacaccgtggcacgagcccgagagtctggcaaggccatcatcatcacctcccacagcatggaggagtgtgaggccctgtgcacccggctggccatcatggtgcaggggcagttcaagtgcctgggcagcccccagcacctcaagagcaagttcggcagcggctactccctgcgggccaaggtgcagagtgaagggcaacaggaggcgctggaggagttcaaggccttcgtggacctgacctttccaggcagcgtcctggaagatgagcaccaaggcatggtccattaccacctgccgggccgtgacctcagctgggcgaaggttttcggtattctggagaaagccaaggaaaagtacggcgtggacgactactccgtgagccagatctcgctggaacaggtcttcctgagcttcgcccacctgcagccgcccaccgcagaggaggggcgatgaggggtggcggctgtctcgccatcaggcagggacaggacgggcaagcagggcccatcttacatcctctctctccaagtttatctcatcctttatttttaatcacttttttctatgatggatatgaaaaattcaaggcagtatgcacagaatggacgagtgcagcccagccctcatgcccaggatcagcatgcgcatctccatgtctgcatactctggagttcactttcccagagctggggcaggccgggcagtctgcgggcaagctccggggtctctgggtggagagctgacccaggaagggctgcagctgagctgggggttgaatttctccaggcactccctggagagaggacccagtgacttgtccaagtttacacacgacactaatctcccctggggaggaagcgggaagccagccaggttgaactgtagcgaggcccccaggccgccaggaatggaccatgcagatcactgtcagtggagggaagctgctgactgtgattaggtgctggggtcttagcgtccagcgcagcccgggggcatcctggaggctctgctccttagggcatggtagtcaccgcgaagccgggcaccgtcccacagcatctcctagaagcagccggcacaggagggaaggtggccaggctcgaagcagtctctgtttccagcactgcaccctcaggaagtcgcccgccccaggacacgcagggaccaccctaagggctgggtggctgtctcaaggacacattgaatacgttgtgaccatccagaaaataaatgctgaggggacaca

SEQ ID NO: 303437 - DNA, 548 bp, Homo sapiens
ttattacatggttcaaatgcaaaagcctttgtccatccctttccctgaaggtaatgagtttctggtgtaagtttttatgtatatgtatacacacaacaaaatgttcgctggtcagggtcggcctcccgccaggagccctgcatctccctgcgtcccctgtcgttgcagctgaagggcctgtcacgtcagaagtgccctgaagaagtcaagcagatgctgcacatcatcggcctggaggacaagtggaactcacggagccgcttcctgagcgggggcatgaggcgcaagctctccatcggcatcgccctcatcgcaggctccaaggtgcggcggtgggactggaggcagtgggttcccctcctgctcgacctgggactacaggcgcccgccaccactcctggctaattttttgtatttttagtagagatgggattttcaccgtgttatccaggatggtctcgatctgcctgaccttgtgatccacccacctcggcctcccaaagtgcgggcatggtggcacacacctgtaatctcagctacttgggagg

SEQ ID NO: 303438 - DNA, 598 bp, Homo sapiens
cagagtccaaacagtgctcagagtccaaacagtgcccagagtccaaacagtgcccagagtccaaacagtgcccagagtccaaacagtgcccagagtccaaacagtgcccaagttgggactctctggggctctccctgagtagcgccttctccacagcagtgcctcgaagtcctgggacagaggctgcatggctgtgtgcatctagtgtgtctgctggttgttgctttgctcgtcacaaacaaaacaaactgacagctgtctgcttccctcccagccctcctattggtgtgggaagccaagggcggttgcagggaaggaggaagaagacagtgaccccgagaaagcactcagaaacgagtactttgaagccgagccagaggacctggtggcggggatcaagatcaagcacctgtccaaggtgccgcctcctgtggggacagggagggccggggctgccaggaccatgggaagacttaccagcacggcagtgagacctcatagcccgtcaggcgctccctctgagccttgctccctcctgccctgaaggagggcaggaaccctccgctgccctctaaccggttccccagggcacagacca

SEQ ID NO: 303439 - DNA, 632 bp, Homo sapiens
atagggttcgtccgaccagcgtcgggcggtgcgtcgccatacgggttgcagccgcggcctccaggcggcacgcagctgtcagtgccgccgcaactgcgaggctggagcggatgcccgagtggccgagggaggggacccctgcgagagggcccgcgcgccggccgccgcgccccggcgcccaggctcggtgctggagagtcatgcctgtgagccctgggcacctcctgatgtcctgcgaggtcacggtgttcccaaacctcagggttgccctgccccactccagaggctctcaggccccaccccggagccctctgtgcggagccgcctcctcctggccagttccccagtagtcctgaagggagacctgctgtgtggagcctcttctgggacccagccatgagtgtggagctgagcaactgaacctgaaactcttccactgtgagtcaaggaggcttttccgcacatgaaggacgctgagcgggaaggactcctctctgcctgcagttgtagcgagtggaccagcaccaggggctctctagactgcccctcctccatcgccttccctgcctctccaggacagagcagccacgtctgcactccagcctgggcgacagagtgagactccatctcaa

SEQ ID NO: 303440 - DNA, 6512 bp, Homo sapiens
atagggttcgtccgaccagcgtcgggcggtgcgtcgccatacgggttgcagccgcggcctccaggcggcacgcagctgtcagtgccgccgcaactgcgaggctggagcggatgcccgagtggccgagggaggggacccctgcgagagggcccgcgcgccggccgccgcgccccggcgcccaggctcggtgctggagagtcatgcctgtgagccctgggcacctcctgatgtcctgcgaggtcacggtgttcccaaacctcagggttgccctgccccactccagaggctctcaggccccaccccggagccctctgtgcggagccgcctcctcctggccagttccccagtagtcctgaagggagacctgctgtgtggagcctcttctgggacccagccatgagtgtggagctgagcaactgaacctgaaactcttccactgtgagtcaaggaggcttttccgcacatgaaggacgctgagcgggaaggactcctctctgcctgcagttgtagcgagtggaccagcaccaggggctctctagactgcccctcctccatcgccttccctgcctctccaggacagagcagccacgtctgcacacctcgccctctttacactcagttttcagagcacgtttctcctatttcctgcgggttgcagcgcctacttgaacttactcagaccacctacttctctagcagcactgggcgtccctttcagcaagacgatggctgtgctcaggcagctggcgctcctcctctggaagaactacaccctgcagaagcggaaggtcctggtgacggtcctggaactcttcctgccattgctgttttctgggatcctcatctggctccgcttgaagattcagtcggaaaatgtgcccaacgccaccatctacccgggccagtccatccaggagctgcctctgttcttcaccttccctccgccaggagacacctgggagcttgcctacatcccttctcacagtgacgctgccaagaccgtcactgagacagtgcgcagggcacttgtgatcaacatgcgagtgcgcggctttccctccgagaaggactttgaggactacattaggtacgacaactgctcgtccagcgtgctggccgccgtggtcttcgagcaccccttcaaccacagcaaggagcccctgccgctggcggtgaaatatcacctacggttcagttacacacggagaaattacatgtggacccaaacaggctcctttttcctgaaagagacagaaggctggcacactacttcccttttcccgcttttcccaaacccaggaccaagggaacctacatcccctgatggcggagaacctgggtacatccgggaaggcttcctggccgtgcagcatgctgtggaccgggccatcatggagtaccatgccgatgccgccacacgccagctgttccagagactgacggtgaccatcaagaggttcccgtacccgccgttcatcgcagaccccttcctcgtggccatccagtaccagctgcccctgctgctgctgctcagcttcacctacaccgcgctcaccattgcccgtgctgtcgtgcaggagaaggaaaggaggctgaaggagtacatgcgcatgatggggctcagcagctggctgcactggagtgcctggttcctcttgttcttcctcttcctcctcatcgccgcctccttcatgaccctgctcttctgtgtcaagccaacatggcagcagccttcggaggcttcctctacttcttcacctacatcccctacttcttcgtggcccctcggtacaactggatgactctgagccagaagctctgctcctgcctcctgtctaatgtcgccatggcaatgggagcccagctcattgggaaatttgaggcgaaaggcatgggcatccagtggcgagacctcctgagtcccgtcaacgtggacgacgacttctgcttcgggcaggtgctggggatgctgctgctggactctgtgctctatggcctggtgacctggtacatggaggccgtcttcccagggcagttcggcgtgcctcagccctggtacttcttcatcatgccctcctattggtgtgggaagccaagggcggttgcagggaaggaggaagaagacagtgaccccgagaaagcactcagaaacgagtactttgaagccgagccagaggacctggtggcggggatcaagatcaagcacctgtccaaggtgttcagggtgggaaataaggacagggcggccgtcagagacctgaacctcaacctgtacgagggacagatcaccgtcctgctgggccacaacggtgccgggaagaccaccaccctctccatgctcacaggtctctttccccccaccagtggacgggcatacatcagcgggtatgaaatttcccaggacatggttcagatccggaagagcctgggcctgtgcccgcagcacgacatcctgtttgacaacttgacagtcgcagagcacctttatttctacgcccagctgaagggcctgtcacgtcagaagtgccctgaagaagtcaagcagatgctgcacatcatcggcctggaggacaagtggaactcacggagccgcttcctgagcgggggcatgaggcgcaagctctccatcggcatcgccctcatcgcaggctccaaggtgctgatactggacgagcccacctcgggcatggacgccatctccaggagggccatctgggatcttcttcagcggcagaaaagtgaccgcaccatcgtgctgaccacccacttcatggacgaggctgacctgctgggagaccgcatcgccatcatggccaagggggagctgcagtgctgcgggtcctcgctgttcctcaagcagaaatacggtgccggctatcacatgacgctggtgaaggagccgcactgcaacccggaagacatctcccagctggtccaccaccacgtgcccaacgccacgctggagagcagcgctggggccgagctgtctttcatccttcccagagagagcacgcacaggtttgaaggtctctttgctaaactggagaagaagcagaaagagctgggcattgccagctttggggcatccatcaccaccatggaggaagtcttccttcgggtcgggaagctggtggacagcagtatggacatccaggccatccagctccctgccctgcagtaccagcacgagaggcgcgccagcgactgggctgtggacagcaacctctgtggggccatggacccctccgacggcattggagccctcatcgaggaggagcgcaccgctgtcaagctcaacactgggctcgccctgcactgccagcaattctgggccatgttcctgaagaaggccgcatacagctggcgcgagtggaaaatggtggcggcacaggtcctggtgcctctgacctgcgtcaccctggccctcctggccatcaactactcctcggagctcttcgacgaccccatgctgaggctgaccttgggcgagtacggcagaaccgtcgtgcccttctcagttcccgggacctcccagctgggtcagcagctgtcagagcatctgaaagacgcactgcaggctgagggacaggagccccgcgaggtgctcggtgacctggaggagttcttgatcttcagggcttctgtggaggggggcggctttaatgagcggtgccttgtggcagcgtccttcagagatgtgggagagcgcacggtcgtcaacgccttgttcaacaaccaggcgtaccactctccagccactgccctggccgtcgtggacaaccttctgttcaagctgctgtgcgggcctcacgcctccattgtggtctccaacttcccccagccccggagcgccctgcaggctgccaaggaccagtttaacgagggccggaagggattcgacattgccctcaacctgctcttcgccatggcattcttggccagcacgttctccatcctggcggtcagcgagagggccgtgcaggccaagcatgtgcagtttgtgagtggagtccacgtggccagtttctggctctctgctctgctgtgggacctcatctccttcctcatccccagtctgctgctgctggtggtgtttaaggccttcgacgtgcgtgccttcacgcgggacggccacatggctgacaccctgctgctgctcctgctctacggctgggccatcatccccctcatgtacctgatgaacttcttcttcttgggggcggccactgcctacacgaggctgaccatcttcaacatcctgtcaggcatcgccaccttcctgatggtcaccatcatgcgcatcccagctgtaaaactggaagaactttccaaaaccctggatcacgtgttcctggtgctgcccaaccactgtctggggatggcagtcagcagtttctacgagaactacgagacgcggaggtactgcacctcctccgaggtcgccgcccactactgcaagaaatataacatccagtaccaggagaacttctatgcctggagcgccccgggggtcggccggtttgtggcctccatggccgcctcagggtgcgcctacctcatcctgctcttcctcatcgagaccaacctgcttcagagactcaggggcatcctctgcgccctccggaggaggcggacactgacagaattatacacccggatgcctgtgcttcctgaggaccaagatgtagcggacgagaggacccgcatcctggcccccagcccggactccctgctccacacacctctgattatcaaggagctctccaaggtgtacgagcagcgggtgcccctcctggccgtggacaggctctccctcgcggtgcagaaaggggagtgcttcggcctgctgggcttcaatggagccgggaagaccacgactttcaaaatgctgaccggggaggagagcctcacttctggggatgcctttgtcgggggtcacagaatcagctctgatgtcggaaaggtgcggcagcggatcggctactgcccgcagtttgatgccttgctggaccacatgacaggccgggagatgctggtcatgtacgctcggctccggggcatccctgagcgccacatcggggcctgcgtggagaacactctgcggggcctgctgctggagccacatgccaacaagctggtcaggacgtacagtggtggtaacaagcggaagctgagcaccggcatcgccctgatcggagagcctgctgtcatcttcctggacgagccgtccactggcatggaccccgtggcccggcgcctgctttgggacaccgtggcacgagcccgagagtctggcaaggccatcatcatcacctcccacagcatggaggagtgtgaggccctgtgcacccggctggccatcatggtgcaggggcagttcaagtgcctgggcagcccccagcacctcaagagcaagttcggcagcggctactccctgcgggccaaggtgcagagtgaagggcaacaggaggcgctggaggagttcaaggccttcgtggacctgacctttccaggcagcgtcctggaagatgagcaccaaggcatggtccattaccacctgccgggccgtgacctcagctgggcgaaggttttcggtattctggagaaagccaaggaaaagtacggcgtggacgactactccgtgagccagatctcgctggaacaggtcttcctgagcttcgcccacctgcagccgcccaccgcagaggaggggcgatgaggggtggcggctgtctcgccatcaggcagggacaggacgggcaagcagggcccatcttacatcctctctctccaagtttatctcatcctttatttttaatcacttttttctatgatggatatgaaaaattcaaggcagtatgcacagaatggacgagtgcagcccagccctcatgcccaggatcagcatgcgcatctccatgtctgcatactctggagttcactttcccagagctggggcaggccgggcagtctgcgggcaagctccggggtctctgggtggagagctgacccaggaagggctgcagctgagctgggggttgaatttctccaggcactccctggagagaggacccagtgacttgtccaagtttacacacgacactaatctcccctggggaggaagcgggaagccagccaggttgaactgtagcgaggcccccaggccgccaggaatggaccatgcagatcactgtcagtggagggaagctgctgactgtgattaggtgctggggtcttagcgtccagcgcagcccgggggcatcctggaggctctgctccttagggcatggtagtcaccgcgaagccgggcaccgtcccacagcatctcctagaagcagccggcacaggagggaaggtggccaggctcgaagcagtctctgtttccagcactgcaccctcaggaagtcgcccgccccaggacacgcagggaccaccctaagggctgggtggctgtctcaaggacacattgaatacgttgtgaccatccagaaaataaatgctgaggggacaca

SEQ ID NO: 303441 - DNA, 5470 bp, Homo sapiens
gggcctgtgttcaacgcaactggtacggcggcgttgggccaacgcccgtacatgtggacccaaacaggctcctttttcctgaaagagacagaaggctggcacactacttcccttttcccgcttttcccaaacccaggaccaagggaacctacatcccctgatggcggagaacctgggtacatccgggaaggcttcctggccgtgcagcatgctgtggaccgggccatcatggagtaccatgccgatgccgccacacgccagctgttccagagactgacggtgaccatcaagaggttcccgtacccgccgttcatcgcagaccccttcctcgtggccatccagtaccagctgcccctgctgctgctgctcagcttcacctacaccgcgctcaccattgcccgtgctgtcgtgcaggagaaggaaaggaggctgaaggagtacatgcgcatgatggggctcagcagctggctgcactggagtgcctggttcctcttgttcttcctcttcctcctcatcgccgcctccttcatgaccctgctcttctgtgtcaaggtgaagccaaatgtagccgtgctgtcccgcagcgacccctccctggtgctcgccttcctgctgtgcttcgccatctctaccatctccttcagcttcatggtcagcaccttcttcagcaaagccaacatggcagcagccttcggaggcttcctctacttcttcacctacatcccctacttcttcgtggcccctcggtacaactggatgactctgagccagaagctctgctcctgcctcctgtctaatgtcgccatggcaatgggagcccagctcattgggaaatttgaggcgaaaggcatgggcatccagtggcgagacctcctgagtcccgtcaacgtggacgacgacttctgcttcgggcaggtgctggggatgctgctgctggactctgtgctctatggcctggtgacctggtacatggaggccgtcttcccagggcagttcggcgtgcctcagccctggtacttcttcatcatgccctcctattggtgtgggaagccaagggcggttgcagggaaggaggaagaagacagtgaccccgagaaagcactcagaaacgagtactttgaagccgagccagaggacctggtggcggggatcaagatcaagcacctgtccaaggtgttcagggtgggaaataaggacagggcggccgtcagagacctgaacctcaacctgtacgagggacagatcaccgtcctgctgggccacaacggtgccgggaagaccaccaccctctccatgctcacaggtctctttccccccaccagtggacgggcatacatcagcgggtatgaaatttcccaggacatggttcagatccggaagagcctgggcctgtgcccgcagcacgacatcctgtttgacaacttgacagtcgcagagcacctttatttctacgcccagctgaagggcctgtcacgtcagaagtgccctgaagaagtcaagcagatgctgcacatcatcggcctggaggacaagtggaactcacggagccgcttcctgagcgggggcatgaggcgcaagctctccatcggcatcgccctcatcgcaggctccaaggtgctgatactggacgagcccacctcgggcatggacgccatctccaggagggccatctgggatcttcttcagcggcagaaaagtgaccgcaccatcgtgctgaccacccacttcatggacgaggctgacctgctgggagaccgcatcgccatcatggccaagggggagctgcagtgctgcgggtcctcgctgttcctcaagcagaaatacggtgccggctatcacatgacgctggtgaaggagccgcactgcaacccggaagacatctcccagctggtccaccaccacgtgcccaacgccacgctggagagcagcgctggggccgagctgtctttcatccttcccagagagagcacgcacaggtttgaaggtctctttgctaaactggagaagaagcagaaagagctgggcattgccagctttggggcatccatcaccaccatggaggaagtcttccttcgggtcgggaagctggtggacagcagtatggacatccaggccatccagctccctgccctgcagtaccagcacgagaggcgcgccagcgactgggctgtggacagcaacctctgtggggccatggacccctccgacggcattggagccctcatcgaggaggagcgcaccgctgtcaagctcaacactgggctcgccctgcactgccagcaattctgggccatgttcctgaagaaggccgcatacagctggcgcgagtggaaaatggtggcggcacaggtcctggtgcctctgacctgcgtcaccctggccctcctggccatcaactactcctcggagctcttcgacgaccccatgctgaggctgaccttgggcgagtacggcagaaccgtcgtgcccttctcagttcccgggacctcccagctgggtcagcagctgtcagagcatctgaaagacgcactgcaggctgagggacaggagccccgcgaggtgctcggtgacctggaggagttcttgatcttcagggcttctgtggaggggggcggctttaatgagcggtgccttgtggcagcgtccttcagagatgtgggagagcgcacggtcgtcaacgccttgttcaacaaccaggcgtaccactctccagccactgccctggccgtcgtggacaaccttctgttcaagctgctgtgcgggcctcacgcctccattgtggtctccaacttcccccagccccggagcgccctgcaggctgccaaggaccagtttaacgagggccggaagggattcgacattgccctcaacctgctcttcgccatggcattcttggccagcacgttctccatcctggcggtcagcgagagggccgtgcaggccaagcatgtgcagtttgtgagtggagtccacgtggccagtttctggctctctgctctgctgtgggacctcatctccttcctcatccccagtctgctgctgctggtggtgtttaaggccttcgacgtgcgtgccttcacgcgggacggccacatggctgacaccctgctgctgctcctgctctacggctgggccatcatccccctcatgtacctgatgaacttcttcttcttgggggcggccactgcctacacgaggctgaccatcttcaacatcctgtcaggcatcgccaccttcctgatggtcaccatcatgcgcatcccagctgtaaaactggaagaactttccaaaaccctggatcacgtgttcctggtgctgcccaaccactgtctggggatggcagtcagcagtttctacgagaactacgagacgcggaggtactgcacctcctccgaggtcgccgcccactactgcaagaaatataacatccagtaccaggagaacttctatgcctggagcgccccgggggtcggccggtttgtggcctccatggccgcctcagggtgcgcctacctcatcctgctcttcctcatcgagaccaacctgcttcagagactcaggggcatcctctgcgccctccggaggaggcggacactgacagaattatacacccggatgcctgtgcttcctgaggaccaagatgtagcggacgagaggacccgcatcctggcccccagcccggactccctgctccacacacctctgattatcaaggagctctccaaggtgtacgagcagcgggtgcccctcctggccgtggacaggctctccctcgcggtgcagaaaggggagtgcttcggcctgctgggcttcaatggagccgggaagaccacgactttcaaaatgctgaccggggaggagagcctcacttctggggatgcctttgtcgggggtcacagaatcagctctgatgtcggaaaggtgcggcagcggatcggctactgcccgcagtttgatgccttgctggaccacatgacaggccgggagatgctggtcatgtacgctcggctccggggcatccctgagcgccacatcggggcctgcgtggagaacactctgcggggcctgctgctggagccacatgccaacaagctggtcaggacgtacagtggtggtaacaagcggaagctgagcaccggcatcgccctgatcggagagcctgctgtcatcttcctggacgagccgtccactggcatggaccccgtggcccggcgcctgctttgggacaccgtggcacgagcccgagagtctggcaaggccatcatcatcacctcccacagcatggaggagtgtgaggccctgtgcacccggctggccatcatggtgcaggggcagttcaagtgcctgggcagcccccagcacctcaagagcaagttcggcagcggctactccctgcgggccaaggtgcagagtgaagggcaacaggaggcgctggaggagttcaaggccttcgtggacctgacctttccaggcagcgtcctggaagatgagcaccaaggcatggtccattaccacctgccgggccgtgacctcagctgggcgaaggttttcggtattctggagaaagccaaggaaaagtacggcgtggacgactactccgtgagccagatctcgctggaacaggtcttcctgagcttcgcccacctgcagccgcccaccgcagaggaggggcgatgaggggtggcggctgtctcgccatcaggcagggacaggacgggcaagcagggcccatcttacatcctctctctccaagtttatctcatcctttatttttaatcacttttttctatgatggatatgaaaaattcaaggcagtatgcacagaatggacgagtgcagcccagccctcatgcccaggatcagcatgcgcatctccatgtctgcatactctggagttcactttcccagagctggggcaggccgggcagtctgcgggcaagctccggggtctctgggtggagagctgacccaggaagggctgcagctgagctgggggttgaatttctccaggcactccctggagagaggacccagtgacttgtccaagtttacacacgacactaatctcccctggggaggaagcgggaagccagccaggttgaactgtagcgaggcccccaggccgccaggaatggaccatgcagatcactgtcagtggagggaagctgctgactgtgattaggtgctggggtcttagcgtccagcgcagcccgggggcatcctggaggctctgctccttagggcatggtagtcaccgcgaagccgggcaccgtcccacagcatctcctagaagcagccggcacaggagggaaggtggccaggctcgaagcagtctctgtttccagcactgcaccctcaggaagtcgcccgccccaggacacgcagggaccaccctaagggctgggtggctgtctcaaggacacattgaatacgttgtgaccatccagaaaataaatgctgaggggacaca

SEQ ID NO: 303442 - DNA, 5495 bp, Homo sapiens
atagggttcgtccgaccagcgtcgggcggtgcgtcgccatacgggttgcagccgcggcctccaggcggcacgcagctgtcagtgccgccgcaactgcgaggctggagcggatgcccgagtggccgagggaggggacccctgcgagagggcccgcgcgccggccgccgcgccccggcgcccaggctcggtgctggagagtcatgcctgtgagccctgggcacctcctgatgtcctgcgaggtcacggtgttcccaaacctcagggttgccctgccccactccagaggctctcaggccccaccccggagccctctgtgcggagccgcctcctcctggccagttccccagtagtcctgaagggagacctgctgtgtggagcctcttctgggacccagccatgagtgtggagctgagcaactgaacctgaaactcttccactgtgagtcaaggaggcttttccgcacatgaaggacgctgagcgggaaggactcctctctgcctgcagttgtagcgagtggaccagcaccaggggctctctagactgcccctcctccatcgccttccctgcctctccaggacagagcagccacgtctgcacacctcgccctctttacactcagttttcagagcacgtttctcctatttcctgcgggttgcagcgcctacttgaacttactcagaccacctacttctctagcagcactgggcgtccctttcagcaagacgatggctgtgctcaggcagctggcgctcctcctctggaagaactacaccctgcagaagcggaaggtcctggtgacggtcctggaactcttcctgccattgctgttttctgggatcctcatctggctccgcttgaagattcagtcggaaaatgtgcccaacgccaccatctacccgggccagtccatccaggagctgcctctgttcttcaccttccctccgccaggagacacctgggagcttgcctacatcccttctcacagtgacgctgccaagaccgtcactgagacagtgcgcagggcacttgtgatcaacatgcgagtgcgcggctttccctccgagaaggactttgaggactacattaggtacgacaactgctcgtccagcgtgctggccgccgtggtcttcgagcaccccttcaaccacagcaaggagcccctgccgctggcggtgaaatatcacctacggttcagttacacacggagaaattacatgtggacccaaacaggctcctttttcctgaaagagacagaaggctggcacactacttcccttttcccgcttttcccaaacccaggaccaagggaacctacatcccctgatggcggagaacctgggtacatccgggaaggcttcctggccgtgcagcatgctgtggaccgggccatcatggagtaccatgccgatgccgccacacgccagctgttccagagactgacggtgaccatcaagaggttcccgtacccgccgttcatcgcagaccccttcctcgtggccatccagtaccagctgcccctgctgctgctgctcagcttcacctacaccgcgctcaccattgcccgtgctgtcgtgcaggagaaggaaaggaggctgaaggagtacatgcgcatgatggggctcagcagctggctgcactggagtgcctggttcctcttgttcttcctcttcctcctcatcgccgcctccttcatgaccctgctcttctgtgtcaaggtgaagccaaatgtagccgtgctgtcccgcagcgacccctccctggtgctcgccttcctgctgtgcttcgccatctctaccatctccttcagcttcatggtcagcaccttcttcagcaaagccaacatggcagcagccttcggaggcttcctctacttcttcacctacatcccctacttcttcgtggcccctcggtacaactggatgactctgagccagaagctctgctcctgcctcctgtctaatgtcgccatggcaatgggagcccagctcattgggaaatttgaggcgaaaggcatgggcatccagtggcgagacctcctgagtcccgtcaacgtggacgacgacttctgcttcgggcaggtgctggggatgctgctgctggactctgtgctctatggcctggtgacctggtacatggaggccgtcttcccagggcagttcggcgtgcctcagccctggtacttcttcatcatgccctcctattggtgtgggaagccaagggcggttgcagggaaggaggaagaagacagtgaccccgagaaagcactcagaaacgagtactttgaagccgagccagaggacctggtggcggggatcaagatcaagcacctgtccaaggtgttcagggtgggaaataaggacagggcggccgtcagagacctgaacctcaacctgtacgagggacagatcaccgtcctgctgggccacaacggtgccgggaagaccaccaccctctccatgctcacaggtctctttccccccaccagtggacgggcatacatcagcgggtatgaaatttcccaggacatggttcagatccggaagagcctgggcctgtgcccgcagcacgacatcctgtttgacaacttgacagtcgcagagcacctttatttctacgcccagctgaagggcctgtcacgtcagaagtgccctgaagaagtcaagcagatgctgcacatcatcggcctggaggacaagtggaactcacggagccgcttcctgagcgggggcatgaggcgcaagctctccatcggcatcgccctcatcgcaggctccaaggtgctgatactggacgagcccacctcgggcatggacgccatctccaggagggccatctgggatcttcttcagcggcagaaaagtgaccgcaccatcgtgctgaccacccacttcatggacgaggctgacctgctgggagaccgcatcgccatcatggccaagggggagctgcagtgctgcgggtcctcgctgttcctcaagcagaaatacggtgccggctatcacatgacgctggtgaaggagccgcactgcaacccggaagacatctcccagctggtccaccaccacgtgcccaacgccacgctggagagcagcgctggggccgagctgtctttcatccttcccagagagagcacgcacaggtttgaaggtctctttgctaaactggagaagaagcagaaagagctgggcattgccagctttggggcatccatcaccaccatggaggaagtcttccttcgggtcgggaagctggtggacagcagtatggacatccaggccatccagctccctgccctgcagtaccagcacgagaggcgcgccagcgactgggctgtggacagcaacctctgtggggccatggacccctccgacggcattggagccctcatcgaggaggagcgcaccgctgtcaagctcaacactgggctcgccctgcactgccagcaattctgggccatgttcctgaagaaggccgcatacagctggcgcgagtggaaaatggtggcggcacaggtcctggtgcctctgacctgcgtcaccctggccctcctggccatcaactactcctcggagctcttcgacgaccccatgctgaggctgaccttgggcgagtacggcagaaccgtcgtgcccttctcagttcccgggacctcccagctgggtcagcagctgtcagagcatctgaaagacgcactgcaggctgagggacaggagccccgcgaggtgctcggtgacctggaggagttcttgatcttcagggcttctgtggaggggggcggctttaatgagcggtgccttgtggcagcgtccttcagagatgtgggagagcgcacggtcgtcaacgccttgttcaacaaccaggcgtaccactctccagccactgccctggccgtcgtggacaaccttctgttcaagctgctgtgcgggcctcacgcctccattgtggtctccaacttcccccagccccggagcgccctgcaggctgccaaggaccagtttaacgagggccggaagggattcgacattgccctcaacctgctcttcgccatggcattcttggccagcacgttctccatcctggcggtcagcgagagggccgtgcaggccaagcatgtgcagtttgtgagtggagtccacgtggccagtttctggctctctgctctgctgtgggacctcatctccttcctcatccccagtctgctgctgctggtggtgtttaaggccttcgacgtgcgtgccttcacgcgggacggccacatggctgacaccctgctgctgctcctgctctacggctgggccatcatccccctcatgtacctgatgaacttcttcttgtgtacgagcagcgggtgcccctcctggccgtggacaggctctccctcgcggtgcagaaaggggagtgcttcggcctgctgggcttcaatggagccgggaagaccacgactttcaaaatgctgaccggggaggagagcctcacttctggggatgcctttgtcgggggtcacagaatcagctctgatgtcggaaaggtgcggcagcggatcggctactgcccgcagtttgatgccttgctggaccacatgacaggccgggagatgctggtcatgtacgctcggctccggggcatccctgagcgccacatcggggcctgcgtggagaacactctgcggggcctgctgctggagccacatgccaacaagctggtcaggacgtacagtggtggtaacaagcggaagctgagcaccggcatcgccctgatcggagagcctgctgtcatcttcctggacgagccgtccactggcatggaccccgtggcccggcgcctgctttgggacaccgtggcacgagcccgagagtctggcaaggccatcatcatcacctcccacagcatggaggagtgtgaggccctgtgcacccggctggccatcatggtgcaggggcagttcaagtgcctgggcagcccccagcacctcaagagcaagttcggcagcggctactccctgcgggccaaggtgcagagtgaagggcaacaggaggcactccctggagagaggacccagtgacttgtccaagtttacacacgacactaatctcccctggggaggaagcgggaagccagccaggttgaactgtagcgaggcccccaggccgccaggaatggaccatgcagatcactgtcagtggagggaagctgctgactgtgattaggtgctggggtcttagcgtccagcgcagcccgggggcatcctggaggctctgctccttagggcatggtagtcaccgcgaagccgggcaccgtcccacagcatctcctagaagcagccggcacaggagggaaggtggccaggctcgaagcagtctctgtttccagcactgcaccctcaggaagtcgcccgccccaggacacgcagggaccaccctaagggctgggtggctgtctcaaggacacattgaatacgttgtgaccatccagaaaataaatgctgaggggacaca

SEQ ID NO: 303443 - DNA, 1293 bp, Homo sapiens
cagtgagctatgattgtgccactgcactccagcctgggctacagagcaagactctctctaaaaaaatatgggggaaaaaaagaactggctcagaaagggaacatcactggctcaaggttgtaatctgagctgggaacagcacagggaggaggctgggccccatccccgctggctcctgcttagccagcgtcctctacctgggagcacggtgccgtcgcagggctgacctctctggggctctggggtggcgctgggcaggggtaggattgtgggggcctcatcagcccctattgccagaggactcccaggtcccgcagaggagcctgggccctgttctctcctaccagtgacttttctgctccccaaaggttttcggtattctggagaaagccaaggaaaagtacggcgtggacgactactccgtgagccagatctcgctggaacaggtcttcctgagcttcgcccacctgcagccgcccaccgcagaggaggggcgatgaggggtggcggctgtctcgccatcaggcagggacaggacgggcaagcagggcccatcttacatcctctctctccaagtttatctcatcctttatttttaatcacttttttctatgatggatatgaaaaattcaaggcagtatgcacagaatggacgagtgcagcccagccctcatgcccaggatcagcatgcgcatctccatgtctgcatactctggagttcactttcccagagctggggcaggccgggcagtctgcgggcaagctccggggtctctgggtggagagctgacccaggaagggctgcagctgagctgggggttgaatttctccaggcactccctggagagaggacccagtgacttgtccaagtttacacacgacactaatctcccctggggaggaagcgggaagccagccaggttgaactgtagcgaggcccccaggccgccaggaatggaccatgcagatcactgtcagtggagggaagctgctgactgtgattaggtgctggggtcttagcgtccagcgcagcccgggggcatcctggaggctctgctccttagggcatggtagtcaccgcgaagccgggcaccgtcccacagcatctcctagaagcagccggcacaggagggaaggtggccaggctcgaagcagtctctgtttccagcactgcaccctcaggaagtcgcccgccccaggacacgcagggaccaccctaagggctgggtggctgtctcaaggacacattgaatacgttgtgaccatccagaaaataaatgctgaggggacaca

SEQ ID NO: 303444 - DNA, 5490 bp, Homo sapiens
  misc_feature (5462)..(5462): n is a, c, g, or t
  misc_feature (5486)..(5486): n is a, c, g, or t
atagggttcgtccgaccagcgtcgggcggtgcgtcgccatacgggttgcagccgcggcctccaggcggcacgcagctgtcagtgccgccgcaactgcgaggctggagcggatgcccgagtggccgagggaggggacccctgcgagagggcccgcgcgccggccgccgcgccccggcgcccaggctcggtgctggagagtcatgcctgtgagccctgggcacctcctgatgtcctgcgaggtcacggtgttcccaaacctcagggttgccctgccccactccagaggctctcaggccccaccccggagccctctgtgcggagccgcctcctcctggccagttccccagtagtcctgaagggagacctgctgtgtggagcctcttctgggacccagccatgagtgtggagctgagcaactgaacctgaaactcttccactgtgagtcaaggaggcttttccgcacatgaaggacgctgagcgggaaggactcctctctgcctgcagttgtagcgagtggaccagcaccaggggctctctagactgcccctcctccatcgccttccctgcctctccaggacagagcagccacgtctgcacacctcgccctctttacactcagttttcagagcacgtttctcctatttcctgcgggttgcagcgcctacttgaacttactcagaccacctacttctctagcagcactgggcgtccctttcagcaagacgatggctgtgctcaggcagctggcgctcctcctctggaagaactacaccctgcagaagcggaaggtcctggtgacggtcctggaactcttcctgccattgctgttttctgggatcctcatctggctccgcttgaagattcagtcggaaaatgtgcccaacgccaccatctacccgggccagtccatccaggagctgcctctgttcttcaccttccctccgccaggagacacctgggagcttgcctacatcccttctcacagtgacgctgccaagaccgtcactgagacagtgcgcagggcacttgtgatcaacatgcgagtgcgcggctttccctccgagaaggactttgaggactacattaggtacgacaactgctcgtccagcgtgctggccgccgtggtcttcgagcaccccttcaaccacagcaaggagcccctgccgctggcggtgaaatatcacctacggttcagttacacacggagaaattacatgtggacccaaacaggctcctttttcctgaaagagacagaaggctggcacactacttcccttttcccgcttttcccaaacccaggaccaagggaacctacatcccctgatggcggagaacctgggtacatccgggaaggcttcctggccgtgcagcatgctgtggaccgggccatcatggagtaccatgccgatgccgccacacgccagctgttccagagactgacggtgaccatcaagaggttcccgtacccgccgttcatcgcagaccccttcctcgtggccatccagtaccagctgcccctgctgctgctgctcagcttcacctacaccgcgctcaccattgcccgtgctgtcgtgcaggagaaggaaaggaggctgaaggagtacatgcgcatgatggggctcagcagctggctgcactggagtgcctggttcctcttgttcttcctcttcctcctcatcgccgcctccttcatgaccctgctcttctgtgtcaaggtgaagccaaatgtagccgtgctgtcccgcagcgacccctccctggtgctcgccttcctgctgtgcttcgccatctctaccatctccttcagcttcatggtcagcaccttcttcagcaaagccaacatggcagcagccttcggaggcttcctctacttcttcacctacatcccctacttcttcgtggcccctcggtacaactggatgactctgagccagaagctctgctcctgcctcctgtctaatgtcgccatggcaatgggagcccagctcattgggaaatttgaggcgaaaggcatgggcatccagtggcgagacctcctgagtcccgtcaacgtggacgacgacttctgcttcgggcaggtgctggggatgctgctgctggactctgtgctctatggcctggtgacctggtacatggaggccgtcttcccagggcagttcggcgtgcctcagccctggtacttcttcatcatgccctcctattggtgtgggaagccaagggcggttgcagggaaggaggaagaagacagtgaccccgagaaagcactcagaaacgagtactttgaagccgagccagaggacctggtggcggggatcaagatcaagcacctgtccaaggtgttcagggtgggaaataaggacagggcggccgtcagagacctgaacctcaacctgtacgagggacagatcaccgtcctgctgggccacaacggtgccgggaagaccaccaccctctccatgctcacaggtctctttccccccaccagtggacgggcatacatcagcgggtatgaaatttcccaggacatggttcagatccggaagagcctgggcctgtgcccgcagcacgacatcctgtttgacaacttgacagtcgcagagcacctttatttctacgcccagctgaagggcctgtcacgtcagaagtgccctgaagaagtcaagcagatgctgcacatcatcggcctggaggacaagtggaactcacggagccgcttcctgagcgggggcatgaggcgcaagctctccatcggcatcgccctcatcgcaggctccaaggtgctgatactggacgagcccacctcgggcatggacgccatctccaggagggccatctgggatcttcttcagcggcagaaaagtgaccgcaccatcgtgctgaccacccacttcatggacgaggctgacctgctgggagaccgcatcgccatcatggccaagggggagctgcagtgctgcgggtcctcgctgttcctcaagcagaaatacggtgccggctatcacatgacgctggtgaaggagccgcactgcaacccggaagacatctcccagctggtccaccaccacgtgcccaacgccacgctggagagcagcgctggggccgagctgtctttcatccttcccagagagagcacgcacaggtttgaaggtctctttgctaaactggagaagaagcagaaagagctgggcattgccagctttggggcatccatcaccaccatggaggaagtcttccttcgggtcgggaagctggtggacagcagtatggacatccaggccatccagctccctgccctgcagtaccagcacgagaggcgcgccagcgactgggctgtggacagcaacctctgtggggccatggacccctccgacggcattggagccctcatcgaggaggagcgcaccgctgtcaagctcaacactgggctcgccctgcactgccagcaattctgggccatgttcctgaagaaggccgcatacagctggcgcgagtggaaaatggtggcggcacaggtcctggtgcctctgacctgcgtcaccctggccctcctggccatcaactactcctcggagctcttcgacgaccccatgctgaggctgaccttgggcgagtacggcagaaccgtcgtgcccttctcagttcccgggacctcccagctgggtcagcagctgtcagagcatctgaaagacgcactgcaggctgagggacaggagccccgcgaggtgctcggtgacctggaggagttcttgatcttcagggcttctgtggaggggggcggctttaatgagcggtgccttgtggcagcgtccttcagagatgtgggagagcgcacggtcgtcaacgccttgttcaacaaccaggcgtaccactctccagccactgccctggccgtcgtggacaaccttctgttcaagctgctgtgcgggcctcacgcctccattgtggtctccaacttcccccagccccggagcgccctgcaggctgccaaggaccagtttaacgagggccggaagggattcgacattgccctcaacctgctcttcgccatggcattcttggccagcacgttctccatcctggcggtcagcgagagggccgtgcaggccaagcatgtgcagtttgtgagtggagtccacgtggccagtttctggctctctgctctgctgtgggacctcatctccttcctcatccccagtctgctgctgctggtggtgtttaaggccttcgacgtgcgtgccttcacgcgggacggccacatggctgacaccctgctgctgctcctgctctacggctgggccatcatccccctcatgtacctgatgaacttcttcttcttgggggcggccactgcctacacgaggctgaccatcttcaacatcctgtcaggcatcgccaccttcctgatggtcaccatcatgcgcatcccagctgtaaaactggaagaactttccaaaaccctggatcacgtgttcctggtgctgcccaaccactgtctggggatggcagtcagcagtttctacgagaactacgagacgcggaggtactgcacctcctccgaggtcgccgcccactactgcaagaaatataacatccagtaccaggagaacttctatgcctggagcgccccgggggtcggccggtttgtggcctccatggccgcctcagggtgcgcctacctcatcctgctcttcctcatcgagaccaacctgcttcagagactcaggggcatcctctgcgccctccggaggaggcggacactgacagaattatacacccggatgcctgtgcttcctgaggaccaagatgtagcggacgagaggacccgcatcctggcccccagcccggactccctgctccacacacctctgattatcaaggagctctccaaggtgtacgagcagcgggtgcccctcctggccgtggacaggctctccctcgcggtgcagaaaggggagtgcttcggcctgctgggcttcaatggagccgggaagaccacgactttcaaaatgctgaccggggaggagagcctcacttctggggatgcctttgtcgggggtcacagaatcagctctgatgtcggaaaggtgcggcagcggatcggctactgcccgcagtttgatgccttgctggaccacatgacaggccgggagatgctggtcatgtacgctcggctccggggcatccctgagcgccacatcggggcctgcgtggagaacactctgcggggcctgctgctggagccacatgccaacaagctggtcaggacgtacagtggtggtaacaagcggaagctgagcaccggcatcgccctgatcggagagcctgctgtcatcttcctggacgagccgtccactggcatggaccccgtggcccggcgcctgctttgggacaccgtggcacgagcccgagagtctggcaaggccatcatcatcacctcccaaaagcatggggagggagttttnagggccctggttgcaacccggggntggg

SEQ ID NO: 303445 - DNA, 1225 bp, Homo sapiens
atagggttcgtccgaccagcgtcgggcggtgcgtcgccatacgggttgcagccgcggcctccaggcggcacgcagctgtcagtgccgccgcaactgcgaggctggagcggatgcccgagtggccgagggaggggacccctgcgagagggcccgcgcgccggccgccgcgccccggcgcccaggctcggtgctggagagtcatgcctgtgagccctgggcacctcctgatgtcctgcgaggtcacggtgttcccaaacctcagggttgccctgccccactccagaggctctcaggccccaccccggagccctctgtgcggagccgcctcctcctggccagttccccagtagtcctgaagggagacctgctgtgtggagcctcttctgggacccagccatgagtgtggagctgagcaactgaacctgaaactcttccactgtgagtcaaggaggcttttccgcacatgaaggacgctgagcgggaaggactcctctctgcctgcagttgtagcgagtggaccagcaccaggggctctctagactgcccctcctccatcgccttccctgcctctccaggacagagcagccacgtctgcacacctcgccctctttacactcagttttcagagcacgtttctcctatttcctgcgggttgcagcgcctacttgaacttactcagaccacctacttctctagcagcactgggcgtccctttcagcaagacgatggctgtgctcaggcagctggcgctcctcctctggaagaactacaccctgcagaagcggaaggtcctggtgacggtcctggaactcttcctgccattgctgttttctgggatcctcatctggctccgcttgaagattcagtcggaaaatgtgcccaacgccaccatctacccgggccagtccatccaggagctgcctctgttcttcaccttccctccgccaggagacacctgggagcttgcctacatcccttctcacagtgacgctgccaagaccgtcactgagacagtgcgcagggcacttgtgatcaacatgcgagtgcgcggtgttggatgcagtctggccttggggaagtgacctgtgctctctgtgcctcagtttccccatctgtgaaatggggacaataatggaacccacttcaaagggctgttatgggaatacactgggtggctgcctgcagagtgctgggaatgcggcgttggatgcagtcgggtaccgag

SEQ ID NO: 303446 - DNA, 235 bp, Homo sapiens
ccctagaggatttgccgtctttcatctgccagtgacctgaaccacgcagatttttcaagcaggagggccgattgggcaaccacagctcccgtgctctctctttgcagtgcgcggctttccctccgagaaggactttgaggactacattaggtacgacaactgctcgtccagcgtgctggccgccgtggtcttcgagcaccccttcaaccacagcaaggagcccctgccgctggcg

SEQ ID NO: 303447 - DNA, 3445 bp, Homo sapiens
agcggagcgggtcctgccgcgccggcagccacaggctggcatagcggctgccgacccgccctcgttcctccaccccctgcacgggactgctgggcccgccccgccccgcctgcaggtgaagcggccgcagccgccgagtaggtgcgtggggatgatctcactcgcgcgctccgcgccaggaggaggaggagcgggagcggatccaacttccgggtagtggagccgcaagccaccggcatcttgctttttcttccccctcctcctgtgtgccccgcgccgctccctctttcccttttattcccggccccacccgccaaaatgaacagctcggacgaagagaagcagctgcagctcattaccagtctgaaggagcaagcaataggcgaatatgaagaccttagagcagagaaccagaaaacaaaggagaagtgtgacaaaattaggcaagaacgagatgaagccgttaaaaaactggaagaatttcagaaaatttctcacatggtcatagaggaagttaatttcatgcagaaccatcttgaaatagagaagacttgtcgagaaagtgctgaagctttggcaacaaagctaaataaagaaaataaaacgttgaaaagaatcagcatgttgtacatggccaagctgggaccagatgtaataactgaagagataaacattgatgatgaagattcgactacagacacagacggtgccgccgagacttgtgtctcagtacagtgtcagaagcaaattaaagaacttcgagatcaaattgtatctgttcaggaggaaaagaagattttagccattgagctggaaaatctcaagagcaaactcgtagaagtaattgaagaagtaaataaagttaaacaagaaaagactgttttaaattcagaagttcttgaacagagaaaagtcttagaaaaatgcaatagagtgtccatgttagctgtagaagagtatgaggagatgcaagtaaacctggagctggagaaggaccttcgaaagaaagcagagtcatttgcacaagagatgttcattgagcaaaacaagctaaagagacaaagccaccttctgctgcagagctccatccctgatcagcagcttttgaaagctttagacgaaaatgcaaaactcacccagcaacttgaagaagagagaattcagcatcaacaaaaggtcaaagaattagaagagcaactagaaaatgaaacactccacaaagaaatacacaacctcaaacagcaactggagcttctagaggaagataaaaaggaattggaattgaaatatcagaattctgaagagaaagccagaaatttaaagcactctgttgatgaactccagaaacgagtgaaccagtctgagaattcagtacctccaccacctcctcctccaccaccacttccccctccacctcccaatcctatccgatccctcatgtccatgatccggaaacgatcccaccccagtggcagtggtgctaagaaagaaaaggcaactcaaccagaaacaactgaagaagtcacagatctaaagaggcaagcagttgaagagatgatggatagaattaaaaagggagttcatcttagacccgttaatcagacagccagaccgaagacaaagccagaatcttcgaaaggctgcgaaagtgcagtggatgaactaaaaggaatactggcctcccagtagcattggatgcaggaaaaaatacattgacggtgaaaaacaagccgaaccagttgtagttttagatcctgtttctacacatgaaccccaaaccaaagaccaggttgctgaaaaagatccaactcaacacaaggaggatgaaggcgaaattcaaccagaaaacaaagaagacagcattgaaaacgtgagagagacagacagctccaactgctgatccataaaccagaagcctgacatgtttggaagtccttttcaataagcacatgattagtgttgttatattggcaagggctgtagacattctgctctggtcactgtattcagaatacaggttcttttctggtgtcacttttgtaagtagcaactataaacataagtaagctgtttagcaaaacacacattcctagtaggttttggttttttgatctttataaagatgaggtttttttcctagttactgtattaagtatgacttcttttagaaggttacaaaaaaattcagatgttgatacctttttaggaaatgtgcataccactcatcaaatggaatgctgaaagtttgaggtgcttgtatataatcggataaacaaaactgatcaacccaatgtgattttaaaagcccccaaagaagcttctgttttgggtctgatcctcttgatggagaaactgcagcagcatggaaattgttgggtactgtggcatacaagttattttctacagtagactgagataaactgaaaactcaggagctggcatcaaactcgtagtcccatagtcagtgttaattacacacattgttaactattggatgaaaaatacatgctattgattgtgtccaaagcctcccgaggacctccgtggggatgctctggtagcctgaatacagaactgaggtgaaagtccaaaccttgaattttacagtagtaagttggtaaaccatgtgctctgtgctatgagttaattatgttttcccaaatactaatgtggcacaagtaccatattttatcagagttcttatgtacagtatggtgaagataagtgacaagcacacatttttcttgcttcactgctgttctatattacacaggtttgttgttgttttttttaaaaaagaaattaagcagtagttagtctctaaaaatacaatgtttcaggctaccacagtgaataaatagaaatgtaatcagggattaaaaaaaaaacttatgcagcttttcaaagttgattgtttcaaaattggtgtttatttaaaataagtggtaatgtacttgaatgcactttttatgacaatgattcagtaatggtaattttactattaaagaaagtgaaaggtttagttttgttagcatggctcagcatgtagctgtcaggtgtttttcacctaagggcaaaagaaaatgatagtaataattgcagtagttgtattgtattgtatttttgcacgtgtggtaagcataggcttgaagaggtgggtaggcaggtacatgtacttcctaaatttggagataattatctttctgtaagttcgttatgcttgactgtttccatgttctcccaataatgattttatagttacttatcactttactcatggagaattaaaacgtaatgtttttcaactgtatctttctttaactggataatactgctatatgatatgcttactacagactgcattaattcacgaaacgaattctgttatgctgtaatttgaactctcctcaccacaacttattaaaaaggcaccaatagtttccca

SEQ ID NO: 303448 - DNA, 881 bp, Homo sapiens
agcggagcgggtcctgccgcgccggcagccacaggctggcatagcggctgccgacccgccctcgttcctccaccccctgcacgggactgctgggcccgccccgccccgcctgcaggtgaagcggccgcagccgccgagtaggtgcgtggggatgatctcactcgcgcgctccgcgccaggaggaggaggagcgggagcggatccaacttccgggtagtggagccgcaagccaccggcatcttgctttttcttccccctcctcctgtgtgccccgcgccgctccctctttcccttttattcccggccccacccgccaaaatgaacagctcggacgaagagaagcagctgcagctcattaccagtctgaaggagcaagcaataggcgaatatgaagaccttagagcagagaaccagaaaacaaaggagaagtgtgacaaaattaggcaagaacgagatgaagccgttaaaaaactggaagaatttcagaaaatttctcacatggtcatagaggaagttaatttcatgcagaaccatcttgaaatagagaagacttgtcgagaaagtgctgaagctttggcaacaaagctaaataaagaaaataaaacgttgaaaagaatcagcatgttgtacatggccaagctgggaccagatgtaataactgaagagataaacattgatgatgaagattcgactacagacacagacggtgccttgtacccgtacaaggccccgcgcgcacaaccacagccaggagcagcccctgccaccactgggccaccgtacaaggccccgcaggaccagccgaaggtgccccgggccgaggccagctgggtcaggtgtacccctagcctggggttgagtgaggagcggcacccccgtat

SEQ ID NO: 303449 - DNA, 588 bp, Homo sapiens
agcggagcgggtcctgccgcgccggcagccacaggctggcatagcggctgccgacccgccctcgttcctccaccccctgcacgggactgctgggcccgccccgccccgcctgcaggtgaagcggccgcagccgccgagtaggtgcgtggggatgatctcactcgcgcgctccgcgccaggaggaggaggagcgggagcggatccaacttccgggtagtggagccgcaagccaccggcatcttgctttttcttccccctcctcctgtgtgccccgcgccgctccctctttcccttttattcccggccccacccgccaaaatgaacagctcggacgaagagaagcagctgcagctcattaccagtctgaaggagcaagcaataggcgaatatgaagaccttagagcagagaaccagaaaacaaaggagaagtgtgacaaaattaggcaagaacgagatgaagccgttaaaaaactggaagaatttcagaaaatttatcacatggtgatcgcggaagttaatttgatgcctccccacactcatgttccgaagtgccgttgctgcatcaataaatctgttgatttgctgcca

SEQ ID NO: 303450 - DNA, 3759 bp, Homo sapiens
agcggagcgggtcctgccgcgccggcagccacaggctggcatagcggctgccgacccgccctcgttcctccaccccctgcacgggactgctgggcccgccccgccccgcctgcaggtgaagcggccgcagccgccgagtaggtgcgtggggatgatctcactcgcgcgctccgcgccaggaggaggaggagcgggagcggatccaacttccgggtagtggagccgcaagccaccggcatcttgctttttcttccccctcctcctgtgtgccccgcgccgctccctctttcccttttattcccggccccacccgccaaaatgaacagctcggacgaagagaagcagctgcagctcattaccagtctgaaggagcaagcaataggcgaatatgaagaccttagagcagagaaccagaaaacaaaggagaagtgtgacaaaattaggcaagaacgagatgaagccgttaaaaaactggaagaatttcagaaaatttctcacatggtcatagaggaagttaatttcatgcagaaccatcttgaaatagagaagacttgtcgagaaagtgctgaagctttggcaacaaagctaaataaagaaaataaaacgttgaaaagaatcagcatgttgtacatggccaagctgggaccagatgtaataactgaagagataaacattgatgatgaagattcgactacagacacagacggtgccgccgagacttgtgtctcagtacagtgtcagaagcaaattaaagaacttcgagatcaaattgtatctgttcaggaggaaaagaagattttagccattgagctggaaaatctcaagagcaaactcgtagaagtaattgaagaagtaaataaagttaaacaagaaaagactgttttaaattcagaagttcttgaacagagaaaagtcttagaaaaatgcaatagagtgtccatgttagctgtagaagagtatgaggagatgcaagtaaacctggagctggagaaggaccttcgaaagaaagcagagtcatttgcacaagagatgttcattgagcaaaacaagctaaagagacaaagccaccttctgctgcagagctccatccctgatcagcagcttttgaaagctttagacgaaaatgcaaaactcacccagcaacttgaagaagagagaattcagcatcaacaaaaggtcaaagaattagaagagcaactagaaaatgaaacactccacaaagaaatacacaacctcaaacagcaactggagcttctagaggaagataaaaaggaattggaattgaaatatcagaattctgaagagaaagccagaaatttaaagcactctgttgatgaactccagaaacgagtgaaccagtctgagaattcagtacctccaccacctcctcctccaccaccacttccccctccacctcccaatcctatccgatccctcatgtccatgatccggaaacgatcccaccccagtggcagtggtgctaagaaagaaaaggcaactcaaccagaaacaactgaagaagtcacagatctaaagaggcaagcagttgaagagatgatggatagaattaaaaagggagttcatcttagacccgttaatcagacagccagaccgaagacaaagccagaatcttcgaaaggctgcgaaagtgcagtggatgaactaaaaggaatactggggacacttaacaaatccactagttcaagaagcttaaaatcccttgaccctgaaaacagtgaaactgagttagaaaggattttgcgtcgcagaaaggtgacagcagaagcagatagcagtagtccaactgggatattagccacctcagagtccaaatccatgccagtgttgggttctgtatccagtgtaacaaaaacagccttgaacaagaaaactctggaggcagaattcaacagcccgtcccccccaacacctgagccaggtgaagggccccgtaaattggaaggatgcacaagttccaaggttacgtttcagcctcccagtagcattggatgcaggaaaaaatacattgacggtgaaaaacaagccgaaccagttgtagttttagatcctgtttctacacatgaaccccaaaccaaagaccaggttgctgaaaaagatccaactcaacacaaggaggatgaaggcgaaattcaaccagaaaacaaagaagacagcattgaaaacgtgagagagacagacagctccaactgctgatccataaaccagaagcctgacatgtttggaagtccttttcaataagcacatgattagtgttgttatattggcaagggctgtagacattctgctctggtcactgtattcagaatacaggttcttttctggtgtcacttttgtaagtagcaactataaacataagtaagctgtttagcaaaacacacattcctagtaggttttggttttttgatctttataaagatgaggtttttttcctagttactgtattaagtatgacttcttttagaaggttacaaaaaaattcagatgttgatacctttttaggaaatgtgcataccactcatcaaatggaatgctgaaagtttgaggtgcttgtatataatcggataaacaaaactgatcaacccaatgtgattttaaaagcccccaaagaagcttctgttttgggtctgatcctcttgatggagaaactgcagcagcatggaaattgttgggtactgtggcatacaagttattttctacagtagactgagataaactgaaaactcaggagctggcatcaaactcgtagtcccatagtcagtgttaattacacacattgttaactattggatgaaaaatacatgctattgattgtgtccaaagcctcccgaggacctccgtggggatgctctggtagcctgaatacagaactgaggtgaaagtccaaaccttgaattttacagtagtaagttggtaaaccatgtgctctgtgctatgagttaattatgttttcccaaatactaatgtggcacaagtaccatattttatcagagttcttatgtacagtatggtgaagataagtgacaagcacacatttttcttgcttcactgctgttctatattacacaggtttgttgttgttttttttaaaaaagaaattaagcagtagttagtctctaaaaatacaatgtttcaggctaccacagtgaataaatagaaatgtaatcagggattaaaaaaaaaacttatgcagcttttcaaagttgattgtttcaaaattggtgtttatttaaaataagtggtaatgtacttgaatgcactttttatgacaatgattcagtaatggtaattttactattaaagaaagtgaaaggtttagttttgttagcatggctcagcatgtagctgtcaggtgtttttcacctaagggcaaaagaaaatgatagtaataattgcagtagttgtattgtattgtatttttgcacgtgtggtaagcataggcttgaagaggtgggtaggcaggtacatgtacttcctaaatttggagataattatctttctgtaagttcgttatgcttgactgtttccatgttctcccaataatgattttatagttacttatcactttactcatggagaattaaaacgtaatgtttttcaactgtatctttctttaactggataatactgctatatgatatgcttactacagactgcattaattcacgaaacgaattctgttatgctgtaatttgaactctcctcaccacaacttattaaaaaggcaccaatagtttccca

SEQ ID NO: 303451 - DNA, 3541 bp, Homo sapiens
ccccgttagtgataaatgaacacatgctgtggggaaaccgttcagctcgtgacgaagagaatgctagctcggcagttcattaccagtctgaacgagtaagatgaggaagctgatactcggagagattaagtgattcgcctccaagggtcccctagccacaataggcgaatatgaagaccttagagcagagaaccagaaaacaaaggagaagtgtgacaaaattaggcaagaacgagatgaagccgttaaaaaactggaagaatttcagaaaatttctcacatggtcatagaggaagttaatttcatgcagaaccatcttgaaatagagaagacttgtcgagaaagtgctgaagctttggcaacaaagctaaataaagaaaataaaacgttgaaaagaatcagcatgttgtacatggccaagctgggaccagatgtaataactgaagagataaacattgatgatgaagattcgactacagacacagacggtgccgccgagacttgtgtctcagtacagtgtcagaagcaaattaaagaacttcgagatcaaattgtatctgttcaggaggaaaagaagattttagccattgagctggaaaatctcaagagcaaactcgtagaagtaattgaagaagtaaataaagttaaacaagaaaagactgttttaaattcagaagttcttgaacagagaaaagtcttagaaaaatgcaatagagtgtccatgttagctgtagaagagtatgaggagatgcaagtaaacctggagctggagaaggaccttcgaaagaaagcagagtcatttgcacaagagatgttcattgagcaaaacaagctaaagagacaaagccaccttctgctgcagagctccatccctgatcagcagcttttgaaagctttagacgaaaatgcaaaactcacccagcaacttgaagaagagagaattcagcatcaacaaaaggtcaaagaattagaagagcaactagaaaatgaaacactccacaaagaaatacacaacctcaaacagcaactggagcttctagaggaagataaaaaggaattggaattgaaatatcagaattctgaagagaaagccagaaatttaaagcactctgttgatgaactccagaaacgagtgaaccagtctgagaattcagtacctccaccacctcctcctccaccaccacttccccctccacctcccaatcctatccgatccctcatgtccatgatccggaaacgatcccaccccagtggcagtggtgctaagaaagaaaaggcaactcaaccagaaacaactgaagaagtcacagatctaaagaggcaagcagttgaagagatgatggatagaattaaaaagggagttcatcttagacccgttaatcagacagccagaccgaagacaaagccagaatcttcgaaaggctgcgaaagtgcagtggatgaactaaaaggaatactggggacacttaacaaatccactagttcaagaagcttaaaatcccttgaccctgaaaacagtgaaactgagttagaaaggattttgcgtcgcagaaaggtgacagcagaagcagatagcagtagtccaactgggatattagccacctcagagtccaaatccatgccagtgttgggttctgtatccagtgtaacaaaaacagccttgaacaagaaaactctggaggcagaattcaacagcccgtcccccccaacacctgagccaggtgaagggccccgtaaattggaaggatgcacaagttccaaggttacgtttcagcctcccagtagcattggatgcaggaaaaaatacattgacggtgaaaaacaagccgaaccagttgtagttttagatcctgtttctacacatgaaccccaaaccaaagaccaggttgctgaaaaagatccaactcaacacaaggaggatgaaggcgaaattcaaccagaaaacaaagaagacagcattgaaaacgtgagagagacagacagctccaactgctgatccataaaccagaagcctgacatgtttggaagtccttttcaataagcacatgattagtgttgttatattggcaagggctgtagacattctgctctggtcactgtattcagaatacaggttcttttctggtgtcacttttgtaagtagcaactataaacataagtaagctgtttagcaaaacacacattcctagtaggttttggttttttgatctttataaagatgaggtttttttcctagttactgtattaagtatgacttcttttagaaggttacaaaaaaattcagatgttgatacctttttaggaaatgtgcataccactcatcaaatggaatgctgaaagtttgaggtgcttgtatataatcggataaacaaaactgatcaacccaatgtgattttaaaagcccccaaagaagcttctgttttgggtctgatcctcttgatggagaaactgcagcagcatggaaattgttgggtactgtggcatacaagttattttctacagtagactgagataaactgaaaactcaggagctggcatcaaactcgtagtcccatagtcagtgttaattacacacattgttaactattggatgaaaaatacatgctattgattgtgtccaaagcctcccgaggacctccgtggggatgctctggtagcctgaatacagaactgaggtgaaagtccaaaccttgaattttacagtagtaagttggtaaaccatgtgctctgtgctatgagttaattatgttttcccaaatactaatgtggcacaagtaccatattttatcagagttcttatgtacagtatggtgaagataagtgacaagcacacatttttcttgcttcactgctgttctatattacacaggtttgttgttgttttttttaaaaaagaaattaagcagtagttagtctctaaaaatacaatgtttcaggctaccacagtgaataaatagaaatgtaatcagggattaaaaaaaaaacttatgcagcttttcaaagttgattgtttcaaaattggtgtttatttaaaataagtggtaatgtacttgaatgcactttttatgacaatgattcagtaatggtaattttactattaaagaaagtgaaaggtttagttttgttagcatggctcagcatgtagctgtcaggtgtttttcacctaagggcaaaagaaaatgatagtaataattgcagtagttgtattgtattgtatttttgcacgtgtggtaagcataggcttgaagaggtgggtaggcaggtacatgtacttcctaaatttggagataattatctttctgtaagttcgttatgcttgactgtttccatgttctcccaataatgattttatagttacttatcactttactcatggagaattaaaacgtaatgtttttcaactgtatctttctttaactggataatactgctatatgatatgcttactacagactgcattaattcacgaaacgaattctgttatgctgtaatttgaactctcctcaccacaacttattaaaaaggcaccaatagtttccca

SEQ ID NO: 303452 - DNA, 3706 bp, Homo sapiens
agcggagcgggtcctgccgcgccggcagccacaggctggcatagcggctgccgacccgccctcgttcctccaccccctgcacgggactgctgggcccgccccgccccgcctgcaggtgaagcggccgcagccgccgagtaggtgcgtggggatgatctcactcgcgcgctccgcgccaggaggaggaggagcgggagcggatccaacttccgggtagtggagccgcaagccaccggcatcttgctttttcttccccctcctcctgtgtgccccgcgccgctccctctttcccttttattcccggccccacccgccaaaatgaacagctcggacgaagagaagcagctgcagctcattaccagtctgaaggagcaagtgtgacaaaattaggcaagaacgagatgaagccgttaaaaaactggaagaatttcagaaaatttctcacatggtcatagaggaagttaatttcatgcagaaccatcttgaaatagagaagacttgtcgagaaagtgctgaagctttggcaacaaagctaaataaagaaaataaaacgttgaaaagaatcagcatgttgtacatggccaagctgggaccagatgtaataactgaagagataaacattgatgatgaagattcgactacagacacagacggtgccgccgagacttgtgtctcagtacagtgtcagaagcaaattaaagaacttcgagatcaaattgtatctgttcaggaggaaaagaagattttagccattgagctggaaaatctcaagagcaaactcgtagaagtaattgaagaagtaaataaagttaaacaagaaaagactgttttaaattcagaagttcttgaacagagaaaagtcttagaaaaatgcaatagagtgtccatgttagctgtagaagagtatgaggagatgcaagtaaacctggagctggagaaggaccttcgaaagaaagcagagtcatttgcacaagagatgttcattgagcaaaacaagctaaagagacaaagccaccttctgctgcagagctccatccctgatcagcagcttttgaaagctttagacgaaaatgcaaaactcacccagcaacttgaagaagagagaattcagcatcaacaaaaggtcaaagaattagaagagcaactagaaaatgaaacactccacaaagaaatacacaacctcaaacagcaactggagcttctagaggaagataaaaaggaattggaattgaaatatcagaattctgaagagaaagccagaaatttaaagcactctgttgatgaactccagaaacgagtgaaccagtctgagaattcagtacctccaccacctcctcctccaccaccacttccccctccacctcccaatcctatccgatccctcatgtccatgatccggaaacgatcccaccccagtggcagtggtgctaagaaagaaaaggcaactcaaccagaaacaactgaagaagtcacagatctaaagaggcaagcagttgaagagatgatggatagaattaaaaagggagttcatcttagacccgttaatcagacagccagaccgaagacaaagccagaatcttcgaaaggctgcgaaagtgcagtggatgaactaaaaggaatactggggacacttaacaaatccactagttcaagaagcttaaaatcccttgaccctgaaaacagtgaaactgagttagaaaggattttgcgtcgcagaaaggtgacagcagaagcagatagcagtagtccaactgggatattagccacctcagagtccaaatccatgccagtgttgggttctgtatccagtgtaacaaaaacagccttgaacaagaaaactctggaggcagaattcaacagcccgtcccccccaacacctgagccaggtgaagggccccgtaaattggaaggatgcacaagttccaaggttacgtttcagcctcccagtagcattggatgcaggaaaaaatacattgacggtgaaaaacaagccgaaccagttgtagttttagatcctgtttctacacatgaaccccaaaccaaagaccaggttgctgaaaaagatccaactcaacacaaggaggatgaaggcgaaattcaaccagaaaacaaagaagacagcattgaaaacgtgagagagacagacagctccaactgctgatccataaaccagaagcctgacatgtttggaagtccttttcaataagcacatgattagtgttgttatattggcaagggctgtagacattctgctctggtcactgtattcagaatacaggttcttttctggtgtcacttttgtaagtagcaactataaacataagtaagctgtttagcaaaacacacattcctagtaggttttggttttttgatctttataaagatgaggtttttttcctagttactgtattaagtatgacttcttttagaaggttacaaaaaaattcagatgttgatacctttttaggaaatgtgcataccactcatcaaatggaatgctgaaagtttgaggtgcttgtatataatcggataaacaaaactgatcaacccaatgtgattttaaaagcccccaaagaagcttctgttttgggtctgatcctcttgatggagaaactgcagcagcatggaaattgttgggtactgtggcatacaagttattttctacagtagactgagataaactgaaaactcaggagctggcatcaaactcgtagtcccatagtcagtgttaattacacacattgttaactattggatgaaaaatacatgctattgattgtgtccaaagcctcccgaggacctccgtggggatgctctggtagcctgaatacagaactgaggtgaaagtccaaaccttgaattttacagtagtaagttggtaaaccatgtgctctgtgctatgagttaattatgttttcccaaatactaatgtggcacaagtaccatattttatcagagttcttatgtacagtatggtgaagataagtgacaagcacacatttttcttgcttcactgctgttctatattacacaggtttgttgttgttttttttaaaaaagaaattaagcagtagttagtctctaaaaatacaatgtttcaggctaccacagtgaataaatagaaatgtaatcagggattaaaaaaaaaacttatgcagcttttcaaagttgattgtttcaaaattggtgtttatttaaaataagtggtaatgtacttgaatgcactttttatgacaatgattcagtaatggtaattttactattaaagaaagtgaaaggtttagttttgttagcatggctcagcatgtagctgtcaggtgtttttcacctaagggcaaaagaaaatgatagtaataattgcagtagttgtattgtattgtatttttgcacgtgtggtaagcataggcttgaagaggtgggtaggcaggtacatgtacttcctaaatttggagataattatctttctgtaagttcgttatgcttgactgtttccatgttctcccaataatgattttatagttacttatcactttactcatggagaattaaaacgtaatgtttttcaactgtatctttctttaactggataatactgctatatgatatgcttactacagactgcattaattcacgaaacgaattctgttatgctgtaatttgaactctcctcaccacaacttattaaaaaggcaccaatagtttccca

SEQ ID NO: 303453 - DNA, 3370 bp, Homo sapiens
ccaaagaattgaagtattcttaatcatgggacgatgcgtgggctcctggaatagctgactaatctttgaatgctgagattttttttccccctcattcctagtttctcacatggtcatagaggaagttaatttcatgcagaaccatcttgaaatagagaagacttgtcgagaaagtgctgaagctttggcaacaaagctaaataaagaaaataaaacgttgaaaagaatcagcatgttgtacatggccaagctgggaccagatgtaataactgaagagataaacattgatgatgaagattcgactacagacacagacggtgccgccgagacttgtgtctcagtacagtgtcagaagcaaattaaagaacttcgagatcaaattgtatctgttcaggaggaaaagaagattttagccattgagctggaaaatctcaagagcaaactcgtagaagtaattgaagaagtaaataaagttaaacaagaaaagactgttttaaattcagaagttcttgaacagagaaaagtcttagaaaaatgcaatagagtgtccatgttagctgtagaagagtatgaggagatgcaagtaaacctggagctggagaaggaccttcgaaagaaagcagagtcatttgcacaagagatgttcattgagcaaaacaagctaaagagacaaagccaccttctgctgcagagctccatccctgatcagcagcttttgaaagctttagacgaaaatgcaaaactcacccagcaacttgaagaagagagaattcagcatcaacaaaaggtcaaagaattagaagagcaactagaaaatgaaacactccacaaagaaatacacaacctcaaacagcaactggagcttctagaggaagataaaaaggaattggaattgaaatatcagaattctgaagagaaagccagaaatttaaagcactctgttgatgaactccagaaacgagtgaaccagtctgagaattcagtacctccaccacctcctcctccaccaccacttccccctccacctcccaatcctatccgatccctcatgtccatgatccggaaacgatcccaccccagtggcagtggtgctaagaaagaaaaggcaactcaaccagaaacaactgaagaagtcacagatctaaagaggcaagcagttgaagagatgatggatagaattaaaaagggagttcatcttagacccgttaatcagacagccagaccgaagacaaagccagaatcttcgaaaggctgcgaaagtgcagtggatgaactaaaaggaatactggggacacttaacaaatccactagttcaagaagcttaaaatcccttgaccctgaaaacagtgaaactgagttagaaaggattttgcgtcgcagaaaggtgacagcagaagcagatagcagtagtccaactgggatattagccacctcagagtccaaatccatgccagtgttgggttctgtatccagtgtaacaaaaacagccttgaacaagaaaactctggaggcagaattcaacagcccgtcccccccaacacctgagccaggtgaagggccccgtaaattggaaggatgcacaagttccaaggttacgtttcagcctcccagtagcattggatgcaggaaaaaatacattgacggtgaaaaacaagccgaaccagttgtagttttagatcctgtttctacacatgaaccccaaaccaaagaccaggttgctgaaaaagatccaactcaacacaaggaggatgaaggcgaaattcaaccagaaaacaaagaagacagcattgaaaacgtgagagagacagacagctccaactgctgatccataaaccagaagcctgacatgtttggaagtccttttcaataagcacatgattagtgttgttatattggcaagggctgtagacattctgctctggtcactgtattcagaatacaggttcttttctggtgtcacttttgtaagtagcaactataaacataagtaagctgtttagcaaaacacacattcctagtaggttttggttttttgatctttataaagatgaggtttttttcctagttactgtattaagtatgacttcttttagaaggttacaaaaaaattcagatgttgatacctttttaggaaatgtgcataccactcatcaaatggaatgctgaaagtttgaggtgcttgtatataatcggataaacaaaactgatcaacccaatgtgattttaaaagcccccaaagaagcttctgttttgggtctgatcctcttgatggagaaactgcagcagcatggaaattgttgggtactgtggcatacaagttattttctacagtagactgagataaactgaaaactcaggagctggcatcaaactcgtagtcccatagtcagtgttaattacacacattgttaactattggatgaaaaatacatgctattgattgtgtccaaagcctcccgaggacctccgtggggatgctctggtagcctgaatacagaactgaggtgaaagtccaaaccttgaattttacagtagtaagttggtaaaccatgtgctctgtgctatgagttaattatgttttcccaaatactaatgtggcacaagtaccatattttatcagagttcttatgtacagtatggtgaagataagtgacaagcacacatttttcttgcttcactgctgttctatattacacaggtttgttgttgttttttttaaaaaagaaattaagcagtagttagtctctaaaaatacaatgtttcaggctaccacagtgaataaatagaaatgtaatcagggattaaaaaaaaaacttatgcagcttttcaaagttgattgtttcaaaattggtgtttatttaaaataagtggtaatgtacttgaatgcactttttatgacaatgattcagtaatggtaattttactattaaagaaagtgaaaggtttagttttgttagcatggctcagcatgtagctgtcaggtgtttttcacctaagggcaaaagaaaatgatagtaataattgcagtagttgtattgtattgtatttttgcacgtgtggtaagcataggcttgaagaggtgggtaggcaggtacatgtacttcctaaatttggagataattatctttctgtaagttcgttatgcttgactgtttccatgttctcccaataatgattttatagttacttatcactttactcatggagaattaaaacgtaatgtttttcaactgtatctttctttaactggataatactgctatatgatatgcttactacagactgcattaattcacgaaacgaattctgttatgctgtaatttgaactctcctcaccacaacttattaaaaaggcaccaatagtttccca

SEQ ID NO: 303454 - DNA, 3814 bp, Homo sapiens
agcggagcgggtcctgccgcgccggcagccacaggctggcatagcggctgccgacccgccctcgttcctccaccccctgcacgggactgctgggcccgccccgccccgcctgcaggtgaagcggccgcagccgccgagtaggtgcgtggggatgatctcactcgcgcgctccgcgccaggaggaggaggagcgggagcggatccaacttccgggtagtggagccgcaagccaccggcatcttgctttttcttccccctcctcctgtgtgccccgcgccgctccctctttcccttttattcccggccccacccgccaaaatgaacagctcggacgaagagaagcagctgcagctcattaccagtctgaaggagcaagcaataggcgaatatgaagaccttagagcagagaaccagaaaacaaaggagaagtgtgacaaaattaggcaagaacgagatgaagccgttaaaaaactggaagaatttcagaaaatttctcacatggtcatagaggaagttaatttcatgcagaaccatcttgaaatagagaagacttgtcgagaaagtgctgaagctttggcaacaaagctaaataaagaaaataaaacgttgaaaagaatcagcatgttgtacatggccaagctgggaccagatgtaataactgaagagataaacattgatgatgaagattcgactacagacacagacggtgccgccgagacttgtgtctcagtacagtgtcagaagcaaattaaagaacttcgagatcaaattgtatctgttcaggaggaaaagaagattttagccattgagctggaaaatctcaagagcaaactcgtagaagtaattgaagaagtaaataaagttaaacaagaaaagactgttttaaattcagaagttcttgaacagagaaaagtcttagaaaaatgcaatagagtgtccatgttagctgtagaagagtatgaggagatgcaagtaaacctggagctggagaaggaccttcgaaagaaagcagagtcatttgcacaagagatgttcattgagcaaaacaagctaaagagacaaagccaccttctgctgcagagctccatccctgatcagcagcttttgaaagctttagacgaaaatgcaaaactcacccagcaacttgaagaagagagaattcagcatcaacaaaaggtcaaagaattagaagagcaactagaaaatgaaacactccacaaagaaatacacaacctcaaacagcaactggagcttctagaggaagataaaaaggaattggaattgaaatatcagaattctgaagagaaagccagaaatttaaagcactctgttgatgaactccagaaacgagtgaaccagtctgagaattcagtacctccaccacctcctcctccaccaccacttccccctccacctcccaatcctatccgatccctcatgtccatgatccggaaacgatcccaccccagtggcagtggtgctaagaaagaaaaggcaactcaaccagaaacaactgaagaagtcacagatctaaagaggcaagcagttgaagagatgatggatagaattaaaaagggagttcatcttagacccgttaatcagacagccagaccgaagacaaagccagaatcttcgaaaggctgcgaaagtgcagtggatgaactaaaaggaatactggggacacttaacaaatccactagttcaagaagcttaaaatcccttgaccctgaaaacagtgaaactgagttagaaaggattttgcgtcgcagaaaggtgacagcagaagcagatagcagtagtccaactgggatattagccacctcagagtccaaatccatgccagtgttgggttctgtatccagtgtaacaaaaacagccttgaacaagaaaactctggaggcagaattcaacagcccgtcccccccaacacctgagccaggtgaagggccccgtaaattggaaggatgcacaagttccaaggttacgtttcagcctcccagtagcattggatgcaggaaaaaatacattgacggtgaaaaacaagccgaaccagttgtagttttagatcctgtttctacacatgaaccccaaaccaaagaccaggttgctgaaaaagatccaactcaacacaaggaggatgaaggcgaaattcaaccagaaaacaaagaagacagcattgaaaacgtgagagagacagacagctccaactgctgatccataaaccagaagcctgacatgtttggaagtccttttcaataagcacatgattagtgttgttatattggcaagggctgtagacattctgctctggtcactgtattcagaatacaggttcttttctggtgtcacttttgtaagtagcaactataaacataagtaagctgtttagcaaaacacacattcctagtaggttttggttttttgatctttataaagatgaggtttttttcctagttactgtattaagtatgacttcttttagaaggttacaaaaaaattcagatgttgatacctttttaggaaatgtgcataccactcatcaaatggaatgctgaaagtttgaggtgcttgtatataatcggataaacaaaactgatcaacccaatgtgattttaaaagcccccaaagaagcttctgttttgggtctgatcctcttgatggagaaactgcagcagcatggaaattgttgggtactgtggcatacaagttattttctacagtagactgagataaactgaaaactcaggagctggcatcaaactcgtagtcccatagtcagtgttaattacacacattgttaactattggatgaaaaatacatgctattgattgtgtccaaagcctcccgaggacctccgtggggatgctctggtagcctgaatacagaactgaggtgaaagtccaaaccttgaattttacagtagtaagttggtaaaccatgtgctctgtgctatgagttaattatgttttcccaaatactaatgtggcacaagtaccatattttatcagagttcttatgtacagtatggtgaagataagtgacaagcacacatttttcttgcttcactgctgttctatattacacaggtttgttgttgttttttttaaaaaagaaattaagcagtagttagtctctaaaaatacaatgtttcaggctaccacagtgaataaatagaaatgtaatcagggattaaaaaaaaaacttatgcagcttttcaaagttgattgtttcaaaattggtgtttatttaaaataagtggtaatgtacttgaatgcactttttatgacaatgattcagtaatggtaattttactattaaagaaagtgaaaggtttagttttgttagcatggctcagcatgtagctgtcaggtgtttttcacctaagggcaaaagaaaatgatagtaataattgcagtagttgtattgtattgtatttttgcacgtgtggtaagcataggcttgaagaggtgggtaggcaggtacatgtacttcctaaatttggagataattatctttctgtaagttcgttatgcttgactgtttccatgttctcccaataatgattttatagttacttatcactttactcatggagaattaaaacgtaatgtttttcaactgtatctttctttaactggataatactgctatatgatatgcttactacagactgcattaattcacgaaacgaattctgttatgctgtaatttgaactctcctcaccacaacttattaaaaaggcaccaatagtttcccaaagaaaaacagataaaagaaaaacacaaaagaaaaaaaaaggggggcgccacata

SEQ ID NO: 303455 - DNA, 4129 bp, Homo sapiens
agcggagcgggtcctgccgcgccggcagccacaggctggcatagcggctgccgacccgccctcgttcctccaccccctgcacgggactgctgggcccgccccgccccgcctgcaggtgaagcggccgcagccgccgagtaggtgcgtggggatgatctcactcgcgcgctccgcgccaggaggaggaggagcgggagcggatccaacttccgggtagtggagccgcaagccaccggcatcttgctttttcttccccctcctcctgtgtgccccgcgccgctccctctttcccttttattcccggccccacccgccaaaatgaacagctcggacgaagagaagcagctgcagctcattaccagtctgaaggagcaagcaataggcgaatatgaagaccttagagcagagaaccagaaaacaaaggagaagtgtgacaaaattaggcaagaacgagatgaagccgttaaaaaactggaagaatttcagaaaatttctcacatggtcatagaggaagttaatttcatgcagaaccatcttgaaatagagaagacttgtcgagaaagtgctgaagctttggcaacaaagctaaataaagaaaataaaacgttgaaaagaatcagcatgttgtacatggccaagctgggaccagatgtaataactgaagagataaacattgatgatgaagattcgactacagacacagacggtgccgccgagacttgtgtctcagtacagtgtcagaagcaaattaaagaacttcgagatcaaattgtatctgttcaggaggaaaagaagattttagccattgagctggaaaatctcaagagcaaactcgtagaagtaattgaagaagtaaataaagttaaacaagaaaagactgttttaaattcagaagttcttgaacagagaaaagtcttagaaaaatgcaatagagtgtccatgttagctgtagaagagtatgaggagatgcaagtaaacctggagctggagaaggaccttcgaaagaaagcagagtcatttgcacaagagatgttcattgagcaaaacaagctaaagagacaaagccaccttctgctgcagagctccatccctgatcagcagcttttgaaagctttagacgaaaatgcaaaactcacccagcaacttgaagaagagagaattcagcatcaacaaaaggtcaaagaattagaagagcaactagaaaatgaaacactccacaaagaaatacacaacctcaaacagcaactggagcttctagaggaagataaaaaggaattggaattgaaatatcagaattctgaagagaaagccagaaatttaaagcactctgttgatgaactccagaaacgagtgaaccagtctgagaattcagtacctccaccacctcctcctccaccaccacttccccctccacctcccaatcctatccgatccctcatgtccatgatccggaaacgatcccaccccagtggcagtggtgctaagaaagaaaaggcaactcaaccagaaacaactgaagaagtcacagatctaaagaggcaagcagttgaagagatgatggatagaattaaaaagggagttcatcttagacccgttaatcagacagccagaccgaagacaaagccagaatcttcgaaaggctgcgaaagtgcagtggatgaactaaaaggaatactggggacacttaacaaatccactagttcaagaagcttaaaatcccttgaccctgaaaacagtgaaactgagttagaaaggattttgcgtcgcagaaaggtgacagcagaagcagatagcagtagtccaactgggatattagccacctcagagtccaaatccatgccagtgttgggttctgtatccagtgtaacaaaaacagccttgaacaagaaaactctggaggcagaattcaacagcccgtcccccccaacacctgagccaggtgaagggccccgtaaattggaaggatgcacaagttccaaggttacgtttcagcctcccagtagcattggatgcaggaaaaaatacattgacggtgaaaaacaagccgaaccagttgtagttttagatcctgtttctacacatgaaccccaaaccaaagaccaggttgctgaaaaagatccaactcaacacaaggaggatgaaggcgaaattcaaccagaaaacaaagaagacagcattgaaaacgtgagagagacagacagctccaactgctgatccataaaccagaagcctgacatgtttggaagtccttttcaataagcacatgattagtgttgttatattggcaagggctgtagacattctgctctggtcactgtattcagaatacaggttcttttctggtgtcacttttgtaagtagcaactataaacataagtaagctgtttagcaaaacacacattcctagtaggttttggttttttgatctttataaagatgaggtttttttcctagttactgtattaagtatgacttcttttagaaggttacaaaaaaattcagatgttgatacctttttaggaaatgtgcataccactcatcaaatggaatgctgaaagtttgaggtgcttgtatataatcggataaacaaaactgatcaacccaatgtgattttaaaagcccccaaagaagcttctgttttgggtctgatcctcttgatggagaaactgcagcagcatggaaattgttgggtactgtggcatacaagttattttctacagtagactgagataaactgaaaactcaggagctggcatcaaactcgtagtcccatagtcagtgttaattacacacattgttaactattggatgaaaaatacatgctattgattgtgtccaaagcctcccgaggacctccgtggggatgctctggtagcctgaatacagaactgaggtgaaagtccaaaccttgaattttacagtagtaagttggtaaaccatgtgctctgtgctatgagttaattatgttttcccaaatactaatgtggcacaagtaccatattttatcagagttcttatgtacagtatggtgaagataagtgacaagcacacatttttcttgcttcactgctgttctatattacacaggtttgttgttgttttttttaaaaaagaaattaagcagtagttagtctctaaaaatacaatgtttcaggctaccacagtgaataaatagaaatgtaatcagggattaaaaaaaaaacttatgcagcttttcaaagttgattgtttcaaaattggtgtttatttaaaataagtggtaatgtacttgaatgcactttttatgacaatgattcagtaatggtaattttactattaaagaaagtgaaaggtttagttttgttagcatggctcagcatgtagctgtcaggtgtttttcacctaagggcaaaagaaaatgatagtaataattgcagtagttgtattgtattgtatttttgcacgtgtggtaagcataggcttgaagaggtgggtaggcaggtacatgtacttcctaaatttggagataattatctttctgtaagttcgttatgcttgactgtttccatgttctcccaataatgattttatagttacttatcactttactcatggagaattaaaacgtaatgtttttcaactgtatctttctttaactggataatactgctatatgatatgcttactacagactgcattaattcacgaaacgaattctgttatgctgtaatttgaactctcctcaccacaacttattaaaaaggcaccaatagtttcccaccattaagggtcagttgtggttattattaacgtttctggtttagttccccaagcttgacattctttaatagaaaattgtatatgatttgacaactttagtaatttttaatagtccctaagatggtttattgagttttctttcatgtttctttgtgctgtcttccttcttgcatctgtgatctgtctgccagcatgcaactcacacacatttaggaatataaaaatatgtacactgtctttccatatttcatcacaccatcacagaataatatggttatcaaaataccctcctttctagagtaagaagttgccctttgggtgaaatgtgttagctggactagggaacaattagtaacaggtattttgaaag

SEQ ID NO: 303456 - DNA, 3761 bp, Homo sapiens
  misc_feature (3150)..(3150): n is a, c, g, or t
  misc_feature (3178)..(3179): n is a, c, g, or t
  misc_feature (3193)..(3193): n is a, c, g, or t
  misc_feature (3202)..(3202): n is a, c, g, or t
agcggagcgggtcctgccgcgccggcagccacaggctggcatagcggctgccgacccgccctcgttcctccaccccctgcacgggactgctgggcccgccccgccccgcctgcaggtgaagcggccgcagccgccgagtaggtgcgtggggatgatctcactcgcgcgctccgcgccaggaggaggaggagcgggagcggatccaacttccgggtagtggagccgcaagccaccggcatcttgctttttcttccccctcctcctgtgtgccccgcgccgctccctctttcccttttattcccggccccacccgccaaaatgaacagctcggacgaagagaagcagctgcagctcattaccagtctgaaggagcaagcaataggcgaatatgaagaccttagagcagagaaccagaaaacaaaggagaagtgtgacaaaattaggcaagaacgagatgaagccgttaaaaaactggaagaatttcagaaaatttctcacatggtcatagaggaagttaatttcatgcagaaccatcttgaaatagagaagacttgtcgagaaagtgctgaagctttggcaacaaagctaaataaagaaaataaaacgttgaaaagaatcagcatgttgtacatggccaagctgggaccagatgtaataactgaagagataaacattgatgatgaagattcgactacagacacagacggtgccgccgagacttgtgtctcagtacagtgtcagaagcaaattaaagaacttcgagatcaaattgtatctgttcaggaggaaaagaagattttagccattgagctggaaaatctcaagagcaaactcgtagaagtaattgaagaagtaaataaagttaaacaagaaaagactgttttaaattcagaagttcttgaacagagaaaagtcttagaaaaatgcaatagagtgtccatgttagctgtagaagagtatgaggagatgcaagtaaacctggagctggagaaggaccttcgaaagaaagcagagtcatttgcacaagagatgttcattgagcaaaacaagctaaagagacaaagccaccttctgctgcagagctccatccctgatcagcagcttttgaaagctttagacgaaaatgcaaaactcacccagcaacttgaagaagagagaattcagcatcaacaaaaggtcaaagaattagaagagcaactagaaaatgaaacactccacaaagaaatacacaacctcaaacagcaactggagcttctagaggaagataaaaaggaattggaattgaaatatcagaattctgaagagaaagccagaaatttaaagcactctgttgatgaactccagaaacgagtgaaccagtctgagaattcagtacctccaccacctcctcctccaccaccacttccccctccacctcccaatcctatccgatccctcatgtccatgatccggaaacgatcccaccccagtggcagtggtgctaagaaagaaaaggcaactcaaccagaaacaactgaagaagtcacagatctaaagaggcaagcagttgaagagatgatggatagaattaaaaagggagttcatcttagacccgttaatcagacagccagaccgaagacaaagccagaatcttcgaaaggctgcgaaagtgcagtggatgaactaaaaggaatactggggacacttaacaaatccactagttcaagaagcttaaaatcccttgaccctgaaaacagtgaaactgagttagaaaggattttgcgtcgcagaaaggtgacagcagaagcagatagcagtagtccaactgggatattagccacctcagagtccaaatccatgccagtgttgggttctgtatccagtgtaacaaaaacagccttgaacaagaaaactctggaggcagaattcaacagcccgtcccccccaacacctgagccaggtgaagggccccgtaaattggaaggatgcacaagttccaaggttacgtttcagcctcccagtagcattggatgcaggaaaaaatacattgacggtgaaaaacaagccgaaccagttgtagttttagatcctgtttctacacatgaaccccaaaccaaagaccaggttgctgaaaaagatccaactcaacacaaggaggatgaaggcgaaattcaaccagaaaacaaagaagacagcattgaaaacgtgagagagacagacagctccaactgctgatccataaaccagaagcctgacatgtttggaagtccttttcaataagcacatgattagtgttgttatattggcaagggctgtagacattctgctctggtcactgtattcagaatacaggttcttttctggtgtcacttttgtaagtagcaactataaacataagtaagctgtttagcaaaacacacattcctagtaggttttggttttttgatctttataaagatgaggtttttttcctagttactgtattaagtatgacttcttttagaaggttacaaaaaaattcagatgttgatacctttttaggaaatgtgcataccactcatcaaatggaatgctgaaagtttgaggtgcttgtatataatcggataaacaaaactgatcaacccaatgtgattttaaaagcccccaaagaagcttctgttttgggtctgatcctcttgatggagaaactgcagcagcatggaaattgttgggtactgtggcatacaagttattttctacagtagactgagataaactgaaaactcaggagctggcatcaaactcgtagtcccatagtcagtgttaattacacacattgttaactattggatgaaaaatacatgctattgattgtgtccaaagcctcccgaggacctccgtggggatgctctggtagcctgaatacagaactgaggtgaaagtccaaaccttgaattttacagtagtaagttggtaaaccatgtgctctgtgctatgagttaattatgttttcccaaatactaatgtggcacaagtaccatattttatcagagttcttatgtacagtatggtgaagataagtgacaagcacacatttttcttgcttcactgctgttctatattacacaggtttgttgttgtttttttcccccccgcccttccgccgtcgttcgtctctccccctcccctgtntccggctccccccgttgcctccctcgcnntgtcctccgggctnccccccccncccttatgcagcttttcaaagttgattgtttcaaaattggtgtttatttaaaataagtggtaatgtacttgaatgcactttttatgacaatgattcagtaatggtaattttactattaaagaaagtgaaaggtttagttttgttagcatggctcagcatgtagctgtcaggtgtttttcacctaagggcaaaagaaaatgatagtaataattgcagtagttgtattgtattgtatttttgcacgtgtggtaagcataggcttgaagaggtgggtaggcaggtacatgtacttcctaaatttggagataattatctttctgtaagttcgttatgcttgactgtttccatgttctcccaataatgattttatagttacttatcactttactcatggagaattaaaacgtaatgtttttcaactgtatctttctttaactggataatactgctatatgatatgcttactacagactgcattaattcacgaaacgaattctgttatgctgtaatttgaactctcctcaccacaacttattaaaaaggcaccaatagtttccca

SEQ ID NO: 303457 - DNA, 4157 bp, Homo sapiens
  misc_feature (3797)..(3797): n is a, c, g, or t
agcggagcgggtcctgccgcgccggcagccacaggctggcatagcggctgccgacccgccctcgttcctccaccccctgcacgggactgctgggcccgccccgccccgcctgcaggtgaagcggccgcagccgccgagtaggtgcgtggggatgatctcactcgcgcgctccgcgccaggaggaggaggagcgggagcggatccaacttccgggtagtggagccgcaagccaccggcatcttgctttttcttccccctcctcctgtgtgccccgcgccgctccctctttcccttttattcccggccccacccgccaaaatgaacagctcggacgaagagaagcagctgcagctcattaccagtctgaaggagcaagcaataggcgaatatgaagaccttagagcagagaaccagaaaacaaaggagaagtgtgacaaaattaggcaagaacgagatgaagccgttaaaaaactggaagaatttcagaaaatttctcacatggtcatagaggaagttaatttcatgcagaaccatcttgaaatagagaagacttgtcgagaaagtgctgaagctttggcaacaaagctaaataaagaaaataaaacgttgaaaagaatcagcatgttgtacatggccaagctgggaccagatgtaataactgaagagataaacattgatgatgaagattcgactacagacacagacggtgccgccgagacttgtgtctcagtacagtgtcagaagcaaattaaagaacttcgagatcaaattgtatctgttcaggaggaaaagaagattttagccattgagctggaaaatctcaagagcaaactcgtagaagtaattgaagaagtaaataaagttaaacaagaaaagactgttttaaattcagaagttcttgaacagagaaaagtcttagaaaaatgcaatagagtgtccatgttagctgtagaagagtatgaggagatgcaagtaaacctggagctggagaaggaccttcgaaagaaagcagagtcatttgcacaagagatgttcattgagcaaaacaagctaaagagacaaagccaccttctgctgcagagctccatccctgatcagcagcttttgaaagctttagacgaaaatgcaaaactcacccagcaacttgaagaagagagaattcagcatcaacaaaaggtcaaagaattagaagagcaactagaaaatgaaacactccacaaagaaatacacaacctcaaacagcaactggagcttctagaggaagataaaaaggaattggaattgaaatatcagaattctgaagagaaagccagaaatttaaagcactctgttgatgaactccagaaacgagtgaaccagtctgagaattcagtacctccaccacctcctcctccaccaccacttccccctccacctcccaatcctatccgatccctcatgtccatgatccggaaacgatcccaccccagtggcagtggtgctaagaaagaaaaggcaactcaaccagaaacaactgaagaagtcacagatctaaagaggcaagcagttgaagagatgatggatagaattaaaaagggagttcatcttagacccgttaatcagacagccagaccgaagacaaagccagaatcttcgaaaggctgcgaaagtgcagtggatgaactaaaaggaatactggggacacttaacaaatccactagttcaagaagcttaaaatcccttgaccctgaaaacagtgaaactgagttagaaaggattttgcgtcgcagaaaggtgacagcagaagcagatagcagtagtccaactgggatattagccacctcagagtccaaatccatgccagtgttgggttctgtatccagtgtaacaaaaacagccttgaacaagaaaactctggaggcagaattcaacagcccgtcccccccaacacctgagccaggtgaagggccccgtaaattggaaggatgcacaagttccaaggttacgtttcagcctcccagtagcattggatgcaggaaaaaatacattgacggtgaaaaacaagccgaaccagttgtagttttagatcctgtttctacacatgaaccccaaaccaaagaccaggttgctgaaaaagatccaactcaacacaaggaggatgaaggcgaaattcaaccagaaaacaaagaagacagcattgaaaacgtgagagagacagacagctccaactgctgatccataaaccagaagcctgacatgtttggaagtccttttcaataagcacatgattagtgttgttatattggcaagggctgtagacattctgctctggtcactgtattcagaatacaggttcttttctggtgtcacttttgtaagtagcaactataaacataagtaagctgtttagcaaaacacacattcctagtaggttttggttttttgatctttataaagatgaggtttttttcctagttactgtattaagtatgacttcttttagaaggttacaaaaaaattcagatgttgatacctttttaggaaatgtgcataccactcatcaaatggaatgctgaaagtttgaggtgcttgtatataatcggataaacaaaactgatcaacccaatgtgattttaaaagcccccaaagaagcttctgttttgggtctgatcctcttgatggagaaactgcagcagcatggaaattgttgggtactgtggcatacaagttattttctacagtagactgagataaactgaaaactcaggagctggcatcaaactcgtagtcccatagtcagtgttaattacacacattgttaactattggatgaaaaatacatgctattgattgtgtccaaagcctcccgaggacctccgtggggatgctctggtagcctgaatacagaactgaggtgaaagtccaaaccttgaattttacagtagtaagttggtaaaccatgtgctctgtgctatgagttaattatgttttcccaaatactaatgtggcacaagtaccatattttatcagagttcttatgtacagtatggtgaagataagtgacaagcacacatttttcttgcttcactgctgttctatattacacaggtttgttgttgttttttttaaaaaagaaattaagcagtagttagtctctaaaaatacaatgtttcaggctaccacagtgaataaatagaaatgtaatcagggattaaaaaaaaaacttatgcagcttttcaaagttgattgtttcaaaattggtgtttatttaaaataagtggtaatgtacttgaatgcactttttatgacaatgattcagtaatggtaattttactattaaagaaagtgaaaggtttagttttgttagcatggctcagcatgtagctgtcaggtgtttttcacctaagggcaaaagaaaatgatagtaataattgcagtagttgtattgtattgtatttttgcacgtgtggtaagcataggcttgaagaggtgggtaggcaggtacatgtacttcctaaatttggagataattatctttctgtaagttcgttatgcttgactgtttccatgttctcccaataatgattttatagttacttatcactttactcatggagaattaaaacgtaatgtttttcaactgtatctttctttaactggataatactgctatatgatatgcttactacagactgcattaattcacgaaacgaattctgttatgctgtaatttgaactctcctcaccacaacttattaaaaaggcaccaatagtttcccaacaactacaacccggttgtaattgttctattgtgtagnttttctaggtggagcaacaggtttagggactaaacccttattaacacttggaccagttccactcttaactggctgtgacggaagatttcctactactggggatcccgatagctgtaagtcttttgtattacccttcttaatgaccagcatccctggagctctagatttaggattcggaggatattctgcataaattaagcatgacccagagtcactcaccatttcaagttttagtatagaattaaccccccaagtaccgtatattcccaaattttttttttttttaactaacagctgcctcctgggtaaaataactaaactaacaaagtactactatattccaactagtatagctacata

SEQ ID NO: 303458 - DNA, 3705 bp, Homo sapiens
agcggagcgggtcctgccgcgccggcagccacaggctggcatagcggctgccgacccgccctcgttcctccaccccctgcacgggactgctgggcccgccccgccccgcctgcaggtgaagcggccgcagccgccgagtaggtgcgtggggatgatctcactcgcgcgctccgcgccaggaggaggaggagcgggagcggatccaacttccgggtagtggagccgcaagccaccggcatcttgctttttcttccccctcctcctgtgtgccccgcgccgctccctctttcccttttattcccggccccacccgccaaaatgaacagctcggacgaagagaagcagctgcagctcattaccagtctgaaggagcaagcaataggcgaatatgaagaccttagagcagagaaccagaaaacaaaggagaagtgtgacaaaattaggcaagaacgagatgaagccgttaaaaaactggaagaatttcagaaaatttctcacatggtcatagaggaagttaatttcatgcagaaccatcttgaaatagagaagacttgtcgagaaagtgctgaagctttggcaacaaagctaaataaagaaaataaaacgttgaaaagaatcagcatgttgtacatggccaagctgggaccagatgtaataactgaagagataaacattgatgatgaagattcgactacagacacagacggtgccgccgagacttgtgtctcagtacagtgtcagaagcaaattaaagaacttcgagatcaaattgtatctgttcaggaggaaaagaagattttagccattgagctggaaaatctcaagagcaaactcgtagaagtaattgaagaagtaaataaagttaaacaagaaaagactgttttaaattcagaagttcttgaacagagaaaagtcttagaaaaatgcaatagagtgtccatgttagctgtagaagagtatgaggagatgcaagtaaacctggagctggagaaggaccttcgaaagaaagcagagtcatttgcacaagagatgttcattgagcaaaacaagctaaagagacaaagccaccttctgctgcagagctccatccctgatcagcagcttttgaaagctttagacgaaaatgcaaaactcacccagcaacttgaagaagagagaattcagcatcaacaaaaggtcaaagaattagaagagcaactagaaaatgaaacactccacaaagaaatacacaacctcaaacagcaactggagcttctagaggaagataaaaaggaattggaattgaaatatcagaattctgaagagaaagccagaaatttaaagcactctgttgatgaactccagaaacgagtgaaccagtctgagaattcagtacctccaccacctcctcctccaccaccacttccccctccacctcccaatcctatccgatccctcatgtccatgatccggaaacgatcccaccccagtggcagtggtgctaagaaagaaaaggcaactcaaccagaaacaactgaagaagtcacagatctaaagaggcaagcagttgaagagatgatggatagaattaaaaagggagttcatcttagacccgttaatcagacagccagaccgaagacaaagccagaatcttcgaaaggctgcgaaagtgcagtggatgaactaaaaggaatactggggacacttaacaaatccactagttcaagaagcttaaaatcccttgaccctgaaaacagtgaaactgagttagaaaggattttgcgtcgcagaaaggtgacagcagaagcagatagcagtagtccaactgggatattagccacctcagagtccaaatccatgccagtgttgggttctgtatccagtgtaacaaaaacagccttgaacaagaaaactctggaggcagaattcaacagcccgtcccccccaacacctgagccaggtgaagggccccgtaaattggaaggatgcacaagttccaaggttacgtttcagcctcccagtagcattggatgcaggaaaaaatacattgacggtgaaaaacaagccgaaccagttgtagttttagatcctgtttctacacatgaaccccaaaccaaagaccaggttgctgaaaaagatccaactcaacacaaggaggatgaaggcgaaattcaaccagaaaacaaagaagacagcattgaaaacgtgagagagacagacagctccaactgctgatccataaaccagaagcctgacatgtttggaagtccttttcaataagcacatgattagtgttgttatattggcaagggctgtagacattctgctctggtcactgtattcagaatacaggttcttttctggtgtcacttttgtaagtagcaactataaacataagtaagctgtttagcaaaacacacattcctagtaggttttggttttttgatctttataaagatgaggtttttttcctagttactgtattaagtatgacttcttttagaaggttacaaaaaaattcagatgttgatacctttttaggaaatgtgcataccactcatcaaatggaatgctgaaagtttgaggtgcttgtatataatcggataaacaaaactgatcaacccaatgtgattttaaaagcccccaaagaagcttctgttttgggtctgatcctcttgatggagaaactgcagcagcatggaaattgttgggtactgtggcatacaagttattttctacagtagactgagataaactgaaaactcaggagctggcatcaaactcgtagtcccatagtcagtgttaattacacacattgttaactattggatgaaaaatacatgctattgattgtgtccaaagcctcccgaggacctccgtggggatgctctggtagcctgaatacagaactgaggtgaaagtccaaaccttgaattttacagtagtaagttggtaaaccatgtgctctgtgctatgagttaattatgttttcccaaatactaatgtggcacaagtaccatattttatcagagttcttatgtacagtatggtgaagataagtgacaagcacacatttttcttgcttcactgctgttctatattacacaggtttgttgttgttttttttaaaaaagaaattaagcagtagttagtctctaaaaatacaatgtttcaggctaccacagtgaataaatagaaatgtaatcagggattaaaaaaaaaacttatgcagcttttcaaagttgattgtttcaaaattggtgtttatttgtaattttactattaaagaaagtgaaaggtttagttttgttagcatggctcagcatgtagctgtcaggtgtttttcacctaagggcaaaagaaaatgatagtaataattgcagtagttgtattgtattgtatttttgcacgtgtggtaagcataggcttgaagaggtgggtaggcaggtacatgtacttcctaaatttggagataattatctttctgtaagttcgttatgcttgactgtttccatgttctcccaataatgattttatagttacttatcactttactcatggagaattaaaacgtaatgtttttcaactgtatctttctttaactggataatactgctatatgatatgcttactacagactgcattaattcacgaaacgaattctgttatgctgtaatttgaactctcctcaccacaacttattaaaaaggcaccaatagtttccca

SEQ ID NO: 303459 - DNA, 2262 bp, Homo sapiens
agcggagcgggtcctgccgcgccggcagccacaggctggcatagcggctgccgacccgccctcgttcctccaccccctgcacgggactgctgggcccgccccgccccgcctgcaggtgaagcggccgcagccgccgagtaggtgcgtggggatgatctcactcgcgcgctccgcgccaggaggaggaggagcgggagcggatccaacttccgggtagtggagccgcaagccaccggcatcttgctttttcttccccctcctcctgtgtgccccgcgccgctccctctttcccttttattcccggccccacccgccaaaatgaacagctcggacgaagagaagcagctgcagctcattaccagtctgaaggagcaagcaataggcgaatatgaagaccttagagcagagaaccagaaaacaaaggagaagtgtgacaaaattaggcaagaacgagatgaagccgttaaaaaactggaagaatttcagaaaatttctcacatggtcatagaggaagttaatttcatgcagaaccatcttgaaatagagaagacttgtcgagaaagtgctgaagctttggcaacaaagctaaataaagaaaataaaacgttgaaaagaatcagcatgttgtacatggccaagctgggaccagatgtaataactgaagagataaacattgatgatgaagattcgactacagacacagacggtgccgccgagacttgtgtctcagtacagtgtcagaagcaaattaaagaacttcgagatcaaattgtatctgttcaggaggaaaagaagattttagccattgagctggaaaatctcaagagcaaactcgtagaagtaattgaagaagtaaataaagttaaacaagaaaagactgttttaaattcagaagttcttgaacagagaaaagtcttagaaaaatgcaatagagtgtccatgttagctgtagaagagtatgaggagatgcaagtaaacctggagctggagaaggaccttcgaaagaaagcagagtcatttgcacaagagatgttcattgagcaaaacaagctaaagagacaaagccaccttctgctgcagagctccatccctgatcagcagcttttgaaagctttagacgaaaatgcaaaactcacccagcaacttgaagaagagagaattcagcatcaacaaaaggtcaaagaattagaagagcaactagaaaatgaaacactccacaaagaaatacacaacctcaaacagcaactggagcttctagaggaagataaaaaggaattggaattgaaatatcagaattctgaagagaaagccagaaatttaaagcactctgttgatgaactccagaaacgagtgaaccagtctgagaattcagtacctccaccacctcctcctccaccaccacttccccctccacctcccaatcctatccgatccctcatgtccatgatccggaaacgatcccaccccagtggcagtggtgctaagaaagaaaaggcaactcaaccagaaacaactgaagaagtcacagatctaaagaggcaagcagttgaagagatgatggatagaattaaaaagggagttcatcttagacccgttaatcagacagccagaccgaagacaaagccagaatcttcgaaaggctgcgaaagtgcagtggatgaactaaaaggaatactggggacacttaacaaatccactagttcaagaagcttaaaatcccttgaccctgaaaacagtgaaactgagttagaaaggattttgcgtcgcagaaaggtgacagcagaagcagatagcagtagtccaactgggatattagccacctcagagtccaaatccatgccagtgttgggttctgtatccagtgtaacaaaaacagccttgaacaagaaaactctggaggcagaattcaacagcccgtcccccccaacacctgagccaggtgaagggccccgtaaattggaaggatgcacaagttccaaggttacgtttcagcctcccagtagcattggatgcaggaaaaaatacattgacggtgaaaaacaagccgaaccagttgtagttttagatcctgtttctacacatgaaccccaaaccaaagaccaggttgctgaaaaagatccaactcaacacaaggaggatgaaggcgaaattcaaccagaaaacaaagaagacagcattgaaaacgtgagagagcatcactgctgatcataacgagactgacatgttgagtctttcatagtgatgtatatgcaggctgtgaca

SEQ ID NO: 303460 - DNA, 1722 bp, Homo sapiens
agcggagcgggtcctgccgcgccggcagccacaggctggcatagcggctgccgacccgccctcgttcctccaccccctgcacgggactgctgggcccgccccgccccgcctgcaggtgaagcggccgcagccgccgagtaggtgcgtggggatgatctcactcgcgcgctccgcgccaggaggaggaggagcgggagcggatccaacttccgggtagtggagccgcaagccaccggcatcttgctttttcttccccctcctcctgtgtgccccgcgccgctccctctttcccttttattcccggccccacccgccaaaatgaacagctcggacgaagagaagcagctgcagctcattaccagtctgaaggagcaagcaataggcgaatatgaagaccttagagcagagaaccagaaaacaaaggagaagtgtgacaaaattaggcaagaacgagatgaagccgttaaaaaactggaagaatttcagaaaatttctcacatggtcatagaggaagttaatttcatgcagaaccatcttgaaatagagaagacttgtcgagaaagtgctgaagctttggcaacaaagctaaataaagaaaataaaacgttgaaaagaatcagcatgttgtacatggccaagctgggaccagatgtaataactgaagagataaacattgatgatgaagattcgactacagacacagacggtgccgccgagacttgtgtctcagtacagtgtcagaagcaaattaaagaacttcgagatcaaattgtatctgttcaggaggaaaagaagattttagccattgagctggaaaatctcaagagcaaactcgtagaagtaattgaagaagtaaataaagttaaacaagaaaagactgttttaaattcagaagttcttgaacagagaaaagtcttagaaaaatgcaatagagtgtccatgttagctgtagaagagtatgaggagatgcaagtaaacctggagctggagaaggaccttcgaaagaaagcagagtcatttgcacaagagatgttcattgagcaaaacaagctaaagagacaaagccaccttctgctgcagagctccatccctgatcagcagcttttgaaagctttagacgaaaatgcaaaactcacccagcaacttgaagaagagagaattcagcatcaacaaaaggtcaaagaattagaagagcaactagaaaatgaaacactccacaaagaaatacacaacctcaaacagcaactggagcttctagaggaagataaaaaggaattggaattgaaatatcagaattctgaagagaaagccagaaatttaaagcactctggtaaaagcattgagtaggctactatgtcttactattaatctttgaattactcatgcctagtacaaaacctggcatatagttagtctagaacatttactgaatgctgtggaaaaataccaagatttgttttgaaattccttaatttctaaccattgcaattcagtagaatagctgctgtattaaataattcaaaaatatttagactaattttttggacttagagcccttgtgaacatcatatacagaatttagacacagagataccgttagcctaggaagaccaacttttcagcatttttcagagcttcagagatgaatgttcattatgtactttattttgttcacttagagtgcatttttagaaagaattaaactttttaaaaatactgtct

SEQ ID NO: 303461 - DNA, 461 bp, Homo sapiens
gcatagtgtagtcatgagccttatgcatgatcagtatgtattcatatagagtgaagttgattcgatagctagctgcatgtagctgtcagtgtttcactaggcaagataataattgcagtagttgtattgtattgtatttttgcacgtgtggtaagcataggcttgaagaggtgggtaggcaggtacatgtacttcctaaatttggagataattatctttctgtaagttcgttatgcttgactgtttccatgttctcccaataatgattttatagttacttatcactttactcatggagaattaaaacgtaatgtttttcaactgtatctttctttaactggataatactgctatatgatatgcttactacagactgcattaattcacgaaacgaattctgttatgctgtaatttgaactctcctcaccacaacttattaaaaaggcaccaatagtttccca

SEQ ID NO: 303462 - DNA, 515 bp, Homo sapiens
gtgttgatgaatatgtaagacaaaaatatacttaatttgtctattgtttaaaaatccaagatactcatttggctgcttttaaaataactgtttttatattttgtcttagctaaataaagaaaataaaacgttgaaaagaatcagcatgttgtacatggccaagctgggaccagatgtaataactgaagagataaacattgatgatgaagattcgactacagacacagacggtgccgccgagacttgtgtctcagtacagtgtcagaagcaaattaaaggtagaactctttgcttaattattgagcatattttttaccccgttatgatagtgcttctgaaccctgactgcacatcagaatcatgtgggaagctttcaaaatactgatgcctaggcagggcgtggtggctcacgcctgtaatcctagcactttgggaggccaaggcgggtggatcacctgaggtcaggagttggagaccaacttggccaacctggtgaaacccggtctctactaaaa

SEQ ID NO: 303463 - DNA, 391 bp, Homo sapiens
tttttccctttcttttctttgacaaaggaaaaactgtcagccataaaagtcttttttttttaaataacttataggtcaaagaattagaagagcaactagaaaatgaaacactccacaaagaaatacacaacctcaaacagcaactggagcttctagaggaagataaaaaggaattggaattgaaatatcagaattctgaagagaaagccagaaatttaaagcactctggtaaaagcattgagtaggctactatgtcttactattaatctttgaattactcatgcctagtacaaaacctggcatatagttagtctagaacatttactgaatgctgtggaaaaataccaagatttgttttgaaattccttaatttctaaccattgcaattcag

SEQ ID NO: 303464 - DNA, 1067 bp, Homo sapiens
acacatgtgcacacacatacactcacacgtgtgtgcaggtgcacacctcccccagaggctgcagccaagacgggcatcccacatcagagggatgaatggcaggtctgtcccgccagctgtgtgctctctcccacccgaagaaagcagcagagactcagacggcggagcctggaggagcccacgcagtctgttcccggcacccggtgcgtgtgaagggacttgagggcagcgagatggaatcagcaagagaaaacatcgaccttcaacctggaagctccgaccccaggagccagcccatcaacctgaaccattacgccaccaagaagagcgtggcggagagcatgctggacgtggccctgttcatgtccaacgccatgcggctgaaggcggtgctggagcagggaccatcctctcactactacaccaccctggtcaccctcatcagcctctctctgctcctgcaggtggtcatcggtgtcctgctcgtggtcattgcacggctgaacctgaatgaggtagaaaagcagtggcgactcaaccagctcaacaacgcagccaccatcttggtcttcttcactgtggtcatcaatgttttcattacagccttcggggcacataaaacagggttcctggctgccagggcctcaaggaatcctctctgaatgcagcctgggacccaggttctgggcctggaacttctgcctccttcctccgtgatctgccaggctcgtgggcactttccacagcccaggagagcttctgaaaggacagtatagctgcccttgctccctacccacagcacctgagttaaaaagtgatttttatgttattggtctaagggacttccatcttggtctgaagtcctgagctcagacgcaggtactgccagccataccttcctggtagcatctgctggacctaagtaaggcatgtctgtctaaggccaagtctgcccggcttaaggatgctggttctgactctaccccactgcttccttctgctccaggcctcaattttcccttcttgtaaaatggaatctatatctataaaggtttcttcaaatccaa

SEQ ID NO: 303465 - DNA, 2362 bp, Homo sapiens
acacatgtgcacacacatacactcacacgtgtgtgcaggtgcacacctcccccagaggctgcagccaagacgggcatcccacatcagagggatgaatggcaggtctgtcccgccagctgtgtgctctctcccacccgaagaaagcagcagagactcagacggcggagcctggaggagcccacgcagtctgttcccggcacccggtgcgtgtgaagggacttgagggcagcgagatggaatcagcaagagaaaacatcgaccttcaacctggaagctccgaccccaggagccagcccatcaacctgaaccattacgccaccaagaagagcgtggcggagagcatgctggacgtggccctgttcatgtccaacgccatgcggctgaaggcggtgctggagcagggaccatcctctcactactacaccaccctggtcaccctcatcagcctctctctgctcctgcaggtggtcatcggtgtcctgctcgtggtcattgcacggctgaacctgaatgaggtagaaaagcagtggcgactcaaccagctcaacaacgcagccaccatcttggtcttcttcactgtggtcatcaatgttttcattacagccttcggggcacataaaacagggttcctggctgccagggcctcaaggaatcctctctgaatgcagcctgggacccaggttctgggcctggaacttctgcctccttcctccgtgatctgccaggctcgtgggcactttccacagcccaggagagcttctgaaaggacagtatagctgcccttgctccctacccacagcacctgagttaaaaagtgatttttatgttattggtctaagggacttccatcttggtctgaagtcctgagctcagacgcaggtactgccagccataccttcctggtagcatctgctggacctaagtaaggcatgtctgtctaaggccaagtctgcccggcttaaggatgctggttctgactctaccccactgcttccttctgctccaggcctcaattttcccttcttgtaaaatggaatctatatctataaaggtttcttcaaatccaaaaaaaaaaaaaaaaaaaagttgggggacaggggtctgggtttggctccaggtgggaacaaggcctggtaaagttgtttgtgtctggcccacagtgactctctgtgcacgactcaactgccaagggcatcactggccaattcttggatttagggattggctaggagttgctggggtccactcctgggcctgccccagctccttgcccagggagagggaaagagttaacggtgtgggccactccagcttgcccttccactgccactcactggggtgaggctgggggtcagcttggtgaggattggggcttctagattgtctaggcaggaggtgaaacttaggccagagtcagatttgagctgagccaggggaggccttggcaacctacttctactcagatttcattgctggatgcggaaggggtaggcccaaaatatatacaggatcttactgtcccttgaagcccagccacaagtgttggagctgcagagagaccccaaaggtagtagattgtgccagatacaaatgggtcccatccagtgcttcatactccttcagtcactatcccagacagtgagccccagatctcctagctctggcttctgtgtcccacacggcctgttcccagcttctctcctggttcccttgttacggattcatttatccattcagtgtttcctgggcctctgctcagaggcaggtcaccactgggccctgtggatcaatgcaagatgacaaaggctttttttttttttttttttttttttttttttgaggagtttcgctcttgttggctaggctggagtaaaatggtgcgatctcggctcactgcacctccgcctcccaggttcaagcgattttcctgcctcagcctcccgagtagctggggttacaggcatgcaccaccatgcctggctaattttctgtatttttagtagagacggggtttctccatgttggtcaggctggtcttgaactcctgacctcaggtgatctgcccgtctcggcctcccaaagtgctgggattaccggcatgagccactgcgcctggccgacaaaggctttgatatcagaatgaactgtcaagggaggtgctggagagggattaacctgtgctgcctgggaccctcagggtcttaggttggggagtgtgaataggagtttgcagatggagaataggaagggcattccaggcagagggaaacctgtgcagagaccaagaggtgtggaaggaaaagtggggttggggctgggtggtctggattatggcctggatgcaataaagtactgtgacagt

SEQ ID NO: 303466 - DNA, 710 bp, Homo sapiens
ggtgaggcgtggctcaaacgaccgccgctaagaacaaaacgttggctttggcttcgttgcaggaagcagccgctcggtggccgtacaacgcttcatctctccgagcctcggtttcctcatctccagccctaaaatgacgacacgccccacaggtcttgggaggattaagtgaggggacatgaggtacagttccagggacaaagccgtgttcccgaatcgggtctttcttccctgtctcccctccctagtttgtgagccgcgtcgcggcggagcggatgtaggcccgagggctggcgcgactgcagctgcgaccctttcctccgcggactcaggaacgccaccctcccctccccacccggcgcggggctgcgaggctgcgaggccgcgacggtgcagagtctccagacagccgcgccgccggagggcaggacaggagggtcgctgagggtcacaggaggggcgctgtgggccagaagaacgggcctggggtgctcctggagccctcggtggcccctgctggaggcttgggcagctgcagggggacagagcggcgcaggcagcaggggagccgggtcccgaggggaaggcgcctgtcctcgggaggtgaaggttcctgcgctccgcaggcggccgtagcccgcgggccgactcgggggaatggcaggaatgcgcgggcgccgggcggaagagccgcgcgaccggccagctgg

SEQ ID NO: 303467 - DNA, 665 bp, Homo sapiens
ggtgaggcgtggctcaaacgaccgccgctaagaacaaaacgttggctttggcttcgttgcaggaagcagccgctcggtggccgtacaacgcttcatctctccgagcctcggtttcctcatctccagccctaaaatgacgacacgccccacaggtcttgggaggattaagtgaggggacatgagcctggaagctccgaccccaggagccagcccatcaacctgaaccattacgccaccaagaagagcgtggcggagagcatgctggacgtggccctgttcatgtccaacgccatgcggctgaaggcggtgctggagcagggaccatcctctcactactacaccaccctggtcaccctcatcagcctctctctgctcctgcaggtggtcatcggtgtcctgctcgtggtcattggtgaggagcccagcctgcagtcagaccttctgcctcggcacccgtggctggcagaaaggccccacgtgtcccctgggccaccctgcattggcacaggcagctttgcaaccacacgctgacctgcagtgagccctccgctaacagaggcccaaagaccaacttccaccccgcgagggcaggcgccctgtcctgtctcctggtatcccatggagcagaccctccgcagtacctgctgaatgactgcgccagcacc

SEQ ID NO: 303468 - DNA, 467 bp, Homo sapiens
ggtgaggcgtggctcaaacgaccgccgctaagaacaaaacgttggctttggcttcgttgcaggaagcagccgctcggtggccgtacaacgcttcatctctccgagcctcggtttcctcatctccagccctaaaatgacgacacgccccacaggtcttgggaggattaagtgaggggacatgaggtggtcatcggtgtcctgctcgtggtcattggtgaggagcccagcctgcagtcagaccttctgcctcggcacccgtggctggcagaaaggccccacgtgtcccctgggccaccctgcattggcacaggcagctttgcaaccacacgctgacctgcagtgagccctccgctaacagaggcccaaagaccaacttccaccccgcgagggcaggcgccctgtcctgtctcctggtatcccatggagcagaccctccgcagtacctgctgaatgactgcgccagcacc

SEQ ID NO: 303469 - DNA, 984 bp, Homo sapiens
ggtgaggcgtggctcaaacgaccgccgctaagaacaaaacgttggctttggcttcgttgcaggaagcagccgctcggtggccgtacaacgcttcatctctccgagcctcggtttcctcatctccagccctaaaatgacgacacgccccacaggtcttgggaggattaagtgaggggacatgagcctggaagctccgaccccaggagccagcccatcaacctgaaccattacgccaccaagaagagcgtggcggagagcatgctggacgtggccctgttcatgtccaacgccatgcggctgaaggcggtgctggagcagggaccatcctctcactactacaccaccctggtcaccctcatcagcctctctctgctcctgcaggtggtcatcggtgtcctgctcgtggtcattgcacggctgaacctgaatgaggtagaaaagcagtggcgactcaaccagctcaacaacgcagccaccatcttggtcttcttcactgtggtcatcaatgttttcattacagccttcggggcacataaaacagggttcctggctgccagggcctcaaggaatcctctctgaatgcagcctgggacccaggttctgggcctggaacttctgcctccttcctccgtgatctgccaggctcgtgggcactttccacagcccaggagagcttctgaaaggacagtatagctgcccttgctccctacccacagcacctgagttaaaaagtgatttttatgttattggtctaagggacttccatcttggtctgaagtcctgagctcagacgcaggtactgccagccataccttcctggtagcatctgctggacctaagtaaggcatgtctgtctaaggccaagtctgcccggcttaaggatgctggttctgactctaccccactgcttccttctgctccaggcctcaattttcccttcttgtaaaatggaatctatatctataaaggtttcttcaaatccaa

SEQ ID NO: 303470 - DNA, 881 bp, Homo sapiens
ctcactagagtttgagtctgtcggtgattctcctatatagacatggcatagctgatacaaattcaagacaggaaaaggcacctggaagctccgaccccaggagccagcccatcaacctgaaccattacgccaccaagaagagcgtggcggagagcatgctggacgtggccctgttcatgtccaacgccatgcggctgaaggcggtgctggagcagggaccatcctctcactactacaccaccctggtcaccctcatcagcctctctctgctcctgcaggtggtcatcggtgtcctgctcgtggtcattgcacggctgaacctgaatgaggtagaaaagcagtggcgactcaaccagctcaacaacgcagccaccatcttggtcttcttcactgtggtcatcaatgttttcattacagccttcggggcacataaaacagggttcctggctgccagggcctcaaggaatcctctctgaatgcagcctgggacccaggttctgggcctggaacttctgcctccttcctccgtgatctgccaggctcgtgggcactttccacagcccaggagagcttctgaaaggacagtatagctgcccttgctccctacccacagcacctgagttaaaaagtgatttttatgttattggtctaagggacttccatcttggtctgaagtcctgagctcagacgcaggtactgccagccataccttcctggtagcatctgctggacctaagtaaggcatgtctgtctaaggccaagtctgcccggcttaaggatgctggttctgactctaccccactgcttccttctgctccaggcctcaattttcccttcttgtaaaatggaatctatatctataaaggtttcttcaaatccaa

SEQ ID NO: 303471 - DNA, 844 bp, Homo sapiens
cagttccaagtcagcaaatgggatctgagtcatgatgtatatgcctggaagctccgaccccaggagccagcccatcaacctgaaccattacgccaccaagaagagcgtggcggagagcatgctggacgtggccctgttcatgtccaacgccatgcggctgaaggcggtgctggagcagggaccatcctctcactactacaccaccctggtcaccctcatcagcctctctctgctcctgcaggtggtcatcggtgtcctgctcgtggtcattgcacggctgaacctgaatgaggtagaaaagcagtggcgactcaaccagctcaacaacgcagccaccatcttggtcttcttcactgtggtcatcaatgttttcattacagccttcggggcacataaaacagggttcctggctgccagggcctcaaggaatcctctctgaatgcagcctgggacccaggttctgggcctggaacttctgcctccttcctccgtgatctgccaggctcgtgggcactttccacagcccaggagagcttctgaaaggacagtatagctgcccttgctccctacccacagcacctgagttaaaaagtgatttttatgttattggtctaagggacttccatcttggtctgaagtcctgagctcagacgcaggtactgccagccataccttcctggtagcatctgctggacctaagtaaggcatgtctgtctaaggccaagtctgcccggcttaaggatgctggttctgactctaccccactgcttccttctgctccaggcctcaattttcccttcttgtaaaatggaatctatatctataaaggtttcttcaaatccaa

SEQ ID NO: 303472 - DNA, 6562 bp, Homo sapiens
gccatggaggcagatgcctttctgaaggctctgcagctggggccttttagtattttgtagactgagatgtttcatgtgtttttcttacttattttattcatagcatgcacttaatgaagttgatcctggtgactggcagaaattcgtgaagaagggactcaaatttcggtaccaggaccacacatttttaaagatgctcctcaccgccgtacagctcctgtacagcccagaaagctccgtgcgcacgaagctcatccagctcccggtggtctacgtgatgctcatgcagcactcgctgtttctgccgactctactgacgtctgacggagaggagagcccggacagccaagtaaaagaagcgctggtggacctgatgctgacggtggtggagatgtgcccctctgtctgtgagagcagccactttgcagtgcttctcggggcctatggcgccactctcagcgtcctagatcagaagattttacttctgcttcgagcgtatgagcagaacaagctcagcctcatcaacttcagggtgctgctgtggggcccagcggccgtggagcatcacaagacgtgccggagcctgggcaggtcactgtggcagcagccgagtgtcggggacatccttcgcctgctggaccgggaccggatgatgcagaccatcctgcacttcccccagaaccggaggctgctgccccccgaggacacacaggagctgatattcaaagacaaaagcagggtggatcttgatggcctctatgacccctgctttctccttcagctcttcagtgagctgaccaggccagagtttgtggtggattgtcgaaaatttttggattcaaatgctctgggcctaactgtcacagccctcagcagctatgacccccagatgcgagccatagcctaccatgtcctggcggcctactactcgcacttggagggcgcacggttccaagagcagtcccagctactttacctgttggatgtagtccggaatgggattcgaactcaggacatgagacttacttttaccttggctctcttcattgccaaagcagccctgcagattttgaaaccagaggagcacatgtacctgaaggtcagcaacttcctgctgtcgcatgagtacttgaacatggacaaagtgccaggcttctaccagttcttctacagctccgactttgagcaaaaaacagagcagaagtgggtgtttggccttctgcggcaggggatccgtgacaagcagtgctacgaactgtgtgcccggcgtggcatcttccacatcatcctgtccttcttccacagcccgctgtgtgacgaggcagcacagaattggattctggaaattctacagaatgctgcccaggttgccagatctgcgtatgaaatcatacgagactatagccttttaacatggattttacacatccttgaaagcaagtttctggagactccgctgctgtctaatgtgatctccttgctacacacactgtgggtgaccaacctgggggacaaggcagtggagtgggagagccagcgcctttgccagcctagctcccaggagcctgccaagcggcttgccctgcacctggtcaatgagttcctttatgttctcatcgtgctcatgaagcacctgaggcccaccttggcccccgtccagctgaccaacttcttcgggacacttgactccgtgctgaggtaccgggccactgtcatacaggcctttagggacatgaacagattcaccgtaaatgagacagtgctttccaccaaggacgtccttgtcctcttgcacaagtggagcctcattgaaagagacctcaagctccaggaagacctgagagcagccattgagaaggcccaagcccgggagctcatgaaaatgctcaaggataagaacaagcctgtcatgccagcccgagccaaaggcccacggggccgaaagaggaggcctggggaggcagaggagatggctgaccctgagctgatggcatctaccttggagacatgcaagggcctcctgaggtccatcttgacttactggagaccagtgatccctggtcctgaccccactcaggagcctgtggactcagccagccccgagagcgatgcgccaggccccgtatatgctgccgcttccctggcagtcagttgggtgctgcggtcggtggccgagcacccgctcagcagggcagaggctgcaggactcattggctggcttaagagccatattttgccacaccctgtggtcgtggctgacctccttaaggacagtgccgtgaggagcagcatattcaggctgtatagccggctctgtggggctgaggggctggcagggcctgtgcaggaggtggcctgcctgttcaatacggtcatgctgcagctggtggctgcccagggccgggcagggagccccttccacccggccatggaagccctctccctgtcttctctgagtgagaaggatgaagccacacaagcctccgcagcattcctagtgtctctctacataaaggacatctggctgggggctcagcggccggacaccctcttaacccacgtccggatggtgtgtgaggccgcagatgatgccccgagcagtgaagaggaggccatcgtggtgctctgcaaggacgccgccagcgcagcctcagatgcttgactcctgccggccagcaccttgcaccctgatgaccagagcctcgagcacagcaccagcttctagaagtttggttgagtcaagggtttccagagaaggcatgggaaacaacaggttcagtacattggctcagttctttgacaagaaaagttgagaggactttattgaactgcccagtaaatgataaactcgggcctgtaggtgcccagcatcagagttgcaaggaatgtggggacttctaggccatgaggcccatccagtgcctcgtcaggccgccccttcctctctaggggcttggagctcatcacaggaaatagctcgagtttgaggcagcacttctgaatgcagaagagattcatctgtgttaaagctgaaatgtcaaaaggtatcagattttttttatgaaaacgaagagagatgtttaaagtttatttttcagcaggtgaggtggctcacgcctataatcccagcactttgggaggccaaggcgggtgaatcacctgaggtcaggagttcgaaaccagccttcccaacatggtgaaaccccatctctactaaaaatacaaaaattagccaggcatggtagcgcacacctgtaattccagctactcgggaggctaaggcaggggaatcgcttgaacctgggaggtggaggctacagtgagctgagatcgtgccattgcgctccagcctaggtgacagagcaagactccatctcaaaaaaataaaaaaataaagtttgtttttctataaaaagtcataacaaagtattagtatgactttttgaataagttaatttctgccagtgtttaattattttattaaagaaaaggatgttacactgaatccttaaagaataaaagtgatttgacctctgctttgagaagacagcctgtaatttttaaagctatacttcaaagaggggattttgaattttataaatgcttgttaatgtctatttttgtaaggtttttgtgttttcctttcattgttgttaagaggctatttttgctccacataggcctgcatttattttaaaggtcagaattttactcttaatggtcatatattagttggggttgtagctgacaaaagtcatgaaatttcgtggttttcacagttaaaatttccgtctgttcctttaaaactctcctgcatgcctggggctcttgggatctgctctgtggcctaggatgtggctgttttatctgccgtataatgtacatcgtgctgacaatgccttggttttgtctgaaacatttacacttctattttccaccagtgttctttagaattgtttctgttttaggtgacttaaagttttaactaaagcatgagtaacgtttgttggcatacagtcccttcaccacaaataattgtcttgcactgtctacaaagcaaggatcagttacctcacttgtccccttccctacccaaataaaccttacaacgctattctttgagactatcctgaacttgaaatcccacgtttagatccaagctggactcaggcaagcgctgctccaacaaagcgttctcttcctggttccccttaatctttatccacctctccaaggcctatctttggggattcctttggttataggcacctctgcttgtttatgcagggggcattggccggaaggacattggtctggggaatatccctgaaccccatgcctctgggggcacagggaggggcagcgagcaggtggggtggatttccacggcttcatccctggctccaggcctaagctgcctcccaggttcttagggcccagcaagtcaatacatactacgtcaggtggcgacaaatgctccaaagccgagttccagctcagtcaagtgaggacacattttcagcacctcaccttcttttctgcatctctggagctcatcagtcttgcttttctttgttctcccttttaaatccactgccctgaccttgttcatgtattttccagtcacttagtgtggaggaagggaatctcatcccatggagaatagatcgaacatggtcttcacctgacttaaaatataaaatgctaaattagaaatatcttaagtggggcggggggcacagttattttaaaaataaaacctatcaactccctccttgcctgaaagctgtaggggacatatgggtcttctgagatttgctgtgtgatgctgtctcctctccagggacaaggctgctgggcactagaggactagatctttcaagggtcccagatccactgtcacataaagtcacatccagaagacctttcctgccagcttccagggctctttgtgttctgtgacagcatttgggcatagatcctgcttacccggcctggctgctgacaggcgttggctgcctgccctccaggggagacactttcttgggctctgtctttgaaaggctgtggggaggttgaaggtgcaactcaggtccccagactgcagtgagctgacctggcagggcagatgccatcacatctgggggagccggcgggtgttagtggagcttggatgggaacttacccagcatcctaacaaaggtacagaaggaccaggtgaactcagggctgataacgcattacacagtaatggtaaagtggcatagtaaagattagtaagcaaacagcttttcctcttgatttgcatatattttattttcctactcttccctgagcaaatataagcagtaagcaagcaggctaggtgtgctcaataaactcagcaacacctgggatgacctctgcactcgaggggccactgcaatctttgtcaaaggcataggatgctcctgctctagttgcacttgacctaggtgccctttctgctacatgcaaatggcctctaagaagaacgaggaacgtatgtgtccaggttggcttgatttcaccagttcactcagctatggccacgatttactgacatcagctctgcaattgagaggtcctgtctccagggggaggctcgctgggcttgctcctgacgaggggacccccattgagggtcagttcccagaggagagtggggtgggtctggaaacccccgaggggcaaggtggaggagctctcctgtcgtagcggctggtcagggccagttctgctccctggctccactgagctcgcctgagcctgtgaggttgccaggggttccctgtggcacggcaggcacttctggatgcagaggtggaggttgaggccgtgactccaggggcatgtttggtggtgcttggggctgttcctgtgaacagagcagagtgggaggcaggcatcatagttgctgcagaacagtccatactgtggggctggggggtttcctgccacacctgccatctgcccggaccccatagggaaggccacacaggcaaattcctgagaagggtcagccagctcacaaaggtggccattctagagaaatctcagaggagaggaagtgctttgtcaggaactaggcctcaggtctttccctggaggccacttcttcctacattgatttaggatggggggggtggggggtggaggggagcaggttgacctcccatccagcgctgtatctgagtgtagttcattttatatccatagcccaagccaacttgtatcttggtgatatggtttggctgcgtcacgacacaaatctcaccttgaattgtaataatccccacgtgtcgtgggaaggacccagtgggaggtaattgaatcatgggggcgggtcttcccatgctgttctcgtgatagtaagtctcatgagatctgatggttttataaaggggagtttccctgcacatgcccttttgcctgtgtcatgtaagatgtggctttgctcttcctttgccttctgccatgactgtgaagcctcccccgccatgtgaaactgtgagtccattaaacctctttcctttataaatta

SEQ ID NO: 303473 - DNA, 10647 bp, Homo sapiens
cgcgcccgcaaagaagagctcacgggcgtgcggttcaaggctcagctgaaggacccgcagggccccgggccaggcttggaagcgtttgtgtctgctgccaagaagctaccacgagaagatgtgtatgatgttgtggaagggtatataaagatttctgttgagtgtgtcgaaattttccagctcctaagtggagagaaacgacctgaaagtgaaacgatgttaatatttcaagttttcgaggccatattattgcggacagcaagtgatctttcacatttccatgttgtgggaaccaacattgtgaaaaagctgatgaacaaccacatgaagctcatctgtgagtccctgtatgcctcaggttacaggttggctcgcgcctgcctgagcctgatgaccgccatggtgacccagggtccggaagctgccagggacgtctgcagccattttgatttgaataaaaagaccctgtacaccctggtgaccaagagggattcaaagggagtgtacgacgttcggcaggcctacgttcagtttgctctctcctttttaattgcgggtgatgacagcactatagtgcaggtgttggaagtgaaagaatttattccttgcatttttagctcagggataaaggaagataggatctctaccatcaatattttattatccacactgaaaacaaaggtagttcacaataaaaatatcacaaaaacccagaaggtgcgtttctttacggggcagttattgaaccacatagcatcgctgtacaactggaatgggattaccgatgtgaacccagaaaatgtcaaggtttctgccgaagaagcagggaaaaccatggtgcgggagcttgttcataacttcctgatggatctttgctgttcactcaagcatggaattaatttttacgatgcatctttgggtacctttggcagaggcggaaacctgacactcttgcacttcttgctgggtttgaaaactgcagctgatgatgatctggtggctgaccttgtggtaaacatcctcaaagtgtgcccggacttactgaacaaatacttcaaggaagtaacgttttcctttatcccacgagcgaagtctacttggttaaataatatcaaactactaaacaagatctatgaggctcagccggagatttcccgggcatttcagaccagagagtttatacccttgcctcggctcctggcaatggtgatggtgaccaccgtgcccctggtgtgcaataagagcatgttcacccaagcattaaacttggacagcacctcagtgaggcacacagccttatcccttatttctgtcattttgaagagggcattaaaaactgttgaccactgcctgaataaagaggtgtggcaggaatcaggcgtgtacacagctgtgatgatggaagaattcgtgcagctcttcagagaagccctgagcaagattttgccagacctgaacactgtcgtgtgggtctggcagtcacttaaaaagcaagagaccaaacaggatgacaagaaagggcagaaaaggagcgatgggcccccggctgcctgcgatgctcaccagtgcgatgatgcagaaaccattcttttgaaagctgttttgctccaggtcatatgcctctaccagaaggtggtcccccacgtggtcatgcagtacaactttgacttcagcaagctcctgaaaggtgtcatctctgagcagggccttcgagaggaggtgcctcccattctgcagcaccacatgctgaaggtggccctggagctgccggccagcaagtttctgtggttaaaggcacaggaaggcccagatgcagaaattattggaggtgaacgatcagtattttacttactaatgaaaatgtttgtgaccagtagccatttacaactgaagtcattgaccaaacttctgatcatgaagattctgcgggacacgggggtgtttgagcacacctggaaggagctggagctctggctggagcatttagagaacaccatggaagaggacaaagagactgtgattcagtttctggaacgcattttattgacattggtggcgaatccctattcatacacagacaaagcatctgactttgtccaagaagcaagcatgctgcaggccactatgacgaagcaagaagccgatgacatgagcattcccatctcccacattgacgatgttctcgacatggtggatgtcctggtggagggcagtgaaggcttggatgaggaaatagggttcacgttgagtgaagacatgatcctgctcacgttcccattcagtgcggtagtccctgcggccctggaagccaggaataagttgctccttgggacaggcaatgaagcagcggaaaacgttgtgacatatctgacggcagtgctgactgacctcctccacacccagagggaccccctggctctgtgtctcctgctccaggcatatgataagcttgagcctccatgcctggtgccttgctgccagcagctctcacggtttaacagatactacagcctctggatcccggagcaagcccgagaggcctggctgctgcaggcacagggcagcccctcgccccctgcccttcccttggcctcgtccttcacagccctgctgcaggcagcctacgagagccaagcgcttcgggacgagcacatccaggtgcagctgcaggccaccatgccacacctgtccatgcagcaggtcctgctcgcggccaagcaggtgttgctctacctgcggagcactgtggagaacttcggccagctgggcagaagtgtgggcccgcccctcctgcagctcttcctggatctcctcaggcgcctggttgtccactgtgagcagctggatgcccagaaccagcagagatgcgaggccgcccgggccgaagccgacctcttcctggacatggagtccgtggcctcgctggagttggccaatgatcagacgctggaggaggtgcttgtggccatcctcaggcaccccaccctggagggctggttcctggccctggagcagcaggccctcccgccgcacacgctcagccctgtcctcgtgaagctcctggccacccactttagtgcaggggtccttcagctgctggcagcaagtgccccgatcctccagaacattgggcagctgggccttctggccaggtactcagaggccatcacccagagtgtgctgaaggaacttcagaacaggagggcgggcccggccacatcaccaccaaagaccccgccgcagctggaggccctgcaggagctgcatccatacatggagggtgcccagctccgtgaggtcaccctggccttgctgagcctgcctgagacacacctggtgacccagcaacccacgaaatcccccgggaaggaaagacacctgaatgctcttggaaagaccctggtgcagctgctgacctgcagcccccaggatcagctgcagagtggtgagctcctgtggtcctccgagtatgtgagaggcctgggggctctgctgcccacgctagcagtggacgagctggacacagtgctcctccacactctgcagagagaccctgtgctggcccccgcagtcggggctgatctgcttgactactgcctggcccggcgcacacaggcggccctcagcatcgctgccctgctcctccaggagagctgcacccacttgctgtggttcgagcagtggtgcctgcaggctggcccagggctcggcctccagggggacctggacgacttccttcccctcatccatgtgtacctccagtgcaggacacggagccacttcacacgcccagcaggagtgtcttccgctgtcattcctgtcttgaggaagaccctgtggaggcagctacagagcaggcttcttagcactgacagtcccccagcatctgggctgtaccaggagatcctggcacagctggtcccgtttgcacgagccaaggatctcagtgtactcatggaccgcctgcccagcttgcttcacaccccaagcagtcacaagaggtggatcgtggccgactccatttcagcagctctggaagggtcagcagaagagctgtgtgcctggagaaggacccttttggagtcctgtgtgaagtggctgatcgtgtctttcagtggtggacagcaagatgatgataatactcagaatcaggagaaggaaatgctgcttagattaaatgcgttgttgcatgcacttaatgaagttgatcctggtgactggcagaaattcgtgaagaagggactcaaatttcggtaccaggaccacacatttttaaagatgctcctcaccgccgtacagctcctgtacagcccagaaagctccgtgcgcacgaagctcatccagctcccggtggtctacgtgatgctcatgcagcactcgctgtttctgccgactctactgacgtctgacggagaggagagcccggacagccaagtaaaagaagcgctggtggacctgatgctgacggtggtggagatgtgcccctctgtctgtgagagcagccactttgcagtgcttctcggggcctatggcgccactctcagcgtcctagatcagaagattttacttctgcttcgagcgtatgagcagaacaagctcagcctcatcaacttcagggtgctgctgtggggcccagcggccgtggagcatcacaagacgtgccggagcctgggcaggtcactgtggcagcagccgagtgtcggggacatccttcgcctgctggaccgggaccggatgatgcagaccatcctgcacttcccccagaaccggaggctgctgccccccgaggacacacaggagctgatattcaaagacaaaagcagggtggatcttgatggcctctatgacccctgctttctccttcagctcttcagtgagctgaccaggccagagtttgtggtggattgtcgaaaatttttggattcaaatgctctgggcctaactgtcacagccctcagcagctatgacccccagatgcgagccatagcctaccatgtcctggcggcctactactcgcacttggagggcgcacggttccaagagcagtcccagctactttacctgttggatgtagtccggaatgggattcgaactcaggacatgagacttacttttaccttggctctcttcattgccaaagcagccctgcagattttgaaaccagaggagcacatgtacctgaaggtcagcaacttcctgctgtcgcatgagtacttgaacatggacaaagtgccaggcttctaccagttcttctacagctccgactttgagcaaaaaacagagcagaagtgggtgtttggccttctgcggcaggggatccgtgacaagcagtgctacgaactgtgtgcccggcgtggcatcttccacatcatcctgtccttcttccacagcccgctgtgtgacgaggcagcacagaattggattctggaaattctacagaatgctgcccaggttgccagatctgcgtatgaaatcatacgagactatagccttttaacatggattttacacatccttgaaagcaagtttctggagactccgctgctgtctaatgtgatctccttgctacacacactgtgggtgaccaacctgggggacaaggcagtggagtgggagagccagcgcctttgccagcctagctcccaggagcctgccaagcggcttgccctgcacctggtcaatgagttcctttatgttctcatcgtgctcatgaagcacctgaggcccaccttggcccccgtccagctgaccaacttcttcgggacacttgactccgtgctgaggtaccgggccactgtcatacaggcctttagggacatgaacagattcaccgtaaatgagacagtgctttccaccaaggacgtccttgtcctcttgcacaagtggagcctcattgaaagagacctcaagctccaggaagacctgagagcagccattgagaaggcccaagcccgggagctcatgaaaatgctcaaggataagaacaagcctgtcatgccagcccgagccaaaggcccacggggccgaaagaggaggcctggggaggcagaggagatggctgaccctgagctgatggcatctaccttggagacatgcaagggcctcctgaggtccatcttgacttactggagaccagtgatccctggtcctgaccccactcaggagcctgtggactcagccagccccgagagcgatgcgccaggccccgtatatgctgccgcttccctggcagtcagttgggtgctgcggtcggtggccgagcacccgctcagcagggcagaggctgcaggactcattggctggcttaagagccatattttgccacaccctgtggtcgtggctgacctccttaaggacagtgccgtgaggagcagcatattcaggctgtatagccggctctgtggggctgaggggctggcagggcctgtgcaggaggtggcctgcctgttcaatacggtcatgctgcagctggtggctgcccagggccgggcagggagccccttccacccggccatggaagccctctccctgtcttctctgagtgagaaggatgaagccacacaagcctccgcagcattcctagtgtctctctacataaaggacatctggctgggggctcagcggccggacaccctcttaacccacgtccggatggtgtgtgaggccgcagatgatgccccgagcagtgaagaggaggccatcgtggtgctctgcaaggacgccgccagcgcagcctcagatgcttgactcctgccggccagcaccttgcaccctgatgaccagagcctcgagcacagcaccagcttctagaagtttggttgagtcaagggtttccagagaaggcatgggaaacaacaggttcagtacattggctcagttctttgacaagaaaagttgagaggactttattgaactgcccagtaaatgataaactcgggcctgtaggtgcccagcatcagagttgcaaggaatgtggggacttctaggccatgaggcccatccagtgcctcgtcaggccgccccttcctctctaggggcttggagctcatcacaggaaatagctcgagtttgaggcagcacttctgaatgcagaagagattcatctgtgttaaagctgaaatgtcaaaaggtatcagattttttttatgaaaacgaagagagatgtttaaagtttatttttcagcaggtgaggtggctcacgcctataatcccagcactttgggaggccaaggcgggtgaatcacctgaggtcaggagttcgaaaccagccttcccaacatggtgaaaccccatctctactaaaaatacaaaaattagccaggcatggtagcgcacacctgtaattccagctactcgggaggctaaggcaggggaatcgcttgaacctgggaggtggaggctacagtgagctgagatcgtgccattgcgctccagcctaggtgacagagcaagactccatctcaaaaaaataaaaaaataaagtttgtttttctataaaaagtcataacaaagtattagtatgactttttgaataagttaatttctgccagtgtttaattattttattaaagaaaaggatgttacactgaatccttaaagaataaaagtgatttgacctctgctttgagaagacagcctgtaatttttaaagctatacttcaaagaggggattttgaattttataaatgcttgttaatgtctatttttgtaaggtttttgtgttttcctttcattgttgttaagaggctatttttgctccacataggcctgcatttattttaaaggtcagaattttactcttaatggtcatatattagttggggttgtagctgacaaaagtcatgaaatttcgtggttttcacagttaaaatttccgtctgttcctttaaaactctcctgcatgcctggggctcttgggatctgctctgtggcctaggatgtggctgttttatctgccgtataatgtacatcgtgctgacaatgccttggttttgtctgaaacatttacacttctattttccaccagtgttctttagaattgtttctgttttaggtgacttaaagttttaactaaagcatgagtaacgtttgttggcatacagtcccttcaccacaaataattgtcttgcactgtctacaaagcaaggatcagttacctcacttgtccccttccctacccaaataaaccttacaacgctattctttgagactatcctgaacttgaaatcccacgtttagatccaagctggactcaggcaagcgctgctccaacaaagcgttctcttcctggttccccttaatctttatccacctctccaaggcctatctttggggattcctttggttataggcacctctgcttgtttatgcagggggcattggccggaaggacattggtctggggaatatccctgaaccccatgcctctgggggcacagggaggggcagcgagcaggtggggtggatttccacggcttcatccctggctccaggcctaagctgcctcccaggttcttagggcccagcaagtcaatacatactacgtcaggtggcgacaaatgctccaaagccgagttccagctcagtcaagtgaggacacattttcagcacctcaccttcttttctgcatctctggagctcatcagtcttgcttttctttgttctcccttttaaatccactgccctgaccttgttcatgtattttccagtcacttagtgtggaggaagggaatctcatcccatggagaatagatcgaacatggtcttcacctgacttaaaatataaaatgctaaattagaaatatcttaagtggggcggggggcacagttattttaaaaataaaacctatcaactccctccttgcctgaaagctgtaggggacatatgggtcttctgagatttgctgtgtgatgctgtctcctctccagggacaaggctgctgggcactagaggactagatctttcaagggtcccagatccactgtcacataaagtcacatccagaagacctttcctgccagcttccagggctctttgtgttctgtgacagcatttgggcatagatcctgcttacccggcctggctgctgacaggcgttggctgcctgccctccaggggagacactttcttgggctctgtctttgaaaggctgtggggaggttgaaggtgcaactcaggtccccagactgcagtgagctgacctggcagggcagatgccatcacatctgggggagccggcgggtgttagtggagcttggatgggaacttacccagcatcctaacaaaggtacagaaggaccaggtgaactcagggctgataacgcattacacagtaatggtaaagtggcatagtaaagattagtaagcaaacagcttttcctcttgatttgcatatattttattttcctactcttccctgagcaaatataagcagtaagcaagcaggctaggtgtgctcaataaactcagcaacacctgggatgacctctgcactcgaggggccactgcaatctttgtcaaaggcataggatgctcctgctctagttgcacttgacctaggtgccctttctgctacatgcaaatggcctctaagaagaacgaggaacgtatgtgtccaggttggcttgatttcaccagttcactcagctatggccacgatttactgacatcagctctgcaattgagaggtcctgtctccagggggaggctcgctgggcttgctcctgacgaggggacccccattgagggtcagttcccagaggagagtggggtgggtctggaaacccccgaggggcaaggtggaggagctctcctgtcgtagcggctggtcagggccagttctgctccctggctccactgagctcgcctgagcctgtgaggttgccaggggttccctgtggcacggcaggcacttctggatgcagaggtggaggttgaggccgtgactccaggggcatgtttggtggtgcttggggctgttcctgtgaacagagcagagtgggaggcaggcatcatagttgctgcagaacagtccatactgtggggctggggggtttcctgccacacctgccatctgcccggaccccatagggaaggccacacaggcaaattcctgagaagggtcagccagctcacaaaggtggccattctagagaaatctcagaggagaggaagtgctttgtcaggaactaggcctcaggtctttccctggaggccacttcttcctacattgatttaggatggggggggtggggggtggaggggagcaggttgacctcccatccagcgctgtatctgagtgtagttcattttatatccatagcccaagccaacttgtatcttggtgatatggtttggctgcgtcacgacacaaatctcaccttgaattgtaataatccccacgtgtcgtgggaaggacccagtgggaggtaattgaatcatgggggcgggtcttcccatgctgttctcgtgatagtaagtctcatgagatctgatggttttataaaggggagtttccctgcacatgcccttttgcctgtgtcatgtaagatgtggctttgctcttcctttgccttctgccatgactgtgaagcctcccccgccatgtgaaactgtgagtccattaaacctctttcctttataaatta

SEQ ID NO: 303474 - DNA, 6795 bp, Homo sapiens
ggtcagactgtaataaactgctattaataagtcgaagacagccattagccacatcactggtatgggtagtagaaaaactaaaagggctccaccattcaattcaggcaagagtagacagagtagaggctttggtagcacagtcatggggaaaacatgcctggattgaaaatctgtattggcttaacatttgggagggggaatgcgcagggactgaattcagccttgtcaaaggcctaggaagaaaggtgactgtggagatgtcttaattgaaaaacacgtggggggctgggcgcggtggctcatgcctctgatcccagcactttgggatgccaaggaggattgcttgagctaaggagttcagcctgggcaacatagcacgacctcatctcaaaaaaaaagaaaaaaagaaaataaaataataataacaaaaaaataagcggggaagggattagatggcagtccaaacaccagtattattcagaggaggagatttccagcatttcaatgttgcctggaaggctctctcctcttctggtattcagtgtgtctgccccaccatgccatgtgtttcagggttgttttcttgcagaagcgctggtggacctgatgctgacggtggtggagatgtgcccctctgtctgtgagagcagccactttgcagtgcttctcggggcctatggcgccactctcagcgtcctagatcagaagattttacttctgcttcgagcgtatgagcagaacaagctcagcctcatcaacttcagggtgctgctgtggggcccagcggccgtggagcatcacaagacgtgccggagcctgggcaggtcactgtggcagcagccgagtgtcggggacatccttcgcctgctggaccgggaccggatgatgcagaccatcctgcacttcccccagaaccggaggctgctgccccccgaggacacacaggagctgatattcaaagacaaaagcagggtggatcttgatggcctctatgacccctgctttctccttcagctcttcagtgagctgaccaggccagagtttgtggtggattgtcgaaaatttttggattcaaatgctctgggcctaactgtcacagccctcagcagctatgacccccagatgcgagccatagcctaccatgtcctggcggcctactactcgcacttggagggcgcacggttccaagagcagtcccagctactttacctgttggatgtagtccggaatgggattcgaactcaggacatgagacttacttttaccttggctctcttcattgccaaagcagccctgcagattttgaaaccagaggagcacatgtacctgaaggtcagcaacttcctgctgtcgcatgagtacttgaacatggacaaagtgccaggcttctaccagttcttctacagctccgactttgagcaaaaaacagagcagaagtgggtgtttggccttctgcggcaggggatccgtgacaagcagtgctacgaactgtgtgcccggcgtggcatcttccacatcatcctgtccttcttccacagcccgctgtgtgacgaggcagcacagaattggattctggaaattctacagaatgctgcccaggttgccagatctgcgtatgaaatcatacgagactatagccttttaacatggattttacacatccttgaaagcaagtttctggagactccgctgctgtctaatgtgatctccttgctacacacactgtgggtgaccaacctgggggacaaggcagtggagtgggagagccagcgcctttgccagcctagctcccaggagcctgccaagcggcttgccctgcacctggtcaatgagttcctttatgttctcatcgtgctcatgaagcacctgaggcccaccttggcccccgtccagctgaccaacttcttcgggacacttgactccgtgctgaggtaccgggccactgtcatacaggcctttagggacatgaacagattcaccgtaaatgagacagtgctttccaccaaggacgtccttgtcctcttgcacaagtggagcctcattgaaagagacctcaagctccaggaagacctgagagcagccattgagaaggcccaagcccgggagctcatgaaaatgctcaaggataagaacaagcctgtcatgccagcccgagccaaaggcccacggggccgaaagaggaggcctggggaggcagaggagatggctgaccctgagctgatggcatctaccttggagacatgcaagggcctcctgaggtccatcttgacttactggagaccagtgatccctggtcctgaccccactcaggagcctgtggactcagccagccccgagagcgatgcgccaggccccgtatatgctgccgcttccctggcagtcagttgggtgctgcggtcggtggccgagcacccgctcagcagggcagaggctgcaggactcattggctggcttaagagccatattttgccacaccctgtggtcgtggctgacctccttaaggacagtgccgtgaggagcagcatattcaggctgtatagccggctctgtggggctgaggggctggcagggcctgtgcaggaggtggcctgcctgttcaatacggtcatgctgcagctggtggctgcccagggccgggcagggagccccttccacccggccatggaagccctctccctgtcttctctgagtgagaaggatgaagccacacaagcctccgcagcattcctagtgtctctctacataaaggacatctggctgggggctcagcggccggacaccctcttaacccacgtccggatggtgtgtgaggccgcagatgatgccccgagcagtgaagaggaggccatcgtggtgctctgcaaggacgccgccagcgcagcctcagatgcttgactcctgccggccagcaccttgcaccctgatgaccagagcctcgagcacagcaccagcttctagaagtttggttgagtcaagggtttccagagaaggcatgggaaacaacaggttcagtacattggctcagttctttgacaagaaaagttgagaggactttattgaactgcccagtaaatgataaactcgggcctgtaggtgcccagcatcagagttgcaaggaatgtggggacttctaggccatgaggcccatccagtgcctcgtcaggccgccccttcctctctaggggcttggagctcatcacaggaaatagctcgagtttgaggcagcacttctgaatgcagaagagattcatctgtgttaaagctgaaatgtcaaaaggtatcagattttttttatgaaaacgaagagagatgtttaaagtttatttttcagcaggtgaggtggctcacgcctataatcccagcactttgggaggccaaggcgggtgaatcacctgaggtcaggagttcgaaaccagccttcccaacatggtgaaaccccatctctactaaaaatacaaaaattagccaggcatggtagcgcacacctgtaattccagctactcgggaggctaaggcaggggaatcgcttgaacctgggaggtggaggctacagtgagctgagatcgtgccattgcgctccagcctaggtgacagagcaagactccatctcaaaaaaataaaaaaataaagtttgtttttctataaaaagtcataacaaagtattagtatgactttttgaataagttaatttctgccagtgtttaattattttattaaagaaaaggatgttacactgaatccttaaagaataaaagtgatttgacctctgctttgagaagacagcctgtaatttttaaagctatacttcaaagaggggattttgaattttataaatgcttgttaatgtctatttttgtaaggtttttgtgttttcctttcattgttgttaagaggctatttttgctccacataggcctgcatttattttaaaggtcagaattttactcttaatggtcatatattagttggggttgtagctgacaaaagtcatgaaatttcgtggttttcacagttaaaatttccgtctgttcctttaaaactctcctgcatgcctggggctcttgggatctgctctgtggcctaggatgtggctgttttatctgccgtataatgtacatcgtgctgacaatgccttggttttgtctgaaacatttacacttctattttccaccagtgttctttagaattgtttctgttttaggtgacttaaagttttaactaaagcatgagtaacgtttgttggcatacagtcccttcaccacaaataattgtcttgcactgtctacaaagcaaggatcagttacctcacttgtccccttccctacccaaataaaccttacaacgctattctttgagactatcctgaacttgaaatcccacgtttagatccaagctggactcaggcaagcgctgctccaacaaagcgttctcttcctggttccccttaatctttatccacctctccaaggcctatctttggggattcctttggttataggcacctctgcttgtttatgcagggggcattggccggaaggacattggtctggggaatatccctgaaccccatgcctctgggggcacagggaggggcagcgagcaggtggggtggatttccacggcttcatccctggctccaggcctaagctgcctcccaggttcttagggcccagcaagtcaatacatactacgtcaggtggcgacaaatgctccaaagccgagttccagctcagtcaagtgaggacacattttcagcacctcaccttcttttctgcatctctggagctcatcagtcttgcttttctttgttctcccttttaaatccactgccctgaccttgttcatgtattttccagtcacttagtgtggaggaagggaatctcatcccatggagaatagatcgaacatggtcttcacctgacttaaaatataaaatgctaaattagaaatatcttaagtggggcggggggcacagttattttaaaaataaaacctatcaactccctccttgcctgaaagctgtaggggacatatgggtcttctgagatttgctgtgtgatgctgtctcctctccagggacaaggctgctgggcactagaggactagatctttcaagggtcccagatccactgtcacataaagtcacatccagaagacctttcctgccagcttccagggctctttgtgttctgtgacagcatttgggcatagatcctgcttacccggcctggctgctgacaggcgttggctgcctgccctccaggggagacactttcttgggctctgtctttgaaaggctgtggggaggttgaaggtgcaactcaggtccccagactgcagtgagctgacctggcagggcagatgccatcacatctgggggagccggcgggtgttagtggagcttggatgggaacttacccagcatcctaacaaaggtacagaaggaccaggtgaactcagggctgataacgcattacacagtaatggtaaagtggcatagtaaagattagtaagcaaacagcttttcctcttgatttgcatatattttattttcctactcttccctgagcaaatataagcagtaagcaagcaggctaggtgtgctcaataaactcagcaacacctgggatgacctctgcactcgaggggccactgcaatctttgtcaaaggcataggatgctcctgctctagttgcacttgacctaggtgccctttctgctacatgcaaatggcctctaagaagaacgaggaacgtatgtgtccaggttggcttgatttcaccagttcactcagctatggccacgatttactgacatcagctctgcaattgagaggtcctgtctccagggggaggctcgctgggcttgctcctgacgaggggacccccattgagggtcagttcccagaggagagtggggtgggtctggaaacccccgaggggcaaggtggaggagctctcctgtcgtagcggctggtcagggccagttctgctccctggctccactgagctcgcctgagcctgtgaggttgccaggggttccctgtggcacggcaggcacttctggatgcagaggtggaggttgaggccgtgactccaggggcatgtttggtggtgcttggggctgttcctgtgaacagagcagagtgggaggcaggcatcatagttgctgcagaacagtccatactgtggggctggggggtttcctgccacacctgccatctgcccggaccccatagggaaggccacacaggcaaattcctgagaagggtcagccagctcacaaaggtggccattctagagaaatctcagaggagaggaagtgctttgtcaggaactaggcctcaggtctttccctggaggccacttcttcctacattgatttaggatggggggggtggggggtggaggggagcaggttgacctcccatccagcgctgtatctgagtgtagttcattttatatccatagcccaagccaacttgtatcttggtgatatggtttggctgcgtcacgacacaaatctcaccttgaattgtaataatccccacgtgtcgtgggaaggacccagtgggaggtaattgaatcatgggggcgggtcttcccatgctgttctcgtgatagtaagtctcatgagatctgatggttttataaaggggagtttccctgcacatgcccttttgcctgtgtcatgtaagatgtggctttgctcttcctttgccttctgccatgactgtgaagcctcccccgccatgtgaaactgtgagtccattaaacctctttcctttataaatta

SEQ ID NO: 303475 - DNA, 10593 bp, Homo sapiens
cgcgcccgcaaagaagagctcacgggcgtgcggttcaaggctcagctgaaggacccgcagggccccgggccaggcttggaagcgtttgtgtctgctgccaagaagctaccacgagaagatgtgtatgatgttgtggaagggtatataaagatttctgttgagtgtgtcgaaattttccagctcctaagtggagagaaacgacctgaaagtgaaacgatgttaatatttcaagttttcgaggccatattattgcggacagcaagtgatctttcacatttccatgttgtgggaaccaacattgtgaaaaagctgatgaacaaccacatgaagctcatctgtgagtccctgtatgcctcaggttacaggttggctcgcgcctgcctgagcctgatgaccgccatggtgacccagggtccggaagctgccagggacgtctgcagccattttgatttgaataaaaagaccctgtacaccctggtgaccaagagggattcaaagggagtgtacgacgttcggcaggcctacgttcagtttgctctctcctttttaattgcgggtgatgacagcactatagtgcaggtgttggaagtgaaagaatttattccttgcatttttagctcagggataaaggaagataggatctctaccatcaatattttattatccacactgaaaacaaaggtagttcacaataaaaatatcacaaaaacccagaaggtgcgtttctttacggggcagttattgaaccacatagcatcgctgtacaactggaatgggattaccgatgtgaacccagaaaatgtcaaggtttctgccgaagaagcagggaaaaccatggtgcgggagcttgttcataacttcctgatggatctttgctgttcactcaagcatggaattaatttttacgatgcatctttgggtacctttggcagaggcggaaacctgacactcttgcacttcttgctgggtttgaaaactgcagctgatgatgatctggtggctgaccttgtggtaaacatcctcaaagtgtgcccggacttactgaacaaatacttcaaggaagtaacgttttcctttatcccacgagcgaagtctacttggttaaataatatcaaactactaaacaagatctatgaggctcagccggagatttcccgggcatttcagaccagagagtttatacccttgcctcggctcctggcaatggtgatggtgaccaccgtgcccctggtgtgcaataagagcatgttcacccaagcattaaacttggacagcacctcagtgaggcacacagccttatcccttatttctgtcattttgaagagggcattaaaaactgttgaccactgcctgaataaagaggtgtggcaggaatcaggcgtgtacacagctgtgatgatggaagaattcgtgcagctcttcagagaagccctgagcaagattttgccagacctgaacactgtcgtgtgggtctggcagtcacttaaaaagcaagagaccaaacaggatgacaagaaagggcagaaaaggagcgatgggcccccggctgcctgcgatgctcaccagtgcgatgatgcagaaaccattcttttgaaagctgttttgctccaggtcatatgcctctaccagaaggtggtcccccacgtggtcatgcagtacaactttgacttcagcaagctcctgaaaggtgtcatctctgagcagggccttcgagaggaggtgcctcccattctgcagcaccacatgctgaaggtggccctggagctgccggccagcaagtttctgtggttaaaggcacaggaaggcccagatgcagaaattattggaggtgaacgatcagtattttacttactaatgaaaatgtttgtgaccagtagccatttacaactgaagtcattgaccaaacttctgatcatgaagattctgcgggacacgggggtgtttgagcacacctggaaggagctggagctctggctggagcatttagagaacaccatggaagaggacaaagagactgtgattcagtttctggaacgcattttattgacattggtggcgaatccctattcatacacagacaaagcatctgactttgtccaagaagcaagcatgctgcaggccactatgacgaagcaagaagccgatgacatgagcattcccatctcccacattgacgatgttctcgacatggtggatgtcctggtggagggcagtgaaggcttggatgaggaaatagggttcacgttgagtgaagacatgatcctgctcacgttcccattcagtgcggtagtccctgcggccctggaagccaggaataagttgctccttgggacaggcaatgaagcagcggaaaacgttgtgacatatctgacggcagtgctgactgacctcctccacacccagagggaccccctggctctgtgtctcctgctccaggcatatgataagcttgagcctccatgcctggtgccttgctgccagcagctctcacggtttaacagatactacagcctctggatcccggagcaagcccgagaggcctggctgctgcaggcacagggcagcccctcgccccctgcccttcccttggcctcgtccttcacagccctgctgcaggcagcctacgagagccaagcgcttcgggacgagcacatccaggtgcagctgcaggccaccatgccacacctgtccatgcagcaggtcctgctcgcggccaagcaggtgttgctctacctgcggagcactgtggagaacttcggccagctgggcagaagtgtgggcccgcccctcctgcagctcttcctggatctcctcaggcgcctggttgtccactgtgagcagctggatgcccagaaccagcagagatgcgaggccgcccgggccgaagccgacctcttcctggacatggagtccgtggcctcgctggagttggccaatgatcagacgctggaggaggtgcttgtggccatcctcaggcaccccaccctggagggctggttcctggccctggagcagcaggccctcccgccgcacacgctcagccctgtcctcgtgaagctcctggccacccactttagtgcaggggtccttcagctgctggcagcaagtgccccgatcctccagaacattgggcagctgggccttctggccaggtactcagaggccatcacccagagtgtgctgaaggaacttcagaacaggagggcgggcccggccacatcaccaccaaagaccccgccgcagctggaggccctgcaggagctgcatccatacatggagggtgcccagctccgtgaggtcaccctggccttgctgagcctgcctgagacacacctggtgacccagcaacccacgaaatcccccgggaaggaaagacacctgaatgctcttggaaagaccctggtgcagctgctgacctgcagcccccaggatcagctgcagagtggtgagctcctgtggtcctccgagtatgtgagaggcctgggggctctgctgcccacgctagcagtggacgagctggacacagtgctcctccacactctgcagagagaccctgtgctggcccccgcagtcggggctgatctgcttgactactgcctggcccggcgcacacaggcggccctcagcatcgctgccctgctcctccaggagagctgcacccacttgctgtggttcgagcagtggtgcctgcaggctggcccagggctcggcctccagggggacctggacgacttccttcccctcatccatgtgtacctccagtgcaggacacggagccacttcacacgcccagcaggagtgtcttccgctgtcattcctgtcttgaggaagaccctgtggaggcagctacagagcaggcttcttagcactgacagtcccccagcatctgggctgtaccaggagatcctggcacagctggtcccgtttgcacgagccaaggatctcagtgtactcatggaccgcctgcccagcttgcttcacaccccaagcagtcacaagaggtggatcgtggccgactccatttcagcagctctggaagggtcagcagaagagctgtgtgcctggagaaggacccttttggagtcctgtgtgaagtggctgatcgtgtctttcagtggtggacagcaagatgatgataatactcagaatcaggagaaggaaatgctgcttagattaaatgcgttgttgcatgcacttaatgaagttgatcctggtgactggcagaaattcgtgaagaagggactcaaatttcggtaccaggaccacacatttttaaagatgctcctcaccgccgtacagctcctgtacagcccagaaagctccgtgcgcacgaagctcatccagctcccggtggtctacgtgatgctcatgcagcactcgctgtttctgccgactctactgacgtctgacggagaggagagcccggacagccaagtaaaagaagcgctggtggacctgatgctgacggtggtggagatgtgcccctctgtctgtgagagcagccactttgcagtgcttctcggggcctatggcgccactctcagcgtcctagatcagaagattttacttctgcttcgagcgtatgagcagaacaagctcagcctcatcaacttcagggtgctgctgtggggcccagcggccgtggagcatcacaagacgtgccggagcctgggcaggtcactgtggcagcagccgagtgtcggggacatccttcgcctgctggaccgggaccggatgatgcagaccatcctgcacttcccccagaaccggaggctgctgccccccgaggacacacaggagctgatattcaaagacaaaagcagggtggatcttgatggcctctatgacccctgctttctccttcagctcttcagtgagctgaccaggccagagtttgtggtggattgtcgaaaatttttggattcaaatgctctgggcctaactgtcacagccctcagcagctatgacccccagatgcgagccatagcctaccatgtcctggcggcctactactcgcacttggagggcgcacggttccaagagcagtcccagctactttacctgttggatgtagtccggaatgggattcgaactcaggacatgagacttacttttaccttggctctcttcattgccaaagcagccctgcagattttgaaaccagaggagcacatgtacctgaaggtcagcaacttcctgctgtcgcatgagtacttgaacatggacaaagtgccaggcttctaccagttcttctacagctccgactttgagcaaaaaacagagcagaagtgggtgtttggccttctgcggcaggggatccgtgacaagcagtgctacgaactgtgtgcccggcgtggcatcttccacatcatcctgtccttcttccacagcccgctgtgtgacgaggcagcacagaattggattctggaaattctacagaatgctgcccaggttgccagatctgcgtatgaaatcatacgagactatagccttttaacatggattttacacatccttgaaagcaagtttctggagactccgctgctgtctaatgtgatctccttgctacacacactgtgggtgaccaacctgggggacaaggcagtggagtgggagagccagcgcctttgccagcctagctcccaggagcctgccaagcggcttgccctgcacctggtcaatgagttcctttatgttctcatcgtgctcatgaagcacctgaggcccaccttggcccccgtccagctgaccaacttcttcgggacacttgactccgtgctgaggtaccgggccactgtcatacaggcctttagggacatgaacagattcaccgtaaatgagacagtgctttccaccaaggacgtccttgtcctcttgcacaagtggagcctcattgaaagagacctcaagctccaggaagacctgagagcagccattgagaaggcccaagcccgggagctcatgaggggccgaaagaggaggcctggggaggcagaggagatggctgaccctgagctgatggcatctaccttggagacatgcaagggcctcctgaggtccatcttgacttactggagaccagtgatccctggtcctgaccccactcaggagcctgtggactcagccagccccgagagcgatgcgccaggccccgtatatgctgccgcttccctggcagtcagttgggtgctgcggtcggtggccgagcacccgctcagcagggcagaggctgcaggactcattggctggcttaagagccatattttgccacaccctgtggtcgtggctgacctccttaaggacagtgccgtgaggagcagcatattcaggctgtatagccggctctgtggggctgaggggctggcagggcctgtgcaggaggtggcctgcctgttcaatacggtcatgctgcagctggtggctgcccagggccgggcagggagccccttccacccggccatggaagccctctccctgtcttctctgagtgagaaggatgaagccacacaagcctccgcagcattcctagtgtctctctacataaaggacatctggctgggggctcagcggccggacaccctcttaacccacgtccggatggtgtgtgaggccgcagatgatgccccgagcagtgaagaggaggccatcgtggtgctctgcaaggacgccgccagcgcagcctcagatgcttgactcctgccggccagcaccttgcaccctgatgaccagagcctcgagcacagcaccagcttctagaagtttggttgagtcaagggtttccagagaaggcatgggaaacaacaggttcagtacattggctcagttctttgacaagaaaagttgagaggactttattgaactgcccagtaaatgataaactcgggcctgtaggtgcccagcatcagagttgcaaggaatgtggggacttctaggccatgaggcccatccagtgcctcgtcaggccgccccttcctctctaggggcttggagctcatcacaggaaatagctcgagtttgaggcagcacttctgaatgcagaagagattcatctgtgttaaagctgaaatgtcaaaaggtatcagattttttttatgaaaacgaagagagatgtttaaagtttatttttcagcaggtgaggtggctcacgcctataatcccagcactttgggaggccaaggcgggtgaatcacctgaggtcaggagttcgaaaccagccttcccaacatggtgaaaccccatctctactaaaaatacaaaaattagccaggcatggtagcgcacacctgtaattccagctactcgggaggctaaggcaggggaatcgcttgaacctgggaggtggaggctacagtgagctgagatcgtgccattgcgctccagcctaggtgacagagcaagactccatctcaaaaaaataaaaaaataaagtttgtttttctataaaaagtcataacaaagtattagtatgactttttgaataagttaatttctgccagtgtttaattattttattaaagaaaaggatgttacactgaatccttaaagaataaaagtgatttgacctctgctttgagaagacagcctgtaatttttaaagctatacttcaaagaggggattttgaattttataaatgcttgttaatgtctatttttgtaaggtttttgtgttttcctttcattgttgttaagaggctatttttgctccacataggcctgcatttattttaaaggtcagaattttactcttaatggtcatatattagttggggttgtagctgacaaaagtcatgaaatttcgtggttttcacagttaaaatttccgtctgttcctttaaaactctcctgcatgcctggggctcttgggatctgctctgtggcctaggatgtggctgttttatctgccgtataatgtacatcgtgctgacaatgccttggttttgtctgaaacatttacacttctattttccaccagtgttctttagaattgtttctgttttaggtgacttaaagttttaactaaagcatgagtaacgtttgttggcatacagtcccttcaccacaaataattgtcttgcactgtctacaaagcaaggatcagttacctcacttgtccccttccctacccaaataaaccttacaacgctattctttgagactatcctgaacttgaaatcccacgtttagatccaagctggactcaggcaagcgctgctccaacaaagcgttctcttcctggttccccttaatctttatccacctctccaaggcctatctttggggattcctttggttataggcacctctgcttgtttatgcagggggcattggccggaaggacattggtctggggaatatccctgaaccccatgcctctgggggcacagggaggggcagcgagcaggtggggtggatttccacggcttcatccctggctccaggcctaagctgcctcccaggttcttagggcccagcaagtcaatacatactacgtcaggtggcgacaaatgctccaaagccgagttccagctcagtcaagtgaggacacattttcagcacctcaccttcttttctgcatctctggagctcatcagtcttgcttttctttgttctcccttttaaatccactgccctgaccttgttcatgtattttccagtcacttagtgtggaggaagggaatctcatcccatggagaatagatcgaacatggtcttcacctgacttaaaatataaaatgctaaattagaaatatcttaagtggggcggggggcacagttattttaaaaataaaacctatcaactccctccttgcctgaaagctgtaggggacatatgggtcttctgagatttgctgtgtgatgctgtctcctctccagggacaaggctgctgggcactagaggactagatctttcaagggtcccagatccactgtcacataaagtcacatccagaagacctttcctgccagcttccagggctctttgtgttctgtgacagcatttgggcatagatcctgcttacccggcctggctgctgacaggcgttggctgcctgccctccaggggagacactttcttgggctctgtctttgaaaggctgtggggaggttgaaggtgcaactcaggtccccagactgcagtgagctgacctggcagggcagatgccatcacatctgggggagccggcgggtgttagtggagcttggatgggaacttacccagcatcctaacaaaggtacagaaggaccaggtgaactcagggctgataacgcattacacagtaatggtaaagtggcatagtaaagattagtaagcaaacagcttttcctcttgatttgcatatattttattttcctactcttccctgagcaaatataagcagtaagcaagcaggctaggtgtgctcaataaactcagcaacacctgggatgacctctgcactcgaggggccactgcaatctttgtcaaaggcataggatgctcctgctctagttgcacttgacctaggtgccctttctgctacatgcaaatggcctctaagaagaacgaggaacgtatgtgtccaggttggcttgatttcaccagttcactcagctatggccacgatttactgacatcagctctgcaattgagaggtcctgtctccagggggaggctcgctgggcttgctcctgacgaggggacccccattgagggtcagttcccagaggagagtggggtgggtctggaaacccccgaggggcaaggtggaggagctctcctgtcgtagcggctggtcagggccagttctgctccctggctccactgagctcgcctgagcctgtgaggttgccaggggttccctgtggcacggcaggcacttctggatgcagaggtggaggttgaggccgtgactccaggggcatgtttggtggtgcttggggctgttcctgtgaacagagcagagtgggaggcaggcatcatagttgctgcagaacagtccatactgtggggctggggggtttcctgccacacctgccatctgcccggaccccatagggaaggccacacaggcaaattcctgagaagggtcagccagctcacaaaggtggccattctagagaaatctcagaggagaggaagtgctttgtcaggaactaggcctcaggtctttccctggaggccacttcttcctacattgatttaggatggggggggtggggggtggaggggagcaggttgacctcccatccagcgctgtatctgagtgtagttcattttatatccatagcccaagccaacttgtatcttggtgatatggtttggctgcgtcacgacacaaatctcaccttgaattgtaataatccccacgtgtcgtgggaaggacccagtgggaggtaattgaatcatgggggcgggtcttcccatgctgttctcgtgatagtaagtctcatgagatctgatggttttataaaggggagtttccctgcacatgcccttttgcctgtgtcatgtaagatgtggctttgctcttcctttgccttctgccatgactgtgaagcctcccccgccatgtgaaactgtgagtccattaaacctctttcctttataaatta

SEQ ID NO: 303476 - DNA, 4204 bp, Homo sapiens
gcccaggcctgtggcacggttcatttgggcacttggcaaagccgttgcattgtgggcaggatgacctgttttcgagctgagcaggtgtgcatcctaatggcctatcccctgctcttgttcagcctccgcagcattcctagtgtctctctacataaaggacatctggctgggggctcagcggccggacaccctcttaacccacgtccggatggtgtgtgaggccgcagatgatgccccgagcagtgaagaggaggccatcgtggtgctctgcaaggacgccgccagcgcagcctcagatgcttgactcctgccggccagcaccttgcaccctgatgaccagagcctcgagcacagcaccagcttctagaagtttggttgagtcaagggtttccagagaaggcatgggaaacaacaggttcagtacattggctcagttctttgacaagaaaagttgagaggactttattgaactgcccagtaaatgataaactcgggcctgtaggtgcccagcatcagagttgcaaggaatgtggggacttctaggccatgaggcccatccagtgcctcgtcaggccgccccttcctctctaggggcttggagctcatcacaggaaatagctcgagtttgaggcagcacttctgaatgcagaagagattcatctgtgttaaagctgaaatgtcaaaaggtatcagattttttttatgaaaacgaagagagatgtttaaagtttatttttcagcaggtgaggtggctcacgcctataatcccagcactttgggaggccaaggcgggtgaatcacctgaggtcaggagttcgaaaccagccttcccaacatggtgaaaccccatctctactaaaaatacaaaaattagccaggcatggtagcgcacacctgtaattccagctactcgggaggctaaggcaggggaatcgcttgaacctgggaggtggaggctacagtgagctgagatcgtgccattgcgctccagcctaggtgacagagcaagactccatctcaaaaaaataaaaaaataaagtttgtttttctataaaaagtcataacaaagtattagtatgactttttgaataagttaatttctgccagtgtttaattattttattaaagaaaaggatgttacactgaatccttaaagaataaaagtgatttgacctctgctttgagaagacagcctgtaatttttaaagctatacttcaaagaggggattttgaattttataaatgcttgttaatgtctatttttgtaaggtttttgtgttttcctttcattgttgttaagaggctatttttgctccacataggcctgcatttattttaaaggtcagaattttactcttaatggtcatatattagttggggttgtagctgacaaaagtcatgaaatttcgtggttttcacagttaaaatttccgtctgttcctttaaaactctcctgcatgcctggggctcttgggatctgctctgtggcctaggatgtggctgttttatctgccgtataatgtacatcgtgctgacaatgccttggttttgtctgaaacatttacacttctattttccaccagtgttctttagaattgtttctgttttaggtgacttaaagttttaactaaagcatgagtaacgtttgttggcatacagtcccttcaccacaaataattgtcttgcactgtctacaaagcaaggatcagttacctcacttgtccccttccctacccaaataaaccttacaacgctattctttgagactatcctgaacttgaaatcccacgtttagatccaagctggactcaggcaagcgctgctccaacaaagcgttctcttcctggttccccttaatctttatccacctctccaaggcctatctttggggattcctttggttataggcacctctgcttgtttatgcagggggcattggccggaaggacattggtctggggaatatccctgaaccccatgcctctgggggcacagggaggggcagcgagcaggtggggtggatttccacggcttcatccctggctccaggcctaagctgcctcccaggttcttagggcccagcaagtcaatacatactacgtcaggtggcgacaaatgctccaaagccgagttccagctcagtcaagtgaggacacattttcagcacctcaccttcttttctgcatctctggagctcatcagtcttgcttttctttgttctcccttttaaatccactgccctgaccttgttcatgtattttccagtcacttagtgtggaggaagggaatctcatcccatggagaatagatcgaacatggtcttcacctgacttaaaatataaaatgctaaattagaaatatcttaagtggggcggggggcacagttattttaaaaataaaacctatcaactccctccttgcctgaaagctgtaggggacatatgggtcttctgagatttgctgtgtgatgctgtctcctctccagggacaaggctgctgggcactagaggactagatctttcaagggtcccagatccactgtcacataaagtcacatccagaagacctttcctgccagcttccagggctctttgtgttctgtgacagcatttgggcatagatcctgcttacccggcctggctgctgacaggcgttggctgcctgccctccaggggagacactttcttgggctctgtctttgaaaggctgtggggaggttgaaggtgcaactcaggtccccagactgcagtgagctgacctggcagggcagatgccatcacatctgggggagccggcgggtgttagtggagcttggatgggaacttacccagcatcctaacaaaggtacagaaggaccaggtgaactcagggctgataacgcattacacagtaatggtaaagtggcatagtaaagattagtaagcaaacagcttttcctcttgatttgcatatattttattttcctactcttccctgagcaaatataagcagtaagcaagcaggctaggtgtgctcaataaactcagcaacacctgggatgacctctgcactcgaggggccactgcaatctttgtcaaaggcataggatgctcctgctctagttgcacttgacctaggtgccctttctgctacatgcaaatggcctctaagaagaacgaggaacgtatgtgtccaggttggcttgatttcaccagttcactcagctatggccacgatttactgacatcagctctgcaattgagaggtcctgtctccagggggaggctcgctgggcttgctcctgacgaggggacccccattgagggtcagttcccagaggagagtggggtgggtctggaaacccccgaggggcaaggtggaggagctctcctgtcgtagcggctggtcagggccagttctgctccctggctccactgagctcgcctgagcctgtgaggttgccaggggttccctgtggcacggcaggcacttctggatgcagaggtggaggttgaggccgtgactccaggggcatgtttggtggtgcttggggctgttcctgtgaacagagcagagtgggaggcaggcatcatagttgctgcagaacagtccatactgtggggctggggggtttcctgccacacctgccatctgcccggaccccatagggaaggccacacaggcaaattcctgagaagggtcagccagctcacaaaggtggccattctagagaaatctcagaggagaggaagtgctttgtcaggaactaggcctcaggtctttccctggaggccacttcttcctacattgatttaggatggggggggtggggggtggaggggagcaggttgacctcccatccagcgctgtatctgagtgtagttcattttatatccatagcccaagccaacttgtatcttggtgatatggtttggctgcgtcacgacacaaatctcaccttgaattgtaataatccccacgtgtcgtgggaaggacccagtgggaggtaattgaatcatgggggcgggtcttcccatgctgttctcgtgatagtaagtctcatgagatctgatggttttataaaggggagtttccctgcacatgcccttttgcctgtgtcatgtaagatgtggctttgctcttcctttgccttctgccatgactgtgaagcctcccccgccatgtgaaactgtgagtccattaaacctctttcctttataaatta

SEQ ID NO: 303477 - DNA, 8780 bp, Homo sapiens
cgcgcccgcaaagaagagctcacgggcgtgcggttcaaggctcagctgaaggacccgcagggccccgggccaggcttggaagcgtttgtgtctgctgccaagaagctaccacgagaagatgtgtatgatgttgtggaagggtatataaagatttctgttgagtgtgtcgaaattttccagctcctaagtggagagaaacgacctgaaagtgaaacgatgttaatatttcaagttttcgaggccatattattgcggacagcaagtgatctttcacatttccatgttgtgggaaccaacattgtgaaaaagctgatgaacaaccacatgaagctcatctgtgagtccctgtatgcctcaggttacaggttggctcgcgcctgcctgagcctgatgaccgccatggtgacccagggtccggaagctgccagggacgtctgcagccattttgatttgaataaaaagaccctgtacaccctggtgaccaagagggattcaaagggagtgtacgacgttcggcaggcctacgttcagtttgctctctcctttttaattgcgggtgatgacagcactatagtgcaggtgttggaagtgaaagaatttattccttgcatttttagctcagggataaaggaagataggatctctaccatcaatattttattatccacactgaaaacaaaggtagttcacaataaaaatatcacaaaaacccagaaggtgcgtttctttacggggcagttattgaaccacatagcatcgctgtacaactggaatgggattaccgatgtgaacccagaaaatgtcaaggtttctgccgaagaagcagggaaaaccatggtgcgggagcttgttcataacttcctgatggatctttgctgttcactcaagcatggaattaatttttacgatgcatctttgggtacctttggcagaggcggaaacctgacactcttgcacttcttgctgggtttgaaaactgcagctgatgatgatctggtggctgaccttgtggtaaacatcctcaaagtgtgcccggacttactgaacaaatacttcaaggaagtaacgttttcctttatcccacgagcgaagtctacttggttaaataatatcaaactactaaacaagatctatgaggctcagccggagatttcccgggcatttcagaccagagagtttatacccttgcctcggctcctggcaatggtgatggtgaccaccgtgcccctggtgtgcaataagagcatgttcacccaagcattaaacttggacagcacctcagtgaggcacacagccttatcccttatttctgtcattttgaagagggcattaaaaactgttgaccactgcctgaataaagaggtgtggcaggaatcaggcgtgtacacagctgtgatgatggaagaattcgtgcagctcttcagagaagccctgagcaagattttgccagacctgaacactgtcgtgtgggtctggcagtcacttaaaaagcaagagaccaaacaggatgacaagaaagggcagaaaaggagcgatgggcccccggctgcctgcgatgctcaccagtgcgatgatgcagaaaccattcttttgaaagctgttttgctccaggtcatatgcctctaccagaaggtggtcccccacgtggtcatgcagtacaactttgacttcagcaagctcctgaaaggtgtcatctctgagcagggccttcgagaggaggtgcctcccattctgcagcaccacatgctgaaggtggccctggagctgccggccagcaagtttctgtggttaaaggcacaggaaggcccagatgcagaaattattggaggtgaacgatcagtattttacttactaatgaaaatgtttgtgaccagtagccatttacaactgaagtcattgaccaaacttctgatcatgaagattctgcgggacacgggggtgtttgagcacacctggaaggagctggagctctggctggagcatttagagaacaccatggaagaggacaaagagactgtgattcagtttctggaacgcattttattgacattggtggcgaatccctattcatacacagacaaagcatctgactttgtccaagaagcaagcatgctgcaggccactatgacgaagcaagaagccgatgacatgagcattcccatctcccacattgacgatgttctcgacatggtggatgtcctggtggagggcagtgaaggcttggatgaggaaatagggttcacgttgagtgaagacatgatcctgctcacgttcccattcagtgcggtagtccctgcggccctggaagccaggaataagttgctccttgggacaggcaatgaagcagcggaaaacgttgtgacatatctgacggcagtgctgactgacctcctccacacccagagggaccccctggctctgtgtctcctgctccaggcatatgataagcttgagcctccatgcctggtgccttgctgccagcagctctcacggtttaacagatactacagcctctggatcccggagcaagcccgagaggcctggctgctgcaggcacagggcagcccctcgccccctgcccttcccttggcctcgtccttcacagccctgctgcaggcagcctacgagagccaagcgcttcgggacgagcacatccaggtgcagctgcaggccaccatgccacacctgtccatgcagcaggtcctgctcgcggccaagcaggtgttgctctacctgcggagcactgtggagaacttcggccagctgggcagaagtgtgggcccgcccctcctgcagctcttcctggatctcctcaggcgcctggttgtccactgtgagcagctggatgcccagaaccagcagagatgcgaggccgcccgggccgaagccgacctcttcctggacatggagtccgtggcctcgctggagttggccaatgatcagacgctggaggaggtgcttgtggccatcctcaggcaccccaccctggagggctggttcctggccctggagcagcaggccctcccgccgcacacgctcagccctgtcctcgtgaagctcctggccacccactttagtgcaggggtccttcagctgctggcagcaagtgccccgatcctccagaacattgggcagctgggccttctggccaggtactcagaggccatcacccagagtgtgctgaaggaacttcagaacaggagggcgggcccggccacatcaccaccaaagaccccgccgcagctggaggccctgcaggagctgcatccatacatggagggtgcccagctccgtgaggtcaccctggccttgctgagcctgcctgagacacacctggtgacccagcaacccacgaaatcccccgggaaggaaagacacctgaatgctcttggaaagaccctggtgcagctgctgacctgcagcccccaggatcagctgcagagtggtgagctcctgtggtcctccgagtatgtgagaggcctgggggctctgctgcccacgctagcagtggacgagctggacacagtgctcctccacactctgcagagagaccctgtgctggcccccgcagtcggggctgatctgcttgactactgcctggcccggcgcacacaggcggccctcagcatcgctgccctgctcctccaggagagctgcacccacttgctgtggttcgagcagtggtgcctgcaggctggcccagggctcggcctccagggggacctggacgacttccttcccctcatccatgtgtacctccagtgcaggacacggagccacttcacacgcccagcaggagtgtcttccgctgtcattcctgtcttgaggaagaccctgtggaggcagctacagagcaggcttcttagcactgacagtcccccagcatctgggctgtaccaggagatcctggcacagctggtcccgtttgcacgagccaaggatctcagtgtactcatggaccgcctgcccagcttgcttcacaccccaagcagtcacaagaggtggatcgtggccgactccatttcagcagctctggaagggtcagcagaagagctgtgtgcctggagaaggacccttttggagtcctgtgtgaagtggctgatcgtgtctttcagtggtggacagcaagatgatgataatactcagaatcaggagaaggaaatgctgcttagattaaatgcgttgttgcatgcacttaatgaagttgatcctggtgactggcagaaattcgtgaagaagggactcaaatttcggtaccaggaccacacatttttaaagatgctcctcaccgccgtacagctcctgtacagcccagaaagctccgtgcgcacgaagctcatccagctcccggtggtctacgtgatgctcatgcagcactcgctgtttctgccgactctactgacgtctgacggagaggagagcccggacagccaagtaaaagaagcgctggtggacctgatgctgacggtggtggagatgtgcccctctgtctgtgagagcagccactttgcagtgcttctcggggcctatggcgccactctcagcgtcctagatcagaagattttacttctgcttcgagcgtatgagcagaacaagctcagcctcatcaacttcagggtgctgctgtggggcccagcggccgtggagcatcacaagacgtgccggagcctgggcaggtcactgtggcagcagccgagtgtcggggacatccttcgcctgctggaccgggaccggatgatgcagaccatcctgcacttcccccagaaccggaggctgctgccccccgaggacacacaggagctgatattcaaagacaaaagcagggtggatcttgatggcctctatgacccctgctttctccttcagctcttcagtgagctgaccaggccagagtttgtggtggattgtcgaaaatttttggattcaaatgctctgggcctaactgtcacagccctcagcagctatgacccccagatgcgagccatagcctaccatgtcctggcggcctactactcgcacttggagggcgcacggttccaagagcagtcccagctactttacctgttggatgtagtccggaatgggattcgaactcaggacatgagacttacttttaccttggctctcttcattgccaaagcagccctgcagattttgaaaccagaggagcacatgtacctgaaggtcagcaacttcctgctgtcgcatgagtacttgaacatggacaaagtgccaggcttctaccagttcttctacagctccgactttgagcaaaaaacagagcagaagtgggtgtttggccttctgcggcaggggatccgtgacaagcagtgctacgaactgtgtgcccggcgtggcatcttccacatcatcctgtccttcttccacagcccgctgtgtgacgaggcagcacagaattggattctggaaattctacagaatgctgcccaggttgccagatctgcgtatgaaatcatacgagactatagccttttaacatggattttacacatccttgaaagcaagtggaggctacagtgagctgagatcgtgccattgcgctccagcctaggtgacagagcaagactccatctcaaaaaaataaaaaaataaagtttgtttttctataaaaagtcataacaaagtattagtatgactttttgaataagttaatttctgccagtgtttaattattttattaaagaaaaggatgttacactgaatccttaaagaataaaagtgatttgacctctgctttgagaagacagcctgtaatttttaaagctatacttcaaagaggggattttgaattttataaatgcttgttaatgtctatttttgtaaggtttttgtgttttcctttcattgttgttaagaggctatttttgctccacataggcctgcatttattttaaaggtcagaattttactcttaatggtcatatattagttggggttgtagctgacaaaagtcatgaaatttcgtggttttcacagttaaaatttccgtctgttcctttaaaactctcctgcatgcctggggctcttgggatctgctctgtggcctaggatgtggctgttttatctgccgtataatgtacatcgtgctgacaatgccttggttttgtctgaaacatttacacttctattttccaccagtgttctttagaattgtttctgttttaggtgacttaaagttttaactaaagcatgagtaacgtttgttggcatacagtcccttcaccacaaataattgtcttgcactgtctacaaagcaaggatcagttacctcacttgtccccttccctacccaaataaaccttacaacgctattctttgagactatcctgaacttgaaatcccacgtttagatccaagctggactcaggcaagcgctgctccaacaaagcgttctcttcctggttccccttaatctttatccacctctccaaggcctatctttggggattcctttggttataggcacctctgcttgtttatgcagggggcattggccggaaggacattggtctggggaatatccctgaaccccatgcctctgggggcacagggaggggcagcgagcaggtggggtggatttccacggcttcatccctggctccaggcctaagctgcctcccaggttcttagggcccagcaagtcaatacatactacgtcaggtggcgacaaatgctccaaagccgagttccagctcagtcaagtgaggacacattttcagcacctcaccttcttttctgcatctctggagctcatcagtcttgcttttctttgttctcccttttaaatccactgccctgaccttgttcatgtattttccagtcacttagtgtggaggaagggaatctcatcccatggagaatagatcgaacatggtcttcacctgacttaaaatataaaatgctaaattagaaatatcttaagtggggcggggggcacagttattttaaaaataaaacctatcaactccctccttgcctgaaagctgtaggggacatatgggtcttctgagatttgctgtgtgatgctgtctcctctccagggacaaggctgctgggcactagaggactagatctttcaagggtcccagatccactgtcacataaagtcacatccagaagacctttcctgccagcttccagggctctttgtgttctgtgacagcatttgggcatagatcctgcttacccggcctggctgctgacaggcgttggctgcctgccctccaggggagacactttcttgggctctgtctttgaaaggctgtggggaggttgaaggtgcaactcaggtccccagactgcagtgagctgacctggcagggcagatgccatcacatctgggggagccggcgggtgttagtggagcttggatgggaacttacccagcatcctaacaaaggtacagaaggaccaggtgaactcagggctgataacgcattacacagtaatggtaaagtggcatagtaaagattagtaagcaaacagcttttcctcttgatttgcatatattttattttcctactcttccctgagcaaatataagcagtaagcaagcaggctaggtgtgctcaataaactcagcaacacctgggatgacctctgcactcgaggggccactgcaatctttgtcaaaggcataggatgctcctgctctagttgcacttgacctaggtgccctttctgctacatgcaaatggcctctaagaagaacgaggaacgtatgtgtccaggttggcttgatttcaccagttcactcagctatggccacgatttactgacatcagctctgcaattgagaggtcctgtctccagggggaggctcgctgggcttgctcctgacgaggggacccccattgagggtcagttcccagaggagagtggggtgggtctggaaacccccgaggggcaaggtggaggagctctcctgtcgtagcggctggtcagggccagttctgctccctggctccactgagctcgcctgagcctgtgaggttgccaggggttccctgtggcacggcaggcacttctggatgcagaggtggaggttgaggccgtgactccaggggcatgtttggtggtgcttggggctgttcctgtgaacagagcagagtgggaggcaggcatcatagttgctgcagaacagtccatactgtggggctggggggtttcctgccacacctgccatctgcccggaccccatagggaaggccacacaggcaaattcctgagaagggtcagccagctcacaaaggtggccattctagagaaatctcagaggagaggaagtgctttgtcaggaactaggcctcaggtctttccctggaggccacttcttcctacattgatttaggatggggggggtggggggtggaggggagcaggttgacctcccatccagcgctgtatctgagtgtagttcattttatatccatagcccaagccaacttgtatcttggtgatatggtttggctgcgtcacgacacaaatctcaccttgaattgtaataatccccacgtgtcgtgggaaggacccagtgggaggtaattgaatcatgggggcgggtcttcccatgctgttctcgtgatagtaagtctcatgagatctgatggttttataaaggggagtttccctgcacatgcccttttgcctgtgtcatgtaagatgtggctttgctcttcctttgccttctgccatgactgtgaagcctcccccgccatgtgaaactgtgagtccattaaacctctttcctttataaatta

SEQ ID NO: 303478 - DNA, 5585 bp, Homo sapiens
cgcgcccgcaaagaagagctcacgggcgtgcggttcaaggctcagctgaaggacccgcagggccccgggccaggcttggaagcgtttgtgtctgctgccaagaagctaccacgagaagatgtgtatgatgttgtggaagggtatataaagatttctgttgagtgtgtcgaaattttccagctcctaagtggagagaaacgacctgaaagtgaaacgatgttaatatttcaagttttcgaggccatattattgcggacagcaagtgatctttcacatttccatgttgtgggaaccaacattgtgaaaaagctgatgaacaaccacatgaagctcatctgtgagtccctgtatgcctcaggttacaggttggctcgcgcctgcctgagcctgatgaccgccatggtgacccagggtccggaagctgccagggacgtctgcagccattttgatttgaataaaaagaccctgtacaccctggtgaccaagagggattcaaagggagtgtacgacgttcggcaggcctacgttcagtttgctctctcctttttaattgcgggtgatgacagcactatagtgcaggtgttggaagtgaaagaatttattccttgcatttttagctcagggataaaggaagataggatctctaccatcaatattttattatccacactgaaaacaaaggtagttcacaataaaaatatcacaaaaacccagaaggtgcgtttctttacggggcagttattgaaccacatagcatcgctgtacaactggaatgggattaccgatgtgaacccagaaaatgtcaaggtttctgccgaagaagcagggaaaaccatggtgcgggagcttgttcataacttcctgatggatctttgctgttcactcaagcatggaattaatttttacgatgcatctttgggtacctttggcagaggcggaaacctgacactcttgcacttcttgctgggtttgaaaactgcagctgatgatgatctggtggctgaccttgtggtaaacatcctcaaagtgtgcccggacttactgaacaaatacttcaaggaagtaacgttttcctttatcccacgagcgaagtctacttggttaaataatatcaaactactaaacaagatctatgaggctcagccggagatttcccgggcatttcagaccagagagtttatacccttgcctcggctcctggcaatggtgatggtgaccaccgtgcccctggtgtgcaataagagcatgttcacccaagcattaaacttggacagcacctcagtgaggcacacagccttatcccttatttctgtcattttgaagagggcattaaaaactgttgaccactgcctgaataaagaggtgtggcaggaatcaggcgtgtacacagctgtgatgatggaagaattcgtgcagctcttcagagaagccctgagcaagattttgccagacctgaacactgtcgtgtgggtctggcagtcacttaaaaagcaagagaccaaacaggatgacaagaaagggcagaaaaggagcgatgggcccccggctgcctgcgatgctcaccagtgcgatgatgcagaaaccattcttttgaaagctgttttgctccaggtcatatgcctctaccagaaggtggtcccccacgtggtcatgcagtacaactttgacttcagcaagctcctgaaaggtgtcatctctgagcagggccttcgagaggaggtgcctcccattctgcagcaccacatgctgaaggtggccctggagctgccggccagcaagtttctgtggttaaaggcacaggaaggcccagatgcagaaattattggaggtgaacgatcagtattttacttactaatgaaaatgtttgtgaccagtagccatttacaactgaagtcattgaccaaacttctgatcatgaagattctgcgggacacgggggtgtttgagcacacctggaaggagctggagctctggctggagcatttagagaacaccatggaagaggacaaagagactgtgattcagtttctggaacgcattttattgacattggtggcgaatccctattcatacacagacaaagcatctgactttgtccaagaagcaagcatgctgcaggccactatgacgaagcaagaagccgatgacatgagcattcccatctcccacattgacgatgttctcgacatggtggatgtcctggtggagggcagtgaaggcttggatgaggaaatagggttcacgttgagtgaagacatgatcctgctcacgttcccattcagtgcggtagtccctgcggccctggaagccaggaataagttgctccttgggacaggcaatgaagcagcggaaaacgttgtgacatatctgacggcagtgctgactgacctcctccacacccagagggaccccctggctctgtgtctcctgctccaggcatatgataagcttgagcctccatgcctggtgccttgctgccagcagctctcacggtttaacagatactacagcctctggatcccggagcaagcccgagaggcctggctgctgcaggcacagggcagcccctcgccccctgcccttcccttggcctcgtccttcacagccctgctgcaggcagcctacgagagccaagcgcttcgggacgagcacatccaggtgcagctgcaggccaccatgccacacctgtccatgcagcaggtcctgctcgcggccaagcaggtgttgctctacctgcggagcactgtggagaacttcggccagctgggcagaagtgtgggcccgcccctcctgcagctcttcctggatctcctcaggcgcctggttgtccactgtgagcagctggatgcccagaaccagcagagatgcgaggccgcccgggccgaagccgacctcttcctggacatggagtccgtggcctcgctggagttggccaatgatcagacgctggaggaggtgcttgtggccatcctcaggcaccccaccctggagggctggttcctggccctggagcagcaggccctcccgccgcacacgctcagccctgtcctcgtgaagctcctggccacccactttagtgcaggggtccttcagctgctggcagcaagtgccccgatcctccagaacattgggcagctgggccttctggccaggtactcagaggccatcacccagagtgtgctgaaggaacttcagaacaggagggcgggcccggccacatcaccaccaaagaccccgccgcagctggaggccctgcaggagctgcatccatacatggagggtgcccagctccgtgaggtcaccctggccttgctgagcctgcctgagacacacctggtgacccagcaacccacgaaatcccccgggaaggaaagacacctgaatgctcttggaaagaccctggtgcagctgctgacctgcagcccccaggatcagctgcagagtggtgagctcctgtggtcctccgagtatgtgagaggcctgggggctctgctgcccacgctagcagtggacgagctggacacagtgctcctccacactctgcagagagaccctgtgctggcccccgcagtcggggctgatctgcttgactactgcctggcccggcgcacacaggcggccctcagcatcgctgccctgctcctccaggagagctgcacccacttgctgtggttcgagcagtggtgcctgcaggctggcccagggctcggcctccagggggacctggacgacttccttcccctcatccatgtgtacctccagtgcaggacacggagccacttcacacgcccagcaggagtgtcttccgctgtcattcctgtcttgaggaagaccctgtggaggcagctacagagcaggcttcttagcactgacagtcccccagcatctgggctgtaccaggagatcctggcacagctggtcccgtttgcacgagccaaggatctcagtgtactcatggaccgcctgcccagcttgcttcacaccccaagcagtcacaagaggtggatcgtggccgactccatttcagcagctctggaagggtcagcagaagagctgtgtgcctggagaaggacccttttggagtcctgtgtgaagtggctgatcgtgtctttcagtggtggacagcaagatgatgataatactcagaatcaggagaaggaaatgctgcttagattaaatgcgttgttgcatgcacttaatgaagttgatcctggtgactggcagaaattcgtgaagaagggactcaaatttcggtaccaggaccacacatttttaaagatgctcctcaccgccgtacagctcctgtacagcccagaaagctccgtgcgcacgaagctcatccagctcccggtggtctacgtgatgctcatgcagcactcgctgtttctgccgactctactgacgtctgacggagaggagagcccggacagccaagtaaaagaagcgctggtggacctgatgctgacggtggtggagatgtgcccctctgtctgtgagagcagccactttgcagtgcttctcggggcctatggcgccactctcagcgtcctagatcagaagattttacttctgcttcgagcgtatgagcagaacaagctcagcctcatcaacttcagggtgctgctgtggggcccagcggccgtggagcatcacaagacgtgccggagcctgggcaggtcactgtggcagcagccgagtgtcggggacatccttcgcctgctggaccgggaccggatgatgcagaccatcctgcacttcccccagaaccggaggctgctgccccccgaggacacacaggagctgatattcaaagacaaaagcagggtggatcttgatggcctctatgacccctgctttctccttcagctcttcagtgagctgaccaggccagagtttgtggtggattgtcgaaaatttttggattcaaatgctctgggcctaactgtcacagccctcagcagctatgacccccagatgcgagccatagcctaccatgtcctggcggcctactactcgcacttggagggcgcacggttccaagagcagtcccagctactttacctgttggatgtagtccggaatgggattcgaactcaggacatgagacttacttttaccttggctctcttcattgccaaagcagccctgcagattttgaaaccagaggagcacatgtacctgaaggtcagcaacttcctgctgtcgcatgagtacttgaacatggacaaagtgccaggcttctaccagttcttctacagctccgactttgaggtatgcttccagagtcctcacggctttctgcaggcccctgaattgatgatgcagccaccgttgtcattctgacatttccccatggatcctgtatgctgcacggccaacacgattgtgcagtcggtggccacgcaggcctgcacttcggaatgtctccgtgctgttggctcacttctacatggcgcctcaaaccttaaaaactctgcttcagagtcctgagttttacgacattctcatattttcttggtgaatcactgggttaaatattaaattctgtttttagatattcatattaaatattcttttatagaata

SEQ ID NO: 303479 - DNA, 5813 bp, Homo sapiens
cgcgcccgcaaagaagagctcacgggcgtgcggttcaaggctcagctgaaggacccgcagggccccgggccaggcttggaagcgtttgtgtctgctgccaagaagctaccacgagaagatgtgtatgatgttgtggaagggtatataaagatttctgttgagtgtgtcgaaattttccagctcctaagtggagagaaacgacctgaaagtgaaacgatgttaatatttcaagttttcgaggccatattattgcggacagcaagtgatctttcacatttccatgttgtgggaaccaacattgtgaaaaagctgatgaacaaccacatgaagctcatctgtgagtccctgtatgcctcaggttacaggttggctcgcgcctgcctgagcctgatgaccgccatggtgacccagggtccggaagctgccagggacgtctgcagccattttgatttgaataaaaagaccctgtacaccctggtgaccaagagggattcaaagggagtgtacgacgttcggcaggcctacgttcagtttgctctctcctttttaattgcgggtgatgacagcactatagtgcaggtgttggaagtgaaagaatttattccttgcatttttagctcagggataaaggaagataggatctctaccatcaatattttattatccacactgaaaacaaaggtagttcacaataaaaatatcacaaaaacccagaaggtgcgtttctttacggggcagttattgaaccacatagcatcgctgtacaactggaatgggattaccgatgtgaacccagaaaatgtcaaggtttctgccgaagaagcagggaaaaccatggtgcgggagcttgttcataacttcctgatggatctttgctgttcactcaagcatggaattaatttttacgatgcatctttgggtacctttggcagaggcggaaacctgacactcttgcacttcttgctgggtttgaaaactgcagctgatgatgatctggtggctgaccttgtggtaaacatcctcaaagtgtgcccggacttactgaacaaatacttcaaggaagtaacgttttcctttatcccacgagcgaagtctacttggttaaataatatcaaactactaaacaagatctatgaggctcagccggagatttcccgggcatttcagaccagagagtttatacccttgcctcggctcctggcaatggtgatggtgaccaccgtgcccctggtgtgcaataagagcatgttcacccaagcattaaacttggacagcacctcagtgaggcacacagccttatcccttatttctgtcattttgaagagggcattaaaaactgttgaccactgcctgaataaagaggtgtggcaggaatcaggcgtgtacacagctgtgatgatggaagaattcgtgcagctcttcagagaagccctgagcaagattttgccagacctgaacactgtcgtgtgggtctggcagtcacttaaaaagcaagagaccaaacaggatgacaagaaagggcagaaaaggagcgatgggcccccggctgcctgcgatgctcaccagtgcgatgatgcagaaaccattcttttgaaagctgttttgctccaggtcatatgcctctaccagaaggtggtcccccacgtggtcatgcagtacaactttgacttcagcaagctcctgaaaggtgtcatctctgagcagggccttcgagaggaggtgcctcccattctgcagcaccacatgctgaaggtggccctggagctgccggccagcaagtttctgtggttaaaggcacaggaaggcccagatgcagaaattattggaggtgaacgatcagtattttacttactaatgaaaatgtttgtgaccagtagccatttacaactgaagtcattgaccaaacttctgatcatgaagattctgcgggacacgggggtgtttgagcacacctggaaggagctggagctctggctggagcatttagagaacaccatggaagaggacaaagagactgtgattcagtttctggaacgcattttattgacattggtggcgaatccctattcatacacagacaaagcatctgactttgtccaagaagcaagcatgctgcaggccactatgacgaagcaagaagccgatgacatgagcattcccatctcccacattgacgatgttctcgacatggtggatgtcctggtggagggcagtgaaggcttggatgaggaaatagggttcacgttgagtgaagacatgatcctgctcacgttcccattcagtgcggtagtccctgcggccctggaagccaggaataagttgctccttgggacaggcaatgaagcagcggaaaacgttgtgacatatctgacggcagtgctgactgacctcctccacacccagagggaccccctggctctgtgtctcctgctccaggcatatgataagcttgagcctccatgcctggtgccttgctgccagcagctctcacggtttaacagatactacagcctctggatcccggagcaagcccgagaggcctggctgctgcaggcacagggcagcccctcgccccctgcccttcccttggcctcgtccttcacagccctgctgcaggcagcctacgagagccaagcgcttcgggacgagcacatccaggtgcagctgcaggccaccatgccacacctgtccatgcagcaggtcctgctcgcggccaagcaggtgttgctctacctgcggagcactgtggagaacttcggccagctgggcagaagtgtgggcccgcccctcctgcagctcttcctggatctcctcaggcgcctggttgtccactgtgagcagctggatgcccagaaccagcagagatgcgaggccgcccgggccgaagccgacctcttcctggacatggagtccgtggcctcgctggagttggccaatgatcagacgctggaggaggtgcttgtggccatcctcaggcaccccaccctggagggctggttcctggccctggagcagcaggccctcccgccgcacacgctcagccctgtcctcgtgaagctcctggccacccactttagtgcaggggtccttcagctgctggcagcaagtgccccgatcctccagaacattgggcagctgggccttctggccaggtactcagaggccatcacccagagtgtgctgaaggaacttcagaacaggagggcgggcccggccacatcaccaccaaagaccccgccgcagctggaggccctgcaggagctgcatccatacatggagggtgcccagctccgtgaggtcaccctggccttgctgagcctgcctgagacacacctggtgacccagcaacccacgaaatcccccgggaaggaaagacacctgaatgctcttggaaagaccctggtgcagctgctgacctgcagcccccaggatcagctgcagagtggtgagctcctgtggtcctccgagtatgtgagaggcctgggggctctgctgcccacgctagcagtggacgagctggacacagtgctcctccacactctgcagagagaccctgtgctggcccccgcagtcggggctgatctgcttgactactgcctggcccggcgcacacaggcggccctcagcatcgctgccctgctcctccaggagagctgcacccacttgctgtggttcgagcagtggtgcctgcaggctggcccagggctcggcctccagggggacctggacgacttccttcccctcatccatgtgtacctccagtgcaggacacggagccacttcacacgcccagcaggagtgtcttccgctgtcattcctgtcttgaggaagaccctgtggaggcagctacagagcaggcttcttagcactgacagtcccccagcatctgggctgtaccaggagatcctggcacagctggtcccgtttgcacgagccaaggatctcagtgtactcatggaccgcctgcccagcttgcttcacaccccaagcagtcacaagaggtggatcgtggccgactccatttcagcagctctggaagggtcagcagaagagctgtgtgcctggagaaggacccttttggagtcctgtgtgaagtggctgatcgtgtctttcagtggtggacagcaagatgatgataatactcagaatcaggagaaggaaatgctgcttagattaaatgcgttgttgcatgcacttaatgaagttgatcctggtgactggcagaaattcgtgaagaagggactcaaatttcggtaccaggaccacacatttttaaagatgctcctcaccgccgtacagctcctgtacagcccagaaagctccgtgcgcacgaagctcatccagctcccggtggtctacgtgatgctcatgcagcactcgctgtttctgccgactctactgacgtctgacggagaggagagcccggacagccaagtaaaagaagcgctggtggacctgatgctgacggtggtggagatgtgcccctctgtctgtgagagcagccactttgcagtgcttctcggggcctatggcgccactctcagcgtcctagatcagaagattttacttctgcttcgagcgtatgagcagaacaagctcagcctcatcaacttcagggtgctgctgtggggcccagcggccgtggagcatcacaagacgtgccggagcctgggcaggtcactgtggcagcagccgagtgtcggggacatccttcgcctgctggaccgggaccggatgatgcagaccatcctgcacttcccccagaaccggaggctgctgccccccgaggacacacaggagctgatattcaaagacaaaagcagggtggatcttgatggcctctatgacccctgctttctccttcagctcttcagtgagctgaccaggccagagtttgtggtggattgtcgaaaatttttggattcaaatgctctgggcctaactgtcacagccctcagcagctatgacccccagatgcgagccatagcctaccatgtcctggcggcctactactcgcacttggagggcgcacggttccaagagcagtcccagctactttacctgttggatgtagtccggaatgggattcgaactcaggacatgagacttacttttaccttggctctcttcattgccaaagcagccctgcagattttgaaaccagaggagcacatgtacctgaaggtcagcaacttcctgctgtcgcatgagtacttgaacatggacaaagtgccaggcttctaccagttcttctacagctccgactttgagcaaaaaacagagcagaagtgggtgtttggccttctgcggcaggggatccgtgacaagcagtgctacgaactgtgtgcccggcgtggcatcttccacatcatcctgtccttcttccacagcccgctgtgtgacgaggcagcacagaattggattctggaaattctacagaatgctgcccaggttgccagatctgcgtatgaaatcatacgagactatagccttttaacatggattttacacatccttgaaagcaattctggagactccgctgctgtctaaatgcaatcatgattgcatttagactatggtgagctcaggtgattgatactcctgatgcgagtaatacggatgtgtttaggagtgggacttctaggggatttagcggggtgatgcctgttgggggccagtgccctcctaattggggggtaggggctaggctggagtggtaaaaggctcagaaaaatcctgcgaagaaaaaaacttctgaggtaataaataggattatcctcgtatcgaagcctttttgacagctggtgtgtgtg

SEQ ID NO: 303480 - DNA, 5095 bp, Homo sapiens
cgcgcccgcaaagaagagctcacgggcgtgcggttcaaggctcagctgaaggacccgcagggccccgggccaggcttggaagcgtttgtgtctgctgccaagaagctaccacgagaagatgtgtatgatgttgtggaagggtatataaagatttctgttgagtgtgtcgaaattttccagctcctaagtggagagaaacgacctgaaagtgaaacgatgttaatatttcaagttttcgaggccatattattgcggacagcaagtgatctttcacatttccatgttgtgggaaccaacattgtgaaaaagctgatgaacaaccacatgaagctcatctgtgagtccctgtatgcctcaggttacaggttggctcgcgcctgcctgagcctgatgaccgccatggtgacccagggtccggaagctgccagggacgtctgcagccattttgatttgaataaaaagaccctgtacaccctggtgaccaagagggattcaaagggagtgtacgacgttcggcaggcctacgttcagtttgctctctcctttttaattgcgggtgatgacagcactatagtgcaggtgttggaagtgaaagaatttattccttgcatttttagctcagggataaaggaagataggatctctaccatcaatattttattatccacactgaaaacaaaggtagttcacaataaaaatatcacaaaaacccagaaggtgcgtttctttacggggcagttattgaaccacatagcatcgctgtacaactggaatgggattaccgatgtgaacccagaaaatgtcaaggtttctgccgaagaagcagggaaaaccatggtgcgggagcttgttcataacttcctgatggatctttgctgttcactcaagcatggaattaatttttacgatgcatctttgggtacctttggcagaggcggaaacctgacactcttgcacttcttgctgggtttgaaaactgcagctgatgatgatctggtggctgaccttgtggtaaacatcctcaaagtgtgcccggacttactgaacaaatacttcaaggaagtaacgttttcctttatcccacgagcgaagtctacttggttaaataatatcaaactactaaacaagatctatgaggctcagccggagatttcccgggcatttcagaccagagagtttatacccttgcctcggctcctggcaatggtgatggtgaccaccgtgcccctggtgtgcaataagagcatgttcacccaagcattaaacttggacagcacctcagtgaggcacacagccttatcccttatttctgtcattttgaagagggcattaaaaactgttgaccactgcctgaataaagaggtgtggcaggaatcaggcgtgtacacagctgtgatgatggaagaattcgtgcagctcttcagagaagccctgagcaagattttgccagacctgaacactgtcgtgtgggtctggcagtcacttaaaaagcaagagaccaaacaggatgacaagaaagggcagaaaaggagcgatgggcccccggctgcctgcgatgctcaccagtgcgatgatgcagaaaccattcttttgaaagctgttttgctccaggtcatatgcctctaccagaaggtggtcccccacgtggtcatgcagtacaactttgacttcagcaagctcctgaaaggtgtcatctctgagcagggccttcgagaggaggtgcctcccattctgcagcaccacatgctgaaggtggccctggagctgccggccagcaagtttctgtggttaaaggcacaggaaggcccagatgcagaaattattggaggtgaacgatcagtattttacttactaatgaaaatgtttgtgaccagtagccatttacaactgaagtcattgaccaaacttctgatcatgaagattctgcgggacacgggggtgtttgagcacacctggaaggagctggagctctggctggagcatttagagaacaccatggaagaggacaaagagactgtgattcagtttctggaacgcattttattgacattggtggcgaatccctattcatacacagacaaagcatctgactttgtccaagaagcaagcatgctgcaggccactatgacgaagcaagaagccgatgacatgagcattcccatctcccacattgacgatgttctcgacatggtggatgtcctggtggagggcagtgaaggcttggatgaggaaatagggttcacgttgagtgaagacatgatcctgctcacgttcccattcagtgcggtagtccctgcggccctggaagccaggaataagttgctccttgggacaggcaatgaagcagcggaaaacgttgtgacatatctgacggcagtgctgactgacctcctccacacccagagggaccccctggctctgtgtctcctgctccaggcatatgataagcttgagcctccatgcctggtgccttgctgccagcagctctcacggtttaacagatactacagcctctggatcccggagcaagcccgagaggcctggctgctgcaggcacagggcagcccctcgccccctgcccttcccttggcctcgtccttcacagccctgctgcaggcagcctacgagagccaagcgcttcgggacgagcacatccaggtgcagctgcaggccaccatgccacacctgtccatgcagcaggtcctgctcgcggccaagcaggtgttgctctacctgcggagcactgtggagaacttcggccagctgggcagaagtgtgggcccgcccctcctgcagctcttcctggatctcctcaggcgcctggttgtccactgtgagcagctggatgcccagaaccagcagagatgcgaggccgcccgggccgaagccgacctcttcctggacatggagtccgtggcctcgctggagttggccaatgatcagacgctggaggaggtgcttgtggccatcctcaggcaccccaccctggagggctggttcctggccctggagcagcaggccctcccgccgcacacgctcagccctgtcctcgtgaagctcctggccacccactttagtgcaggggtccttcagctgctggcagcaagtgccccgatcctccagaacattgggcagctgggccttctggccaggtactcagaggccatcacccagagtgtgctgaaggaacttcagaacaggagggcgggcccggccacatcaccaccaaagaccccgccgcagctggaggccctgcaggagctgcatccatacatggagggtgcccagctccgtgaggtcaccctggccttgctgagcctgcctgagacacacctggtgacccagcaacccacgaaatcccccgggaaggaaagacacctgaatgctcttggaaagaccctggtgcagctgctgacctgcagcccccaggatcagctgcagagtggtgagctcctgtggtcctccgagtatgtgagaggcctgggggctctgctgcccacgctagcagtggacgagctggacacagtgctcctccacactctgcagagagaccctgtgctggcccccgcagtcggggctgatctgcttgactactgcctggcccggcgcacacaggcggccctcagcatcgctgccctgctcctccaggagagctgcacccacttgctgtggttcgagcagtggtgcctgcaggctggcccagggctcggcctccagggggacctggacgacttccttcccctcatccatgtgtacctccagtgcaggacacggagccacttcacacgcccagcaggagtgtcttccgctgtcattcctgtcttgaggaagaccctgtggaggcagctacagagcaggcttcttagcactgacagtcccccagcatctgggctgtaccaggagatcctggcacagctggtcccgtttgcacgagccaaggatctcagtgtactcatggaccgcctgcccagcttgcttcacaccccaagcagtcacaagaggtggatcgtggccgactccatttcagcagctctggaagggtcagcagaagagctgtgtgcctggagaaggacccttttggagtcctgtgtgaagtggctgatcgtgtctttcagtggtggacagcaagatgatgataatactcagaatcaggagaaggaaatgctgcttagattaaatgcgttgttgcatgcacttaatgaagttgatcctggtgactggcagaaattcgtgaagaagggactcaaatttcggtaccaggaccacacatttttaaagatgctcctcaccgccgtacagctcctgtacagcccagaaagctccgtgcgcacgaagctcatccagctcccggtggtctacgtgatgctcatgcagcactcgctgtttctgccgactctactgacgtctgacggagaggagagcccggacagccaagtaaaagaagcgctggtggacctgatgctgacggtggtggagatgtgcccctctgtctgtgagagcagccactttgcagtgcttctcggggcctatggcgccactctcagcgtcctagatcagaagattttacttctgcttcgagcgtatgagcagaacaagctcagcctcatcaacttcagggtgctgctgtggggcccagcggccgtggagcatcacaagacgtgccggagcctgggcaggtcactgtggcagcagccgagtgtcggggacatccttcgcctgctggaccgggaccggatgatgcagaccatcctgcacttcccccagaaccggaggctgctgccccccgaggacacacaggagctgatattcaaagacaaaagcagggtggatcttgatggcctctatgacccctgctttctccttcagctcttcagtgagctgaccaggccaggtaactgcagtcttctcttgggtcagggcttgctatgcatgacttctcagaggtcaggttgattatggtaattattgccataattaccacatgaggacctgaatcttggaaataattcttaaaggatcttcagccatcctcatctgttcattccagtgattttcagcaaagtcacagttagtattttgaacatacagtgattta

SEQ ID NO: 303481 - DNA, 4660 bp, Homo sapiens
cgcgcccgcaaagaagagctcacgggcgtgcggttcaaggctcagctgaaggacccgcagggccccgggccaggcttggaagcgtttgtgtctgctgccaagaagctaccacgagaagatgtgtatgatgttgtggaagggtatataaagatttctgttgagtgtgtcgaaattttccagctcctaagtggagagaaacgacctgaaagtgaaacgatgttaatatttcaagttttcgaggccatattattgcggacagcaagtgatctttcacatttccatgttgtgggaaccaacattgtgaaaaagctgatgaacaaccacatgaagctcatctgtgagtccctgtatgcctcaggttacaggttggctcgcgcctgcctgagcctgatgaccgccatggtgacccagggtccggaagctgccagggacgtctgcagccattttgatttgaataaaaagaccctgtacaccctggtgaccaagagggattcaaagggagtgtacgacgttcggcaggcctacgttcagtttgctctctcctttttaattgcgggtgatgacagcactatagtgcaggtgttggaagtgaaagaatttattccttgcatttttagctcagggataaaggaagataggatctctaccatcaatattttattatccacactgaaaacaaaggtagttcacaataaaaatatcacaaaaacccagaaggtgcgtttctttacggggcagttattgaaccacatagcatcgctgtacaactggaatgggattaccgatgtgaacccagaaaatgtcaaggtttctgccgaagaagcagggaaaaccatggtgcgggagcttgttcataacttcctgatggatctttgctgttcactcaagcatggaattaatttttacgatgcatctttgggtacctttggcagaggcggaaacctgacactcttgcacttcttgctgggtttgaaaactgcagctgatgatgatctggtggctgaccttgtggtaaacatcctcaaagtgtgcccggacttactgaacaaatacttcaaggaagtaacgttttcctttatcccacgagcgaagtctacttggttaaataatatcaaactactaaacaagatctatgaggctcagccggagatttcccgggcatttcagaccagagagtttatacccttgcctcggctcctggcaatggtgatggtgaccaccgtgcccctggtgtgcaataagagcatgttcacccaagcattaaacttggacagcacctcagtgaggcacacagccttatcccttatttctgtcattttgaagagggcattaaaaactgttgaccactgcctgaataaagaggtgtggcaggaatcaggcgtgtacacagctgtgatgatggaagaattcgtgcagctcttcagagaagccctgagcaagattttgccagacctgaacactgtcgtgtgggtctggcagtcacttaaaaagcaagagaccaaacaggatgacaagaaagggcagaaaaggagcgatgggcccccggctgcctgcgatgctcaccagtgcgatgatgcagaaaccattcttttgaaagctgttttgctccaggtcatatgcctctaccagaaggtggtcccccacgtggtcatgcagtacaactttgacttcagcaagctcctgaaaggtgtcatctctgagcagggccttcgagaggaggtgcctcccattctgcagcaccacatgctgaaggtggccctggagctgccggccagcaagtttctgtggttaaaggcacaggaaggcccagatgcagaaattattggaggtgaacgatcagtattttacttactaatgaaaatgtttgtgaccagtagccatttacaactgaagtcattgaccaaacttctgatcatgaagattctgcgggacacgggggtgtttgagcacacctggaaggagctggagctctggctggagcatttagagaacaccatggaagaggacaaagagactgtgattcagtttctggaacgcattttattgacattggtggcgaatccctattcatacacagacaaagcatctgactttgtccaagaagcaagcatgctgcaggccactatgacgaagcaagaagccgatgacatgagcattcccatctcccacattgacgatgttctcgacatggtggatgtcctggtggagggcagtgaaggcttggatgaggaaatagggttcacgttgagtgaagacatgatcctgctcacgttcccattcagtgcggtagtccctgcggccctggaagccaggaataagttgctccttgggacaggcaatgaagcagcggaaaacgttgtgacatatctgacggcagtgctgactgacctcctccacacccagagggaccccctggctctgtgtctcctgctccaggcatatgataagcttgagcctccatgcctggtgccttgctgccagcagctctcacggtttaacagatactacagcctctggatcccggagcaagcccgagaggcctggctgctgcaggcacagggcagcccctcgccccctgcccttcccttggcctcgtccttcacagccctgctgcaggcagcctacgagagccaagcgcttcgggacgagcacatccaggtgcagctgcaggccaccatgccacacctgtccatgcagcaggtcctgctcgcggccaagcaggtgttgctctacctgcggagcactgtggagaacttcggccagctgggcagaagtgtgggcccgcccctcctgcagctcttcctggatctcctcaggcgcctggttgtccactgtgagcagctggatgcccagaaccagcagagatgcgaggccgcccgggccgaagccgacctcttcctggacatggagtccgtggcctcgctggagttggccaatgatcagacgctggaggaggtgcttgtggccatcctcaggcaccccaccctggagggctggttcctggccctggagcagcaggccctcccgccgcacacgctcagccctgtcctcgtgaagctcctggccacccactttagtgcaggggtccttcagctgctggcagcaagtgccccgatcctccagaacattgggcagctgggccttctggccaggtactcagaggccatcacccagagtgtgctgaaggaacttcagaacaggagggcgggcccggccacatcaccaccaaagaccccgccgcagctggaggccctgcaggagctgcatccatacatggagggtgcccagctccgtgaggtcaccctggccttgctgagcctgcctgagacacacctggtgacccagcaacccacgaaatcccccgggaaggaaagacacctgaatgctcttggaaagaccctggtgcagctgctgacctgcagcccccaggatcagctgcagagtggtgagctcctgtggtcctccgagtatgtgagaggcctgggggctctgctgcccacgctagcagtggacgagctggacacagtgctcctccacactctgcagagagaccctgtgctggcccccgcagtcggggctgatctgcttgactactgcctggcccggcgcacacaggcggccctcagcatcgctgccctgctcctccaggagagctgcacccacttgctgtggttcgagcagtggtgcctgcaggctggcccagggctcggcctccagggggacctggacgacttccttcccctcatccatgtgtacctccagtgcaggacacggagccacttcacacgcccagcaggagtgtcttccgctgtcattcctgtcttgaggaagaccctgtggaggcagctacagagcaggcttcttagcactgacagtcccccagcatctgggctgtaccaggagatcctggcacagctggtcccgtttgcacgagccaaggatctcagtgtactcatggaccgcctgcccagcttgcttcacaccccaagcagtcacaagaggtggatcgtggccgactccatttcagcagctctggaagggtcagcagaagagctgtgtgcctggagaaggacccttttggagtcctgtgtgaagtggctgatcgtgtctttcagtggtggacagcaagatgatgataatactcagaatcaggagaaggaaatgctgcttagattaaatgcgttgttgcatgcacttaatgaagttgatcctggtgactggcagaaattcgtgaagaagggactcaaatttcggtaccaggaccacacatttttaaagatgctcctcaccgccgtacagctcctgtacagcccagaaagctccgtgcgcacgaagctcatccagctcccggtggtctacgtgatgctcatgcagcactcgctgtttctgccgactctactgacgtctgacggagaggagagcccggacagccaagtaaaaggtgacccctcaccccagcccttccattccgtatccagattttatctcctgatttccttacactggctgcactgaggctcatctccctccggctctcggagctaaggaagcattgccaagacagtgtcagaatgttttatttctgtcaaatccagggtgaagaaatgtctcctctgacttgtggtcaaacagcaaatacaaacctgttttcaaggcctta

SEQ ID NO: 303482 - DNA, 2594 bp, Homo sapiens
cgcgcccgcaaagaagagctcacgggcgtgcggttcaaggctcagctgaaggacccgcagggccccgggccaggcttggaagcgtttgtgtctgctgccaagaagctaccacgagaagatgtgtatgatgttgtggaagggtatataaagatttctgttgagtgtgtcgaaattttccagctcctaagtggagagaaacgacctgaaagtgaaacgatgttaatatttcaagttttcgaggccatattattgcggacagcaagtgatctttcacatttccatgttgtgggaaccaacattgtgaaaaagctgatgaacaaccacatgaagctcatctgtgagtccctgtatgcctcaggttacaggttggctcgcgcctgcctgagcctgatgaccgccatggtgacccagggtccggaagctgccagggacgtctgcagccattttgatttgaataaaaagaccctgtacaccctggtgaccaagagggattcaaagggagtgtacgacgttcggcaggcctacgttcagtttgctctctcctttttaattgcgggtgatgacagcactatagtgcaggtgttggaagtgaaagaatttattccttgcatttttagctcagggataaaggaagataggatctctaccatcaatattttattatccacactgaaaacaaaggtagttcacaataaaaatatcacaaaaacccagaaggtgcgtttctttacggggcagttattgaaccacatagcatcgctgtacaactggaatgggattaccgatgtgaacccagaaaatgtcaaggtttctgccgaagaagcagggaaaaccatggtgcgggagcttgttcataacttcctgatggatctttgctgttcactcaagcatggaattaatttttacgatgcatctttgggtacctttggcagaggcggaaacctgacactcttgcacttcttgctgggtttgaaaactgcagctgatgatgatctggtggctgaccttgtggtaaacatcctcaaagtgtgcccggacttactgaacaaatacttcaaggaagtaacgttttcctttatcccacgagcgaagtctacttggttaaataatatcaaactactaaacaagatctatgaggctcagccggagatttcccgggcatttcagaccagagagtttatacccttgcctcggctcctggcaatggtgatggtgaccaccgtgcccctggtgtgcaataagagcatgttcacccaagcattaaacttggacagcacctcagtgaggcacacagccttatcccttatttctgtcattttgaagagggcattaaaaactgttgaccactgcctgaataaagaggtgtggcaggaatcaggcgtgtacacagctgtgatgatggaagaattcgtgcagctcttcagagaagccctgagcaagattttgccagacctgaacactgtcgtgtgggtctggcagtcacttaaaaagcaagagaccaaacaggatgacaagaaagggcagaaaaggagcgatgggcccccggctgcctgcgatgctcaccagtgcgatgatgcagaaaccattcttttgaaagctgttttgctccaggtcatatgcctctaccagaaggtggtcccccacgtggtcatgcagtacaactttgacttcagcaagctcctgaaaggtgtcatctctgagcagggccttcgagaggaggtgcctcccattctgcagcaccacatgctgaaggtggccctggagctgccggccagcaagtttctgtggttaaaggcacaggaaggcccagatgcagaaattattggaggtgaacgatcagtattttacttactaatgaaaatgtttgtgaccagtagccatttacaactgaagtcattgaccaaacttctgatcatgaagattctgcgggacacgggggtgtttgagcacacctggaaggagctggagctctggctggagcatttagagaacaccatggaagaggacaaagagactgtgattcagtttctggaacgcattttattgacattggtggcgaatccctattcatacacagacaaagcatctgactttgtccaagaagcaagcatgctgcaggccactatgacgaagcaagaagccgatgacatgagcattcccatctcccacattgacgatgttctcgacatggtggatgtcctggtggagggcagtgaaggcttggatgaggaaatagggttcacgttgagtgaagacatgatcctgctcacgttcccattcagtgcggtagtccctgcggccctggaagccaggaataagttgctccttgggacaggcaatgaagcagcggaaaacgttgtgacatatctgacggcatgtcacacattgagggaggtctaagaaaaggaaactgccacccatgtttgactgcagctggggagcttcttccacgtctcatagccagcttctccagagggaactcccagagctgactgtactctcctacctcagcctcttcttcctgggatggcgtcaaaatatgaacagatacagcttcatgctttcaggaaaccaccttctcttccatcttctcc

SEQ ID NO: 303483 - DNA, 126 bp, Homo sapiens
cattcccatctcccacattgacggtatgttccattctgttctgcgctgctcagaggtctgaagaccaagccacagtgacgtgttaagagattgagaacaagaactgcactaatgccctaggccaag

SEQ ID NO: 303484 - DNA, 476 bp, Homo sapiens
gctggggcctgccatgactgactgactgcctgtgttctcagaggagcacatgtacctgaaggtcagcaacttcctgctgtcgcatgagtacttgaacatggacaaagtgccaggcttctaccagttcttctacagctccgactttgaggtatgcttccagagtcctcacggctttctgcaggcccctgaattgatgatgcagccaccgttgtcattctgacatttccccatggatcctgtatgctgcacggccaacacgattgtgcagtcggtggccacgcaggcctgcacttcggaatgtctccgtgctgttggctcacttctacatggcgcctcaaaccttaaaaactctgcttcagagtcctgagttttacgacattctcatattttcttggtgaatcactgggttaaatattaaattctgtttttagatattcatattaaatattcttttatagaatacttatctgacttca

SEQ ID NO: 303485 - DNA, 374 bp, Homo sapiens
ggcataataggtgttaaaaaaaaaataaatgacctctggacgcagaacttcagccatgaaggtaacaggcatctttcttctcagtgccttggccctgttgagtctatctggtaacactggagctgactccctgggaagagaggccaaatgttacaatgaacttaatggatgcaccaagatatatgaccctgtctgtgggactgatggaaatacttatcccaatgaatgcgtgttatgttttgaaaatcggaaacgccagacttctatcctcattcaaaaatctgggccttgctgagaaccaaggttttgaaatcccatcaggtcaccgcgaggcctgactggccttattgttgaataaatgtatctgaatatcc

SEQ ID NO: 303486 - DNA, 407 bp, Homo sapiens
tgtttgttctcatttagggtcatgggttttcaggcttgagtggggcctttgccagggaactgccttcttctacccagtatttccctgtctcctgtctgtatcagtaatataggaattagaaaacacaaatatctttttttgtaaactaggttgtagatctgtttgtagttaagaggccaaatgttacaatgaacttaatggatgcaccaagatatatgaccctgtctgtgggactgatggaaatacttatcccaatgaatgcgtgttatgttttgaaaatcggaaacgccagacttctatcctcattcaaaaatctgggccttgctgagaaccaaggttttgaaatcccatcaggtcaccgcgaggcctgactggccttattgttgaataaatgtatctgaatatcc

SEQ ID NO: 303487 - DNA, 487 bp, Homo sapiens
tcataatcaaagttttactcaaactttttaaggttttgccaaggaaggggtacaggaaaatcagtcagatacttttggaagattagagaaatcagaaagggtggggaatgaaagagcctagtaaagaagtcacagtctgcaatgaaagcagagaattctgatgaagaatagatctgacttctttcatttaggacccaacttaccatatctgatttatttctaggtaacactggagctgactccctgggaagagaggccaaatgttacaatgaacttaatggatgcaccaagatatatgaccctgtctgtgggactgatggaaatacttatcccaatgaatgcgtgttatgttttgaaaatcggaaacgccagacttctatcctcattcaaaaatctgggccttgctgagaaccaaggttttgaaatcccatcaggtcaccgcgaggcctgactggccttattgttgaataaatgtatctgaatatcc

SEQ ID NO: 303488 - DNA, 683 bp, Homo sapiens
  misc_feature (378)..(378): n is a, c, g, or t
  misc_feature (380)..(380): n is a, c, g, or t
ggacaaattaggcctatggaagggtaaacatcgcatctaactatctcagtggccgtggcgccatgatagagtctatcgtggtaccgctggagctaactccctgggacagagaggccaaatgttacaatgaacttaatggatgcaccaagatatatgaccctgtctgtgggactgatggaaatacttatcccaatgaatgcgtgttatgttttgaaaatcggaaacgccagacttctatcctcattcaaaaatctgggccttgctgagaaccaaggttttgaaatcccatcaggtcaccgcgaggcctgactggccttattgttgaataaatgtatctgaatatccaaaaaaaaaaaagaaaaaaaaaaaaaagaaaangnggggggggcgcgccgcacgaaagaatatcccccgccgcgaggggcgccccaaagacgacgagcagccacccgcaggtttgggacgaacaaggggggccccaaaaagagggaggctgcgtacatatcataccgagaaggggccccgcggcgcccggcgcggatataaaacaacagcgccagagagtgaggggggacaacacagcgcggcgaagccgcgggagacaccctgggggcgaaggaaacacccaccaatacaggggggggggggggggcacacatcggggggggaacacaacaagccca

SEQ ID NO: 303489 - DNA, 1035 bp, Homo sapiens
  misc_feature (25)..(25): n is a, c, g, or t
attcgcggccgcgtcgacttttttnaggtgttattattattttaatttccagatgaatacacagaagcacagcaaaagtggctccaacaagcaccctctagctccagaatacacgctttagggaactgagtcctctctctctcttgctttctctttccctctcatctgccactccatcagctactttaggttttgtgaatgagtgagggaaaaatagagaaaagagaaagaagaataagaaaggaagagtggaggaaaggaaaaaagaatggagaggttttaccctacttggaataaaattctttctagtagctatccatacctgctcatctatccagaactacagagtagaagggatctttgagttcatcttacaggtgagaaaacaggcttgagaagggaatgactttcccacaaccacagagggagttagggatcaaactaaccactagaactattttcctgacagaatctttgccttgcatgtttcaggcccacctggctcctttcacctttcttacacaggtgacattcccagaacctggaggccaggctatgacacagagtcaatcaataaccagggagatctgtgatatagcccagtaggtggggccttgctgccatctgccatatgacccttccagtcccaggcttctgaagagacgtggtaagtgcggtgcagttttcaactgacctctggacgcagaacttcagccatgaaggtaacaggcatctttcttctcagtgccttggccctgttgagtctatctggtaacactggagctgactccctgggaagagaggccaaatgttacaatgaacttaatggatgcaccaagatatatgaccctgtctgtgggactgatggaaatacttatcccaatgaatgcgtgttatgttttgaaaatcggaaacgccagacttctatcctcattcaaaaatctgggccttgctgagaaccaaggttttgaaatcccatcaggtcaccgcgaggcctgactggccttattgttgaataaatgtatctgaatatcc

SEQ ID NO: 303490 - DNA, 1437 bp, Homo sapiens
  misc_feature (25)..(25): n is a, c, g, or t
  misc_feature (1055)..(1055): n is a, c, g, or t
  misc_feature (1063)..(1063): n is a, c, g, or t
  misc_feature (1132)..(1132): n is a, c, g, or t
  misc_feature (1134)..(1134): n is a, c, g, or t
attcgcggccgcgtcgacttttttnaggtgttattattattttaatttccagatgaatacacagaagcacagcaaaagtggctccaacaagcaccctctagctccagaatacacgctttagggaactgagtcctctctctctcttgctttctctttccctctcatctgccactccatcagctactttaggttttgtgaatgagtgagggaaaaatagagaaaagagaaagaagaataagaaaggaagagtggaggaaaggaaaaaagaatggagaggttttaccctacttggaataaaattctttctagtagctatccatacctgctcatctatccagaactacagagtagaagggatctttgagttcatcttacaggtgagaaaacaggcttgagaagggaatgactttcccacaaccacagagggagttagggatcaaactaaccactagaactattttcctgacagaatctttgccttgcatgtttcaggcccacctggctcctttcacctttcttacacaggtgacattcccagaacctggaggccaggctatgacacagagtcaatcaataaccagggagatctgtgatatagcccagtaggtggggccttgctgccatctgccatatgacccttccagtcccaggcttctgaagagacgtggtaagtgcggtgcagttttcaactgacctctggacgcagaacttcagccatgaaggtaacaggcatctttcttctcagtgccttggccctgttgagtctatctggtaacactggagctgactccctgggaagagaggccaaatgttacaatgaacttaatggatgcaccaagatatatgaccctgtctgtgggactgatggaaatacttatcccaatgaatgcgtgttatgttttgaaaatcggaaacgccagacttctatcctcattcaaaaatctgggccttgctgagaaccaaggttttgaaatcccatcaggtcaccgcgaggcctgactggccttattgttgaataaatgtatctgaatatccaaaaaaaaaaaaaaaaaaanacaaaaanaaaaaaaaaaaaaaaaaaaaaaaaaaaaaaaacaaaaaaaaaaaaaaagaaaaaaaaaaaaaagaaaangnggggggggcgcgccgcacgaaagaatatcccccgccgcgaggggcgccccaaagacgacgagcagccacccgcaggtttgggacgaacaaggggggccccaaaaagagggaggctgcgtacatatcataccgagaaggggccccgcggcgcccggcgcggatataaaacaacagcgccagagagtgaggggggacaacacagcgcggcgaagccgcgggagacaccctgggggcgaaggaaacacccaccaatacaggggggggggggggggcacacatcggggggggaacacaacaagccca

SEQ ID NO: 303491 - DNA, 1401 bp, Homo sapiens
  misc_feature (25)..(25): n is a, c, g, or t
  misc_feature (1096)..(1096): n is a, c, g, or t
  misc_feature (1098)..(1098): n is a, c, g, or t
attcgcggccgcgtcgacttttttnaggtgttattattattttaatttccagatgaatacacagaagcacagcaaaagtggctccaacaagcaccctctagctccagaatacacgctttagggaactgagtcctctctctctcttgctttctctttccctctcatctgccactccatcagctactttaggttttgtgaatgagtgagggaaaaatagagaaaagagaaagaagaataagaaaggaagagtggaggaaaggaaaaaagaatggagaggttttaccctacttggaataaaattctttctagtagctatccatacctgctcatctatccagaactacagagtagaagggatctttgagttcatcttacaggtgagaaaacaggcttgagaagggaatgactttcccacaaccacagagggagttagggatcaaactaaccactagaactattttcctgacagaatctttgccttgcatgtttcaggcccacctggctcctttcacctttcttacacaggtgacattcccagaacctggaggccaggctatgacacagagtcaatcaataaccagggagatctgtgatatagcccagtaggtggggccttgctgccatctgccatatgacccttccagtcccaggcttctgaagagacgtggtaagtgcggtgcagttttcaactgacctctggacgcagaacttcagccatgaaggtaacaggcatctttcttctcagtgccttggccctgttgagtctatctggtaacactggagctgactccctgggaagagaggccaaatgttacaatgaacttaatggatgcaccaagatatatgaccctgtctgtgggactgatggaaatacttatcccaatgaatgcgtgttatgttttgaaaatcggaaacgccagacttctatcctcattcaaaaatctgggccttgctgagaaccaaggttttgaaatcccatcaggtcaccgcgaggcctgactggccttattgttgaataaatgtatctgaatatccaaaaaaaaaaaaaaaaaaaaaaaacaaaaaaaaaaaaaaagaaaaaaaaaaaaaagaaaangnggggggggcgcgccgcacgaaagaatatcccccgccgcgaggggcgccccaaagacgacgagcagccacccgcaggtttgggacgaacaaggggggccccaaaaagagggaggctgcgtacatatcataccgagaaggggccccgcggcgcccggcgcggatataaaacaacagcgccagagagtgaggggggacaacacagcgcggcgaagccgcgggagacaccctgggggcgaaggaaacacccaccaatacaggggggggggggggggcacacatcggggggggaacacaacaagccca

SEQ ID NO: 303492 - DNA, 1383 bp, Homo sapiens
  misc_feature (25)..(25): n is a, c, g, or t
attcgcggccgcgtcgacttttttnaggtgttattattattttaatttccagatgaatacacagaagcacagcaaaagtggctccaacaagcaccctctagctccagaatacacgctttagggaactgagtcctctctctctcttgctttctctttccctctcatctgccactccatcagctactttaggttttgtgaatgagtgagggaaaaatagagaaaagagaaagaagaataagaaaggaagagtggaggaaaggaaaaaagaatggagaggttttaccctacttggaataaaattctttctagtagctatccatacctgctcatctatccagaactacagagtagaagggatctttgagttcatcttacaggtgagaaaacaggcttgagaagggaatgactttcccacaaccacagagggagttagggatcaaactaaccactagaactattttcctgacagaatctttgccttgcatgtttcaggcccacctggctcctttcacctttcttacacaggtgacattcccagaacctggaggccaggctatgacacagagtcaatcaataaccagggagatctgtgatatagcccagtaggtggggccttgctgccatctgccatatgacccttccagtcccaggcttctgaagagacgtggtaagtgcggtgcagttttcaactgacctctggacgcagaacttcagccatgaaggtaacaggcatctttcttctcagtgccttggccctgttgagtctatctggtaacactggagctgactccctgggaagagaggccaaatgttacaatgaacttaatggatgcaccaagatatatgaccctgtctgtgggactgatggaaatacttatcccaatgaatgcgtgttatgttttgaaaatcggaaacgccagacttctatcctcattcaaaaatctgggccttgctgagaaccaaggttttgaaatcccatcaggtcaccgcgaggcctgactggccttattgttgaataaatgtatctgaatatccaaaaaaaaaaaagaaaaaaaaaaaaaagggggggccgcccaaaatttccccccgggggcgcccagtttgggttccccaggttttcttgggacaaggggggccccataatagggggggagcgcgcgatattaaaataacgccataggcacagcgggcccgcccgtgttacaccaaccgtccgctgaagcggggaaaacagcggccacgccgtgggggacctcttgggggaagggacccctaacttgcgggggggggcacactatggggggacaacacataccatagcagagaatttaaaagccccaagggcacatctataacacttctacaagggggctacacaggcgc

SEQ ID NO: 303493 - DNA, 1419 bp, Homo sapiens
ctgcagaatgttggccccaatcctgtggtccagatcatttacagtgacaaatttagagatgtttatgattacttccgagctgtcctgcagcgtgatgaaagaagtgaacgagcttttaagctaacccgggatgctattgagttaaatgcagccaattatacagtgtggcatttccggagagttcttttgaagtcacttcagaaggatctacatgaggaaatgaactacatcactgcaataattgaggagcagcccaaaaactatcaagtttggcatcataggcgagtattagtggaatggctaagagatccatctcaggagcttgaatttattgctgatattcttaatcaggatgcaaagaattatcatgcctggcagcatcgacaatgggttattcaggaatttaaactttgggataatgagctgcagtatgtggaccaacttctgaaagaggatgtgagaaataactctgtctggaaccaaagatacttcgttatttctaacaccactggctacaatgatcgtgctgtattggagagagaagtccaatacactctggaaatgattaaactagtaccacataatgaaagtgcatggaactatttgaaagggattttgcaggatcgtggtctttccaaatatcctaatctgttaaatcaattacttgatttacaaccaagtcatagttccccctacctaattgcctttcttgtggatatctatgaagacatgctagaaaatcagtgtgacaataaggaagacattcttaataaagcattagagttatgtgaaatcctagctaaagaaaaggacactataagaaaggaatattggagatacattggaagatcccttcaaagcaaacacagcacagaaaatgactcaccaacaaatgtacagcaataacaccatccagaagaacttgatggaatgcttttattttttattaagggaccctgcaggagtttcacacgagagtggtccttccctttgcctgtggtgtaaaagtgcatcacacaggtattgctttttaacaagaactgatgctccttgggtgctgctgctactcagactagctctaagtaatgtgattcttctaaagcaaagtcattggatgggaggaggaagaaaaagtcccataaaggaacttttgtagtcttatcaacatataatctaatcccttagcatcagctcctccctcagtggtacatgcgtcaagatttgtagcagtaataactgcaggtcacttgtatgtaatggatgtgaggtagccgaagtttggttcagtaagcagggaatacagtcgttccatcagagctggtctgcacactcacattatcttgctatcactgtaaccaactaatgccaaaagaacggttttgtaataaaattatagctgtatctaaaaacaaaaacaaa

SEQ ID NO: 303494 - DNA, 1592 bp, Homo sapiens
ctgcagaatgttggccccaatcctgtggtccagatcatttacagtgacaaatttagagatgtttatgattacttccgagctgtcctgcagcgtgatgaaagaagtgaacgagcttttaagctaacccgggatgctattgagttaaatgcagccaattatacagtgtggcatttccggagagttcttttgaagtcacttcagaaggatctacatgaggaaatgaactacatcactgcaataattgaggagcagcccaaaaactatcaagtttggcatcataggcgagtattagtggaatggctaagagatccatctcaggagcttgaatttattgctgatattcttaatcaggatgcaaagaattatcatgcctggcagcatcgacaatgggttattcaggaatttaaactttgggataatgagctgcagtatgtggaccaacttctgaaagaggatgtgagaaataactctgtctggaaccaaagatacttcgttatttctaacaccactggctacaatgatcgtgctgtattggagagagaagtccaatacactctggaaatgattaaactagtaccacataatgaaagtgcatggaactatttgaaagggattttgcaggatcgtggtctttccaaatatcctaatctgttaaatcaattacttgatttacaaccaagtcatagttccccctacctaattgcctttcttgtggatatctatgaagacatgctagaaaatcagtgtgacaataaggaagacattcttaataaagcattagagttatgtgaaatcctagctaaagaaaaggacactataagaaaggaatattggagatacattggaagatcccttcaaagcaaacacagcacagaaaatgactcaccaacaaatgtacagcaataacaccatccagaagaacttgatggaatgcttttattttttattaagggaccctgcaggagtttcacacgagagtggtccttccctttgcctgtggtgtaaaagtgcatcacacaggtattgctttttaacaagaactgatgctccttgggtgctgctgctactcagactagctctaagtaatgtgattcttctaaagcaaagtcattggatgggaggaggaagaaaaagtcccataaaggaacttttgtagtcttatcaacatataatctaatcccttagcatcagctcctccctcagtggtacatgcgtcaagatttgtagcagtaataactgcaggtcacttgtatgtaatggatgtgaggtagccgaagtttggttcagtaagcagggaatacagtcgttccatcagagctggtctgcacactcacattatcttgctatcactgtaaccaactaatgccaaaagaacggttttgtaataaaattatagctgtatctaaaaacaaaaacaaaaagggggggggttaaaatatcttgagggcaagtttagcgtacaggtttggaaaaggggccaaggggggataaaagaagaaggggggttaaagtggatggaaacgtatggatttggagactttgggggaatggaactagattagcggaaaaaggaagaagatatgggaagagaa

SEQ ID NO: 303495 - DNA, 1313 bp, Homo sapiens
ctgcagaatgttggccccaatcctgtggtccagatcatttacagtgacaaatttagagatgtttatgattacttccgagctgtcctgcagcgtgatgaaagaagtgaacgagcttttaagctaacccgggatgctattgagttaaatgcagccaattatacagtgtggcatttccggagagttcttttgaagtcacttcagaaggatctacatgaggaaatgaactacatcactgcaataattgaggagcagcccaaaaactatcaagtttggcatcataggcgagtattagtggaatggctaagagatccatctcaggagcttgaatttattgctgatattcttaatcaggatgcaaagaattatcatgcctggcagcatcgacaatgggttattcaggaatttaaactttgggataatgagctgcagtatgtggaccaacttctgaaagaggatgtgagaaataactctgtctggaaccaaagatacttcgttatttctaacaccactggctacaatgatcgtgctgtattggagagagaagtccaatacactctggaaatgattaaactagtaccacataatgaaagtgcatggaactatttgaaagggattttgcaggatcgtggtctttccaaatatcctaatctgttaaatcaattacttgatttacaaccaagtcatagttccccctacctaattgcctttcttgtggatatctatgaagacatgctagaaaatcagtgtgacaataaggaagacattcttaataaagcattagagttatgtgaaatcctagctaaagaaaaggacactataagaaaggaatattggagatacattggaagatcccttcaaagcaaacacagcacagaaaatgactcaccaacaaatgtacagcaataacaccatccagaagaacttgatggaatgcttttattttttattaagggaccctgcaggagtttcacacgagagtggtccttccctttgcctgtggtgtaaaagtgcatcacacaggtattgctttttaacaagaactgatgctccttgggtgctgctgctactcagactagctctaagtaatgtgattcttctaaagcaaagtcattggatgggaggaggaagaaaaagtcccataaaggaacttttgtagtcttatcaacatataatctattcagtaagcagggaatacagtcgttccatcagagctggtctgcacactcacattatcttgctatcactgtaaccaactaatgccaaaagaacggttttgtaataaaattatagctgtatctaaaaacaaaaacaaa

SEQ ID NO: 303496 - DNA, 1549 bp, Homo sapiens
ctgcagaatgttggccccaatcctgtggtccagatcatttacagtgacaaatttagagatgtttatgattacttccgagctgtcctgcagcgtgatgaaagaagtgaacgagcttttaagctaacccgggatgctattgagttaaatgcagccaattatacagtgtggcatttccggagagttcttttgaagtcacttcagaaggatctacatgaggaaatgaactacatcactgcaataattgaggagcagcccaaaaactatcaagtttggcatcataggcgagtattagtggaatggctaagagatccatctcaggagcttgaatttattgctgatattcttaatcaggatgcaaagaattatcatgcctggcagcatcgacaatgggttattcaggaatttaaactttgggataatgagctgcagtatgtggaccaacttctgaaagaggatgtgagaaataactctgtctggaaccaaagatacttcgttatttctaacaccactggctacaatgatcgtgctgtattggagagagaagtccaatacactctggaaatgattaaactagtaccacataatgaaagtgcatggaactatttgaaagggattttgcaggatcgtggtctttccaaatatcctaatctgttaaatcaattacttgatttacaaccaagtcatagttccccctacctaattgcctttcttgtggatatctatgaagacatgctagaaaatcagtgtgacaataaggaagacattcttaataaagcattagagttatgtgaaatcctagctaaagaaaaggacactataagaaaggaatattggagatacattggaagatcccttcaaagcaaacacagcacagaaaatgactcaccaacaaatgtacagcaataacaccatccagaagaacttgatggaatgcttttattttttattaagggaccctgcaggagtttcacacgagagtggtccttccctttgcctgtggtgtaaaagtgcatcacacaggtattgctttttaacaagaactgatgctccttgggtgctgctgctactcagactagctctaagtaatgtgattcttctaaagcaaagtcattggatgggaggaggaagaaaaaatcccttagcatcagctcctccctcagtggtacatgcgtcaagatttgtagcagtaataactgcaggtcacttgtatgtaatggatgtgaggtagccgaagtttggttcagtaagcagggaatacagtcgttccatcagagctggtctgcacactcacattatcttgctatcactgtaaccaactaatgccaaaagaacggttttgtaataaaattatagctgtatctaaaaacaaaaacaaaaagggggggggttaaaatatcttgagggcaagtttagcgtacaggtttggaaaaggggccaaggggggataaaagaagaaggggggttaaagtggatggaaacgtatggatttggagactttgggggaatggaactagattagcggaaaaaggaagaagatatgggaagagaa

SEQ ID NO: 303497 - DNA, 977 bp, Homo sapiens
gcttaggatttattttccttttaagatgggtaaaagaagtatttaaaatgtgaagagtagctgtaggtatctagaatttacagtttgttaaattttttttaactctatacactctggaaatgattaaactagtaccacataatgaaagtgcatggaactatttgaaagggattttgcaggatcgtggtctttccaaatatcctaatctgttaaatcaattacttgatttacaaccaagtcatagttccccctacctaattgcctttcttgtggatatctatgaagacatgctagaaaatcagtgtgacaataaggaagacattcttaataaagcattagagttatgtgaaatcctagctaaagaaaaggacactataagaaaggaatattggagatacattggaagatcccttcaaagcaaacacagcacagaaaatgactcaccaacaaatgtacagcaataacaccatccagaagaacttgatggaatgcttttattttttattaagggaccctgcaggagtttcacacgagagtggtccttccctttgcctgtggtgtaaaagtgcatcacacaggtattgctttttaacaagaactgatgctccttgggtgctgctgctactcagactagctctaagtaatgtgattcttctaaagcaaagtcattggatgggaggaggaagaaaaagtcccataaaggaacttttgtagtcttatcaacatataatctaatcccttagcatcagctcctccctcagtggtacatgcgtcaagatttgtagcagtaataactgcaggtcacttgtatgtaatggatgtgaggtagccgaagtttggttcagtaagcagggaatacagtcgttccatcagagctggtctgcacactcacattatcttgctatcactgtaaccaactaatgccaaaagaacggttttgtaataaaattatagctgtatctaaaaacaaaaacaaa

SEQ ID NO: 303498 - DNA, 889 bp, Homo sapiens
gggtttattttctcttgatctttctactgctttgttcttccttcacaaaatcaagtctttgttttttgttgttgtttacaggattttgcaggatcgtggtctttccaaatatcctaatctgttaaatcaattacttgatttacaaccaagtcatagttccccctacctaattgcctttcttgtggatatctatgaagacatgctagaaaatcagtgtgacaataaggaagacattcttaataaagcattagagttatgtgaaatcctagctaaagaaaaggacactataagaaaggaatattggagatacattggaagatcccttcaaagcaaacacagcacagaaaatgactcaccaacaaatgtacagcaataacaccatccagaagaacttgatggaatgcttttattttttattaagggaccctgcaggagtttcacacgagagtggtccttccctttgcctgtggtgtaaaagtgcatcacacaggtattgctttttaacaagaactgatgctccttgggtgctgctgctactcagactagctctaagtaatgtgattcttctaaagcaaagtcattggatgggaggaggaagaaaaagtcccataaaggaacttttgtagtcttatcaacatataatctaatcccttagcatcagctcctccctcagtggtacatgcgtcaagatttgtagcagtaataactgcaggtcacttgtatgtaatggatgtgaggtagccgaagtttggttcagtaagcagggaatacagtcgttccatcagagctggtctgcacactcacattatcttgctatcactgtaaccaactaatgccaaaagaacggttttgtaataaaattatagctgtatctaaaaacaaaaacaaa

SEQ ID NO: 303499 - DNA, 718 bp, Homo sapiens
gtgggaggcggcggccgcctggggaccagctccgcgcctcggcctctccgccccctccccagcctttctctcgccctcttctcccacactcccggccggcgcctcggctttgtgcgaggagatggtgtagccccctggccgccgaaggaggagccggacacttgtctcccgtctccgagctgctccccacccctggaggagagacccccccctcggctcggcgccttctgcgtctcccggctggtggggaagcctctgcgccgccggcaccatgagtgaacagagtatctgtcaggcaagagctgctgtgatggtttatgatgatgccaataagaagtgggtgccagctggtggctcaactggattcagcagagttcatatctatcaccatacaggcaacaacacattcagagtggtgggcaggaagattcaggaccatcaggtaaggctttactacaattgttgttaaaaatgatttagtattacaaaaggacttggcatattccgtaaaataaagtagttttaaaactgtaatcaaaatagtctctctctgggaaaaactgaatataaaattgtctctccaccctttctaccttttatgaagcctgaacttaaacgaagatttagaacaagttgtacaaaaatagaaatacaagttcttttatgatgaattttcattagattttctggccttcaattagtttttgaaatctaaagc

SEQ ID NO: 303500 - DNA, 544 bp, Homo sapiens
gctttaaactatgactggattataacgtttgggaagttggtgcattcatctgtggttattaagaccttacagatcttgtattcaagatgggaaaactagtcctttacatgcctcctgagaagagttaattttgtatacttttatatacttactgtgcctacaacctatataaaaagtagccattgtgtaatgatttttaaaattttctgtaactggtatcttcacataactaaaagtaatcttaaaatatcttttattggggaaaaattggttattttaaggttaatagactcaattcttgttttgtttgctattaacaacctataaaacagtaacataatgagaattattttttaaagttctattgtgtatccctttcaatggttttccccttcatagacgggattctccaaggaaaaatcagattgtttttgacaacaggtcctatgattcattacacaggtatcatcctgctgtgacgttgtgatttgagacttttaaataacatgttcaggatagggctgagctttttctacctggattg

SEQ ID NO: 303501 - DNA, 829 bp, Homo sapiens
tattagataaaaggaaacttatttcatccccttctgaatctcaaaatgtatttacaagttaaaatattcttgggtgaaaatagttatttgcgtttgtgcctaattctctgatactaactgtagtctacatttatacattgtgtctgaatgctggttttgtggcttcactagctccctttttctctctccttttttatcctgtcttttgctgctgctttccaccttctgtccagctccatcttcagacagctccctgtataacgctccacttcctgagtattccagttgccagcctccttcagcacctcctccatcatacgctaaagtcatctcagctccagtgtcagatgccactcctgattatgctgtagtgactgctttgccacctacttccacaccccctacaccaccactgcgacactcagcgacacgttttgcaacatctttaggttcagccttccaccctgttcttccccattacgctacagttcctcgtcctctgaacaaaaactctcgaccttcttctcctgtgaacacaccctcttctcagcctccagctacgaagccctgtgcctggtctacttccaatttttcgcccctccctccatctcctccaataatgattagcagccccccaggcaaagctactggtccaaggcctgtcctccctgtttgtgtttcttctcctgtgccccaaatgcctccatcaccgacagcacccaatgggctggttgctctgtaacatatccagtgtctccaccgcctacctcagggccagcagctcctccgccgccgcctccactgccttccctcgcatcactctcacact

SEQ ID NO: 303502 - DNA, 414 bp, Homo sapiens
ttaaaacaaaattcaccaaggctagtcttccaagaaatagaattgtggctctggaaacaaaaaaaactacacatcatatttcatgacattcttaaaattttatgagtaagaatctctttagtggtaattttgttctgtatttctggtatttttctctaatattttaggacattttagatgaaatgagaaaagaattaacaaagctaaaagaagagctcattgatggtaagtgtctggacaaatttactattcctataaaacaatgtttaagattgaccatttttaagaaaatgcaaataaggaaatacccagctgattagttgagggcaatgacttccatagtcctgcccttttaggattagggtttaggggaggaggtttctccttcatataatggaaattaagcctttgcaa

SEQ ID NO: 303503 - DNA, 446 bp, Homo sapiens
gtgggaggcggcggccgcctggggaccagctccgcgcctcggcctctccgccccctccccagcctttctctcgccctcttctcccacactcccggccggcgcctcggctttgtgcgaggagatggtgtagccccctggccgccgaaggaggagccggacacttgtctcccgtctccgagctgctccccacccctggaggagagacccccccctcggctcggcgccttctgcgtctcccggctggtggggaagcctctgcgccgccggcaccatgaggtgaggggcgcgcggggcgggggccgggcgggccattgtgccgcgggagccgcgacccccgttctcctcggaccccgccttccctctcccggcccggcgcgtctcccctggtctccggtctgttcctcccccctccgccttttgtcccttccaatttctctttctttctt

SEQ ID NO: 303504 - DNA, 385 bp, Homo sapiens
  misc_feature (365)..(365): n is a, c, g, or t
  misc_feature (367)..(367): n is a, c, g, or t
ccaccgccccctcctccccctcctctccctaatcaagtaccccctcctcctccaccacctcctgccccacccctccctgcatctggattctttttggcatccatgtcagaagacaatcgccctttaactggacttgcagctgcaattgccggagcaaaacttaggaaagtgtcacggatggaggatacctctttcccaagtggagggaatgctattggtgtgaactccgcctcatctaaaacagatacaggccgtggaaatggaccccttcctttagggggtagtggtttaatggaagaaatgagtgccctgctggccaggaggagaaggaattttcttgaaaaggggttcaccattgggaaccngnccaaaagggggccaaggt

SEQ ID NO: 303505 - DNA, 307 bp, Homo sapiens
gtgggaggcggcggccgcctggggaccagctccgcgcctcggcctctccgccccctccccagcctttctctcgccctcttctcccacactcccggccggcgcctcggctttgtgcgaggagatggtgtagccccctggccgccgaaggaggagccggacacttgtctcccgtctccgagctgctccccacccctggaggagagacccccccctcggctcggcgccttctgcgtctcccggctggtggggaagcctctgcgccgccggcaccatgagacagagtctgactgttgcccaggctggagtg

SEQ ID NO: 303506 - DNA, 7568 bp, Homo sapiens
ccaccgccccctcctccccctcctctccctaatcaagtaccccctcctcctccaccacctcctgccccacccctccctgcatctggattctttttggcatccatgtcagaagacaatcgccctttaactggacttgcagctgcaattgccggagcaaaacttaggaaagtgtcacggatggaggatacctctttcccaagtggagggaatgctattggtgtgaactccgcctcatctaaaacagatacaggccgtggaaatggaccccttcctttagggggtagtggtttaatggaagaaatgagtgccctgctggccaggaggagaagaattgctgaaaagggatcaacaatagaaacagaacaaaaagaggacaaaggtgaagattcagagcctgtaacttctaaggcctcttcaacaagtacacctgaaccaacaagaaaaccttgggaaagaacaaatacaatgaatggcagcaagtcacctgttatctccagaccaaaatccacacccttatcacagcccagtgccaatggagtccagacggaaggacttgactatgacaggctgaagcaggacattttagatgaaatgagaaaagaattaacaaagctaaaagaagagctcattgatgcaatcaggcaggaactgagcaagtcaaatactgcatagaggaacagactaaggagagataggactttaatctggaggaaaaatatcctacaaacaacaactgttcacaacagcaaacccctacatttatgagctgtaagaagaaaatggagacaaacagaaggagggaaaaaccaacctactctgaaagccttcagacattatgactctggtgataagctctttccctctccgtttgctgcttttttctggcctttacaacagaatggaagagaatcatttaagagttcctgtaacagttatgcagaaaatactaaaacccatcaggcaagatcaccacgcattgaaatattttcatatcaagataaagtcgcacattttccacaatacattgctaaaataaagaggagaaaggcttaggaagtttttttgcagagagtgctggtaaagaattgagcaagtttgctattgtattgtaatgtttctctcaggtttgttcttcctatcatgtttgatattccatgaataattgagatcagccctatgtaagttaagatcataatatgtggaacaaatggaattgtaagtgctttcaaagggtaatatttataagaaagtgtccgaaaaatgtttcttcagcttgagaaattttagaatgataggaagtttctcgagttagccttcatgcaattttgtagattaaaacataaaatttgtccagaacttaaagatttagatgccttcctaaattgttacaatgctttaccaaatctatgacttctacataacacaaaccagtggtcaaatgtaaacactatattgtagatttactgtaggttttcaaccttttttagatttatgcatgtggacatttttataatgtaattacaatcaccacaaggttagcttttttaattgcagacagtaatgcatgtcacactaatatgtagtggccttttcaaggcctagtcccagggaaaacattttgtagagtataggggagtgggaggaaggggaggaataattttttatttaaagttgatttctgcactatctttttctcagttacctgcatgaataaataatgagaaatattttgtgactttaattggtaaatatgttacaaaaccaagtacttaatcttttacatcatgtcttcagctatttgtattttaaccagtaatttcaatggtctgaaacatgattctgagcttcacataatatcttaactgtggaactcaaaagtttgatcactgaatttggcagttattattacctaggtacccccgctgttacacaggtgtttagatacgtgttcctgaatgaagctgcttttgaattttgttatgttgaaatgcaagaaataacaatgatggcagcaattaaggtcacagaaatcattaggtaaaggaaaaccaatgaggagttctgcagttttcttttaataagtaaagtgagacttgggtggtgggaagaaggaaggtgggaagaaggaattagacactctgcctgccactctgcgtgtgtgtgctctcgcgcacgtgctgtctatatggaagccactcccttttctttcctttgaaactggtaaggttaaaataggggagaaatcctacatgttggaatgatagctttttggaaaatttaagaaactctccaggctctccatcttgatttatgcttgagttgttatgtgccatatttgctttgaactctgattatcagaagttttactaaaactttgaaataattcactttcatctgctttctagattttgtacatctcagtccataaagcaaagcttgttgatagtgtagttttctaaacgctgcaaatttgcagcctttaccactacaaagaagtttggatgagggattttttttttctttgtcaaaatagttcctgtttctgtagaaatttcatttttagattaaactgtgatggatgagctatcataattcaagtatacatttcttttttctatcagatattcattgtcatgcagtagtagtaaaaacatcaaagatgcagcaagcttattaagtattattttctaaaagaaataggaggcattttcatctttattattgtacttttggttatgcaaacactttgataatataaacagttatgtcccctataaatctggtcagcaacctcttttgattttgttgggtaagttaaatagtctgtagtaggtagagtactgggtacaagtggtccaaactaagataagagactaaaataaaatgctaaatcttaaaagaaactgggtttatgcactaaacgttttgtgccttggtctaatattaacatgatgtatgtgtaaactgacaaaaaaaaaaaaaaaaaaaaaaaccagtgttgaatcatgctatatttcccatcatcccagattgctaaatgttctttccaagaagtctgaatgaattattatatacatttgctatcatacatgacagttgtgtcattattagagatttcagtaattaaaatgggaaacagaagcctaagttatttaccttatcaaaaccacgttccttggaaccacattattatgatggtttttgtgctcttgtacgttggatgtcttaagctgagtacagtttaggggatcctttctaatgacaggaaggcactgctttcctcaacactgtgatctgacctgtgacaagtctgtactatccactatgtaaatggctcacaagtcaattgcaaacaaactgaatgtacaaatcttagtgctggtgctgaaatctcttcagaatagtcatcatgatttaaaagtttgtttaaaaatttgcaagcatcaagtgtcaatcaaaactgaagatgaaacactaatgaatgttgaattctcatgcttttaggtgtacttcctttttagaattttcagttttctgctatttttaccgtaactatttcgtttaaatttgtttcatttaagtttcctacatgctaacttcgtttgtgcgattgaaataaaattgcagtatatatatgttgcttgtttgtgacacttagataatcttctgaaataatttgttttaaagtaagttatattggatgtgaaaaacaccttttaaagtccaagactttactacttaaaagtttacatgtcacgtcactattctttacagatttcatagaagtcgtgaatactaagtaatgtatacaaaagaaatatgtgatgatgtgtctactttttgtttgaaataactgttgggtgttccctcttcttattttctctctgcccaccttgacacagtaacttcctcttatagtcaagatgatgattaagtgtttaatttttattccattttgttctgcaacacgttcagatacttaaaactcattcatgcagttagaattatcctttatgtagtttgcatggtaaaggacattgtgtggtaaagggcattattgagtaatgaattttaagtatagcaaaatatgtatagtgtttatacatgatgctgatttcttaaaacctacatataagcagtagtactttttctctattataaagtattaattttgagttccattttataattctgatgtcttcattagaaatacaaaaatacaatccttgtattttttctttgaccagacccaaattttccccttcccccctccattctcctctccacttctcgtggaccgcgtgttcccaatattcattaacatttgcagccattacagagttacagttgtaaaattttcagctgtttttttttttttttttttgctctagcctgtctcatgttcttgcttctcttcatatgtaagtcagtatttttgtctacaaattaaaagtcacttgtcattcaaaaatgagttaagtaacatgataatcttttaaatttacctagctacaacttttatgtctcttgtaaatttatatatactttcagtgccattgtgaagaattggccttttaattctaagtagtattaccctatgaagcacagtgtgcaaaggtatgctacaaggtctctttaattcctgtgtggccattataattttataacaccattaccctttaaattctaccgattataagcagcgtaaaagtaactatataaagcaaacatcgcaaaggaactctgcaggagctcttaattcctttatgtagctatcataaaattcactttcctgaagacatttactctcattcacttccaaactccaaacctttttctggtagcaccacttttgtttttaatagaaagatgagttcatatctgtacatctctccaaagctctaaggaatgagaaaaggatcctagtatattgaaattactgatgtttaatacctctgccttttcactaaaagccatttaatatttttaaagtcaaaacttgacatacaggtatttataaggaatctccatgactctgaaggaatgaaattgatgtaggtagctttggctatgtaaagacatagtagaggacaattacttaaagaagagttttcttttgaggatttgtagatttgactaagcagctgaagtcagtaacccctcaagaaaggccgtttatagaagccaagaactgttggaggtctgtgatgcaggtttttctgttcccaacatcaaaagctgtggattatttggtgtgttcccctttatgttatctctcgataatttttgagacatcaagattttttaaaatatcaatactggaaagatgaaaccttcaaattaaaacctaaaattgattagaaagaaaagtaaaatattaatgcagtaaatttaggatggttacagatactcaccatcaacataaataaatggagttctaggataaattatttgtggaatactaatggtcaagtcacataagagtaaaatcttttggtgaggagacacatttgacaactgctaaagaattaactaaatttgtctttctaaatagttttctttataaagtaacagaaacattgtaaaaggataaataaatgactgtcataatgacttaggatgttgtaagaatgtctgccacatttattggttatttctgttgaaatctgaaggaatcgatacatctgaaaattgagaaagggaaataggactgtccccgttacagatactctgtgatgcacacaaccttctaaacggaagtgttagtatcatttaaagcacatagtaggccttgagtatttgcagattaacatgcagaaaaaatcaaagatgaagccccaattaagtgtttgaaccaaagaatcacagtcactgagctgcacccccgttctgtgaagcatgttaaatactcataaagagcagagagcagggcccgtagacgcttctggtgtaggacacaggaattctaggcagagggagaaaattaggggccccagttggtggctgagagtaaaaagaatataccatttgagtagtgctgttctttttcctcagtttttaaagacatataattcctagtagttaggacatctaaatagctcggtaaactggtcagaggcgggaggattgcttgaggccagaagttttgagatcagcctgggcaacatagcgaggcctgtctccttaaaaaataaataaataaataataaataaataaataaataaaaaccttgtccttgactattgtgctgtctgctgcccctttgtagggatggggttggggtcagaataagcatgtgcatgaatggcggaaagctttggtggtgtttgtttgtttgtttgttttttgagaggtgggggagtcagcagtgaacctttctggttaaagaacaacgtacataatttctattatgagatttagaaggttaaatacttttttttttcaggcctaccaagttgatagaccaaaagtatatagtagaacagcacagtagaaaaaatttaaaagtgaatttcttatggtccaaaaggatggatagtcacagtccataacctttcataatatatgctggaattggaatctcttgtcatcttgctttgctctgaattttagaactagaagtgtgcatgtatgtcaaaagattatgcagagctattttctttgctaacaatgtaaacatttgcaccccatgaatgggactttataatctggaagtgagcctaaggttgcgtatactgaagtcatgttttaaaagttaaggttgacttaaacatatacaaggctgtattttaattgtaactagaaatcatttactatgcatacagaacctcatgtatcttatcatggaatttgtgaattaatgggcccttgccgaacttcaagggtaagggaaactggtaacaacttgttttaaatcaacatactataagctcctgcttgcttgactcaagttgtttgaaaatctgaattaaacaggatctcattgtcaggaaacatcttctaagcttgacatctacgtttaagaagggaacgtggaagagaaggtgagacatgaaactaaaacagctgggagggtaggatcagactgcacctgatttttggaccaaagtttcatataggaataaataaaaaggaggaccacttgtgagccaacctaggaaggacttgccagaaagtagcagctcctgctgcaaaatacagtgccttcaaaatgattctctgtgtgaattgcatgcaatttcatgtaaccataaagtgtaacctgtatgtgcatgacatgtgtctagaatgtgtaaagttaggattcagcaggaaggggcctggccctgtcactgtggtggatcagtggacctgctgaagtcactggactcatgtgacttaggtttgcagcatcagacccctgtgtttgcattaagtggccacatcgttgaaatcggatcaatctctccctcagctttctttcctactttgcagctttgctggttttaactgcttcattcttctgcttcttggtatccttttttcttttgaaataaaaacatgaaatacttaattcaaaaaaaaaatg

SEQ ID NO: 303507 - DNA, 6352 bp, Homo sapiens
ccaccgccccctcctccccctcctctccctaatcaagtaccccctcctcctccaccacctcctgccccacccctccctgcatctggattctttttggcatccatgtcagaagacaatcgccctttaactggacttgcagctgcaattgccggagcaaaacttaggaaagtgtcacggatggaggatacctctttcccaagtggagggaatgctattggtgtgaactccgcctcatctaaaacagatacaggccgtggaaatggaccccttcctttagggggtagtggtttaatggaagaaatgagtgccctgctggccaggaggagaagaattgctgaaaagggatcaacaatagaaacagaacaaaaagaggacaaaggtgaagattcagagcctgtaacttctaaggcctcttcaacaagtacacctgaaccaacaagaaaaccttgggaaagaacaaatacaatgaatggcagcaagtcacctgttatctccagaccaaaatccacacccttatcacagcccagtgccaatggagtccagacggaaggacttgactatgacaggctgaagcaggacattttagatgaaatgagaaaagaattaacaaagctaaaagaagagctcattgatgcaatcaggcaggaactgagcaagtcaaatactgcatagaggaacagactaaggagagataggactttaatctggaggaaaaatatcctacaaacaacaactgttcacaacagcaaacccctacatttatgagctgtaagaagaaaatggagacaaacagaaggagggaaaaaccaacctactctgaaagccttcagacattatgactctggtgataagctctttccctctccgtttgctgcttttttctggcctttacaacagaatggaagagaatcatttaagagttcctgtaacagttatgcagaaaatactaaaacccatcaggcaagatcaccacgcattgaaatattttcatatcaagataaagtcgcacattttccacaatacattgctaaaataaagaggagaaaggcttaggaagtttttttgcagagagtgctggtaaagaattgagcaagtttgctattgtattgtaatgtttctctcaggtttgttcttcctatcatgtttgatattccatgaataattgagatcagccctatgtaagttaagatcataatatgtggaacaaatggaattgtaagtgctttcaaagggtaatatttataagaaagtgtccgaaaaatgtttcttcagcttgagaaattttagaatgataggaagtttctcgagttagccttcatgcaattttgtagattaaaacataaaatttgtccagaacttaaagatttagatgccttcctaaattgttacaatgctttaccaaatctatgacttctacataacacaaaccagtggtcaaatgtaaacactatattgtagatttactgtaggttttcaaccttttttagatttatgcatgtggacatttttataatgtaattacaatcaccacaaggttagcttttttaattgcagacagtaatgcatgtcacactaatatgtagtggccttttcaaggcctagtcccagggaaaacattttgtagagtataggggagtgggaggaaggggaggaataattttttatttaaagttgatttctgcactatctttttctcagttacctgcatgaataaataatgagaaatattttgtgactttaattggtaaatatgttacaaaaccaagtacttaatcttttacatcatgtcttcagctatttgtattttaaccagtaatttcaatggtctgaaacatgattctgagcttcacataatatcttaactgtggaactcaaaagtttgatcactgaatttggcagttattattacctaggtacccccgctgttacacaggtgtttagatacgtgttcctgaatgaagctgcttttgaattttgttatgttgaaatgcaagaaataacaatgatggcagcaattaaggtcacagaaatcattaggtaaaggaaaaccaatgaggagttctgcagttttcttttaataagtaaagtgagacttgggtggtgggaagaaggaaggtgggaagaaggaattagacactctgcctgccactctgcgtgtgtgtgctctcgcgcacgtgctgtctatatggaagccactcccttttctttcctttgaaactggtaaggttaaaataggggagaaatcctacatgttggaatgatagctttttggaaaatttaagaaactctccaggctctccatcttgatttatgcttgagttgttatgtgccatatttgctttgaactctgattatcagaagttttactaaaactttgaaataattcactttcatctgctttctagattttgtacatctcagtccataaagcaaagcttgttgatagtgtagttttctaaacgctgcaaatttgcagcctttaccactacaaagaagtttggatgagggattttttttttctttgtcaaaatagttcctgtttctgtagaaatttcatttttagattaaactgtgatggatgagctatcataattcaagtatacatttcttttttctatcagatattcattgtcatgcagtagtagtaaaaacatcaaagatgcagcaagcttattaagtattattttctaaaagaaataggaggcattttcatctttattattgtacttttggttatgcaaacactttgataatataaacagttatgtcccctataaatctggtcagcaacctcttttgattttgttgggtaagttaaatagtctgtagtaggtagagtactgggtacaagtggtccaaactaagataagagactaaaataaaatgctaaatcttaaaagaaactgggtttatgcactaaacgttttgtgccttggtctaatattaacatgatgtatgtgtaaactgacaaaaaaaaaaaaaaaaaaaaaaaccagtgttgaatcatgctatatttcccatcatcccagattgctaaatgttctttccaagaagtctgaatgaattattatatacatttgctatcatacatgacagttgtgtcattattagagatttcagtaattaaaatgggaaacagaagcctaagttatttaccttatcaaaaccacgttccttggaaccacattattatgatggtttttgtgctcttgtacgttggatgtcttaagctgagtacagtttaggggatcctttctaatgacaggaaggcactgctttcctcaacactgtgatctgacctgtgacaagtctgtactatccactatgtaaatggctcacaagtcaattgcaaacaaactgaatgtacaaatcttagtgctggtgctgaaatctcttcagaatagtcatcatgatttaaaagtttgtttaaaaatttgcaagcatcaagtgtcaatcaaaactgaagatgaaacactaatgaatgttgaattctcatgcttttaggtgtacttcctttttagaattttcagttttctgctatttttaccgtaactatttcgtttaaatttgtttcatttaagtttcctacatgctaacttcgtttgtgcgattgaaataaaattgcagtatatatatgttgcttgtttgtgacacttagataatcttctgaaataatttgttttaaagtaagttatattggatgtgaaaaacaccttttaaagtccaagactttactacttaaaagtttacatgtcacgtcactattctttacagatttcatagaagtcgtgaatactaagtaatgtatacaaaagaaatatgtgatgatgtgtctactttttgtttgaaataactgttgggtgttccctcttcttattttctctctgcccaccttgacacagtaacttcctcttatagtcaagatgatgattaagtgtttaatttttattccattttgttctgcaacacgttcagatacttaaaactcattcatgcagttagaattatcctttatgtagtttgcatggtaaaggacattgtgtggtaaagggcattattgagtaatgaattttaagtatagcaaaatatgtatagtgtttatacatgatgctgatttcttaaaacctacatataagcagtagtactttttctctattataaagtattaattttgagttccattttataattctgatgtcttcattagaaatacaaaaatacaatccttgtattttttctttgaccagacccaaattttccccttcccccctccattctcctctccacttctcgtggaccgcgtgttcccaatattcattaacatttgcagccattacagagttacagttgtaaaattttcagctgtttttttttttttttttttgctctagcctgtctcatgttcttgcttctcttcatatgtaagtcagtatttttgtctacaaattaaaagtcacttgtcattcaaaaatgagttaagtaacatgataatcttttaaatttacctagctacaacttttatgtctcttgtaaatttatatatactttcagtgccattgtgaagaattggccttttaattctaagtagtattaccctatgaagcacagtgtgcaaaggtatgctacaaggtctctttaattcctgtgtggccattataattttataacaccattaccctttaaattctaccgattataagcagcgtaaaagtaactatataaagcaaacatcgcaaaggaactctgcaggagctcttaattcctttatgtagctatcataaaattcactttcctgaagacatttactctcattcacttccaaactccaaacctttttctggtagcaccacttttgtttttaatagaaagatgagttcatatctgtacatctctccaaagctctaaggaatgagaaaaggatcctagtatattgaaattactgatgtttaatacctctgccttttcactaaaagccatttaatatttttaaagtcaaaacttgacatacaggtatttataaggaatctccatgactctgaaggaatgaaattgatgtaggtagctttggctatgtaaagacatagtagaggacaattacttaaagaagagttttcttttgaggatttgtagatttgactaagcagctgaagtcagtaacccctcaagaaaggccgtttatagaagccaagaactgttggaggtctgtgatgcaggtttttctgttcccaacatcaaaagctgtggattatttggtgtgttcccctttatgttatctctcgataatttttgagacatcaagattttttaaaatatcaatactggaaagatgaaaccttcaaattaaaacctaaaattgattagaaagaaaagtaaaatattaatgcagtaaatttaggatggttacagatactcaccatcaacataaataaatggagttctaggataaattatttgtggaatactaatggtcaagtcacataagagtaaaatcttttggtgaggagacacatttgacaactgctaaagaattaactaaatttgtctttctaaatagttttctttataaagtaacagaaacattgtaaaaggataaataaatgactgtcataatgacttaggatgttgtaagaatgtctgccacatttattggttatttctgttgaaatctgaaggaatcgatacatctgaaaattgagaaagggaaataggactgtccccgttacagatactctgtgatgcacacaaccttctaaacggaagtgttagtatcatttaaagcacatagtaggccttgagtatttgcagattaacatgcagaaaaaatcaaagatgaagccccaattaagtgtttgaaccaaagaatcacagtcactgagctgcacccccgttctgtgaagcatgttaaatactcataaagagcagagagcagggcccgtagacgcttctggtgtaggacacaggaattctaggcagagggagaaaattaggggccccagttggtggctgagagtaaaaagaatataccatttgagtagtgctgttctttttcctcagtttttaaagacatataattcctagtagttaggacatctaaatagctcggtaaactggtcagaggcgggaggattgcttgaggccagaagttttgagatcagcctgggtaacagggagactcatttctacaaaaaaatttaaaaatttaggccaggcatggtggtgcacacctgtaatcccagctactcaggagactgaagcgggaggatcacctgagcccagggaggacgcggctgcagtgagccgttatcatgccactgtactccagcctgggtgacagagcgagaacctgtctcta

SEQ ID NO: 303508 - DNA, 3633 bp, Homo sapiens
ccaccgccccctcctccccctcctctccctaatcaagtaccccctcctcctccaccacctcctgccccacccctccctgcatctggattctttttggcatccatgtcagaagacaatcgccctttaactggacttgcagctgcaattgccggagcaaaacttaggaaagtgtcacggatggaggatacctctttcccaagtggagggaatgctattggtgtgaactccgcctcatctaaaacagatacaggccgtggaaatggaccccttcctttagggggtagtggtttaatggaagaaatgagtgccctgctggccaggaggagaagaattgctgaaaagggatcaacaatagaaacagaacaaaaagaggacaaaggtgaagattcagagcctgtaacttctaaggcctcttcaacaagtacacctgaaccaacaagaaaaccttgggaaagaacaaatacaatgaatggcagcaagtcacctgttatctccagaccaaaatccacacccttatcacagcccagtgccaatggagtccagacggaaggacttgactatgacaggctgaagcaggacattttagatgaaatgagaaaagaattaacaaagctaaaagaagagctcattgatgcaatcaggcaggaactgagcaagtcaaatactgcatagaggaacagactaaggagagataggactttaatctggaggaaaaatatcctacaaacaacaactgttcacaacagcaaacccctacatttatgagctgtaagaagaaaatggagacaaacagaaggagggaaaaaccaacctactctgaaagccttcagacattatgactctggtgataagctctttccctctccgtttgctgcttttttctggcctttacaacagaatggaagagaatcatttaagagttcctgtaacagttatgcagaaaatactaaaacccatcaggcaagatcaccacgcattgaaatattttcatatcaagataaagtcgcacattttccacaatacattgctaaaataaagaggagaaaggcttaggaagtttttttgcagagagtgctggtaaagaattgagcaagtttgctattgtattgtaatgtttctctcaggtttgttcttcctatcatgtttgatattccatgaataattgagatcagccctatgtaagttaagatcataatatgtggaacaaatggaattgtaagtgctttcaaagggtaatatttataagaaagtgtccgaaaaatgtttcttcagcttgagaaattttagaatgataggaagtttctcgagttagccttcatgcaattttgtagattaaaacataaaatttgtccagaacttaaagatttagatgccttcctaaattgttacaatgctttaccaaatctatgacttctacataacacaaaccagtggtcaaatgtaaacactatattgtagatttactgtaggttttcaaccttttttagatttatgcatgtggacatttttataatgtaattacaatcaccacaaggttagcttttttaattgcagacagtaatgcatgtcacactaatatgtagtggccttttcaaggcctagtcccagggaaaacattttgtagagtataggggagtgggaggaaggggaggaataattttttatttaaagttgatttctgcactatctttttctcagttacctgcatgaataaataatgagaaatattttgtgactttaattggtaaatatgttacaaaaccaagtacttaatcttttacatcatgtcttcagctatttgtattttaaccagtaatttcaatggtctgaaacatgattctgagcttcacataatatcttaactgtggaactcaaaagtttgatcactgaatttggcagttattattacctaggtacccccgctgttacacaggtgtttagatacgtgttcctgaatgaagctgcttttgaattttgttatgttgaaatgcaagaaataacaatgatggcagcaattaaggtcacagaaatcattaggtaaaggaaaaccaatgaggagttctgcagttttcttttaataagtaaagtgagacttgggtggtgggaagaaggaaggtgggaagaaggaattagacactctgcctgccactctgcgtgtgtgtgctctcgcgcacgtgctgtctatatggaagccactcccttttctttcctttgaaactggtaaggttaaaataggggagaaatcctacatgttggaatgatagctttttggaaaatttaagaaactctccaggctctccatcttgatttatgcttgagttgttatgtgccatatttgctttgaactctgattatcagaagttttactaaaactttgaaataattcactttcatctgctttctagattttgtacatctcagtccataaagcaaagcttgttgatagtgtagttttctaaacgctgcaaatttgcagcctttaccactacaaagaagtttggatgagggattttttttttctttgtcaaaatagttcctgtttctgtagaaatttcatttttagattaaactgtgatggatgagctatcataattcaagtatacatttcttttttctatcagatattcattgtcatgcagtagtagtaaaaacatcaaagatgcagcaagcttattaagtattattttctaaaagaaataggaggcattttcatctttattattgtacttttggttatgcaaacactttgataatataaacagttatgtcccctataaatctggtcagcaacctcttttgattttgttgggtaagttaaatagtctgtagtaggtagagtactgggtacaagtggtccaaactaagataagagactaaaataaaatgctaaatcttaaaagaaactgggtttatgcactaaacgttttgtgccttggtctaatattaacatgatgtatgtgtaaactgacaaaaaaaaaaaaaaaaaaaaaaaccagtgttgaatcatgctatatttcccatcatcccagattgctaaatgttctttccaagaagtctgaatgaattattatatacatttgctatcatacatgacagttgtgtcattattagagatttcagtaattaaaatgggaaacagaagcctaagttatttaccttatcaaaaccacgttccttggaaccacattattatgatggtttttgtgctcttgtacgttggatgtcttaagctgagtacagtttaggggatcctttctaatgacaggaaggcactgctttcctcaacactgtgatctgacctgtgacaagtctgtactatccactatgtaaatggctcacaagtcaattgcaaacaaactgaatgtacaaatcttagtgctggtgctgaaatctcttcagaatagtcatcatgatttaaaagtttgtttaaaaatttgcaagcatcaagtgtcaatcaaaactgaagatgaaacactaatgaatgttgaattctcatgcttttaggtgtacttcctttttagaattttcagttttctgctatttttaccgtaactatttcgtttaaatttgtttcatttaagtttcctacatgctaacttcgtttgtgcgattgaaataaaattgcagtatata

SEQ ID NO: 303509 - DNA, 3779 bp, Homo sapiens
ccaccgccccctcctccccctcctctccctaatcaagtaccccctcctcctccaccacctcctgccccacccctccctgcatctggattctttttggcatccatgtcagaagacaatcgccctttaactggacttgcagctgcaattgccggagcaaaacttaggaaagtgtcacggatggaggatacctctttcccaagtggagggaatgctattggtgtgaactccgcctcatctaaaacagatacaggccgtggaaatggaccccttcctttagggggtagtggtttaatggaagaaatgagtgccctgctggccaggaggagaagaattgctgaaaagggatcaacaatagaaacagaacaaaaagaggacaaaggtgaagattcagagcctgtaacttctaaggcctcttcaacaagtacacctgaaccaacaagaaaaccttgggaaagaacaaatacaatgaatggcagcaagtcacctgttatctccagaccaaaatccacacccttatcacagcccagtgccaatggagtccagacggaaggacttgactatgacaggctgaagcaggacattttagatgaaatgagaaaagaattaacaaagctaaaagaagagctcattgatgcaatcaggcaggaactgagcaagtcaaatactgcatagaggaacagactaaggagagataggactttaatctggaggaaaaatatcctacaaacaacaactgttcacaacagcaaacccctacatttatgagctgtaagaagaaaatggagacaaacagaaggagggaaaaaccaacctactctgaaagccttcagacattatgactctggtgataagctctttccctctccgtttgctgcttttttctggcctttacaacagaatggaagagaatcatttaagagttcctgtaacagttatgcagaaaatactaaaacccatcaggcaagatcaccacgcattgaaatattttcatatcaagataaagtcgcacattttccacaatacattgctaaaataaagaggagaaaggcttaggaagtttttttgcagagagtgctggtaaagaattgagcaagtttgctattgtattgtaatgtttctctcaggtttgttcttcctatcatgtttgatattccatgaataattgagatcagccctatgtaagttaagatcataatatgtggaacaaatggaattgtaagtgctttcaaagggtaatatttataagaaagtgtccgaaaaatgtttcttcagcttgagaaattttagaatgataggaagtttctcgagttagccttcatgcaattttgtagattaaaacataaaatttgtccagaacttaaagatttagatgccttcctaaattgttacaatgctttaccaaatctatgacttctacataacacaaaccagtggtcaaatgtaaacactatattgtagatttactgtaggttttcaaccttttttagatttatgcatgtggacatttttataatgtaattacaatcaccacaaggttagcttttttaattgcagacagtaatgcatgtcacactaatatgtagtggccttttcaaggcctagtcccagggaaaacattttgtagagtataggggagtgggaggaaggggaggaataattttttatttaaagttgatttctgcactatctttttctcagttacctgcatgaataaataatgagaaatattttgtgactttaattggtaaatatgttacaaaaccaagtacttaatcttttacatcatgtcttcagctatttgtattttaaccagtaatttcaatggtctgaaacatgattctgagcttcacataatatcttaactgtggaactcaaaagtttgatcactgaatttggcagttattattacctaggtacccccgctgttacacaggtgtttagatacgtgttcctgaatgaagctgcttttgaattttgttatgttgaaatgcaagaaataacaatgatggcagcaattaaggtcacagaaatcattaggtaaaggaaaaccaatgaggagttctgcagttttcttttaataagtaaagtgagacttgggtggtgggaagaaggaaggtgggaagaaggaattagacactctgcctgccactctgcgtgtgtgtgctctcgcgcacgtgctgtctatatggaagccactcccttttctttcctttgaaactggtaaggttaaaataggggagaaatcctacatgttggaatgatagctttttggaaaatttaagaaactctccaggctctccatcttgatttatgcttgagttgttatgtgccatatttgctttgaactctgattatcagaagttttactaaaactttgaaataattcactttcatctgctttctagattttgtacatctcagtccataaagcaaagcttgttgatagtgtagttttctaaacgctgcaaatttgcagcctttaccactacaaagaagtttggatgagggattttttttttctttgtcaaaatagttcctgtttctgtagaaatttcatttttagattaaactgtgatggatgagctatcataattcaagtatacatttcttttttctatcagatattcattgtcatgcagtagtagtaaaaacatcaaagatgcagcaagcttattaagtattattttctaaaagaaataggaggcattttcatctttattattgtacttttggttatgcaaacactttgataatataaacagttatgtcccctataaatctggtcagcaacctcttttgattttgttgggtaagttaaatagtctgtagtaggtagagtactgggtacaagtggtccaaactaagataagagactaaaataaaatgctaaatcttaaaagaaactgggtttatgcactaaacgttttgtgccttggtctaatattaacatgatgtatgtgtaaactgacaaaaaaaaaaaaaaaaaaaaaaaaaacccgggtgttggactctctgtgcttatttttccccattctatctcccaaattggctataagtgtgttctcttcccaaaaagttcggagggatttttttttatccctttggcgcttccaatactgtgaccgggtggtggcccctttttaagagattttccgggtatttaaatggggaaacaaacccctaaggttttttcctttaataaaaacccgtttctcttggaccccctttattatgatgggtctcgggcctctggtaccgtggaatgtctaacgcgagtacagttaagcggacccttcttaaatgacgggaaggccctggttccctccaacctggtgttctgctctgtgacagggtctgtctcttttccctatgtaattgcgtccccagtctctttggcaccaactgggtgtgtcccattctagcggcggggggcgaaatctctttcgaaatgtcctctggattaaacggcggtttcaacattttgccagcttcggtgtcctccaactggggatgaaccgcttgaaggttgacccccgcgttaggggactccctttaaaaatcacggttgcatttaccgagaaattgtcggattgtgcataagagcccacagccaccgtgcggcggaaaaacggttttttacaaaacacacacaccgatgtagacgaatacatacgggtgacgtgagcaacaaggagattagctacaagacagcaagtgtgtctctcattcatattctttattacattgtttgactgcattctgcgatgaaggagggggtt

SEQ ID NO: 303510 - DNA, 3548 bp, Homo sapiens
  misc_feature (3077)..(3077): n is a, c, g, or t
  misc_feature (3082)..(3082): n is a, c, g, or t
  misc_feature (3086)..(3086): n is a, c, g, or t
  misc_feature (3096)..(3097): n is a, c, g, or t
  misc_feature (3107)..(3107): n is a, c, g, or t
  misc_feature (3109)..(3110): n is a, c, g, or t
  misc_feature (3113)..(3113): n is a, c, g, or t
  misc_feature (3131)..(3131): n is a, c, g, or t
  misc_feature (3133)..(3133): n is a, c, g, or t
  misc_feature (3136)..(3136): n is a, c, g, or t
  misc_feature (3148)..(3148): n is a, c, g, or t
  misc_feature (3152)..(3153): n is a, c, g, or t
  misc_feature (3158)..(3158): n is a, c, g, or t
  misc_feature (3163)..(3163): n is a, c, g, or t
  misc_feature (3175)..(3175): n is a, c, g, or t
  misc_feature (3182)..(3182): n is a, c, g, or t
  misc_feature (3187)..(3187): n is a, c, g, or t
  misc_feature (3191)..(3191): n is a, c, g, or t
  misc_feature (3199)..(3199): n is a, c, g, or t
  misc_feature (3202)..(3202): n is a, c, g, or t
  misc_feature (3219)..(3220): n is a, c, g, or t
  misc_feature (3224)..(3224): n is a, c, g, or t
  misc_feature (3230)..(3230): n is a, c, g, or t
  misc_feature (3247)..(3247): n is a, c, g, or t
  misc_feature (3256)..(3256): n is a, c, g, or t
  misc_feature (3258)..(3258): n is a, c, g, or t
  misc_feature (3260)..(3260): n is a, c, g, or t
  misc_feature (3267)..(3267): n is a, c, g, or t
  misc_feature (3272)..(3272): n is a, c, g, or t
  misc_feature (3280)..(3281): n is a, c, g, or t
  misc_feature (3285)..(3285): n is a, c, g, or t
  misc_feature (3290)..(3290): n is a, c, g, or t
  misc_feature (3293)..(3294): n is a, c, g, or t
  misc_feature (3297)..(3297): n is a, c, g, or t
  misc_feature (3301)..(3302): n is a, c, g, or t
  misc_feature (3305)..(3305): n is a, c, g, or t
  misc_feature (3309)..(3310): n is a, c, g, or t
  misc_feature (3324)..(3324): n is a, c, g, or t
  misc_feature (3333)..(3333): n is a, c, g, or t
  misc_feature (3351)..(3351): n is a, c, g, or t
  misc_feature (3357)..(3358): n is a, c, g, or t
  misc_feature (3373)..(3373): n is a, c, g, or t
  misc_feature (3382)..(3382): n is a, c, g, or t
  misc_feature (3385)..(3385): n is a, c, g, or t
  misc_feature (3388)..(3388): n is a, c, g, or t
  misc_feature (3395)..(3395): n is a, c, g, or t
  misc_feature (3407)..(3407): n is a, c, g, or t
  misc_feature (3411)..(3411): n is a, c, g, or t
  misc_feature (3415)..(3416): n is a, c, g, or t
  misc_feature (3431)..(3431): n is a, c, g, or t
  misc_feature (3434)..(3435): n is a, c, g, or t
  misc_feature (3437)..(3437): n is a, c, g, or t
  misc_feature (3441)..(3441): n is a, c, g, or t
  misc_feature (3444)..(3444): n is a, c, g, or t
  misc_feature (3446)..(3446): n is a, c, g, or t
  misc_feature (3454)..(3454): n is a, c, g, or t
  misc_feature (3457)..(3457): n is a, c, g, or t
  misc_feature (3463)..(3465): n is a, c, g, or t
  misc_feature (3467)..(3467): n is a, c, g, or t
  misc_feature (3478)..(3480): n is a, c, g, or t
  misc_feature (3493)..(3493): n is a, c, g, or t
  misc_feature (3496)..(3496): n is a, c, g, or t
  misc_feature (3504)..(3504): n is a, c, g, or t
  misc_feature (3508)..(3508): n is a, c, g, or t
  misc_feature (3512)..(3513): n is a, c, g, or t
  misc_feature (3526)..(3526): n is a, c, g, or t
  misc_feature (3533)..(3533): n is a, c, g, or t
  misc_feature (3536)..(3536): n is a, c, g, or t
  misc_feature (3545)..(3545): n is a, c, g, or t
ccaccgccccctcctccccctcctctccctaatcaagtaccccctcctcctccaccacctcctgccccacccctccctgcatctggattctttttggcatccatgtcagaagacaatcgccctttaactggacttgcagctgcaattgccggagcaaaacttaggaaagtgtcacggatggaggatacctctttcccaagtggagggaatgctattggtgtgaactccgcctcatctaaaacagatacaggccgtggaaatggaccccttcctttagggggtagtggtttaatggaagaaatgagtgccctgctggccaggaggagaagaattgctgaaaagggatcaacaatagaaacagaacaaaaagaggacaaaggtgaagattcagagcctgtaacttctaaggcctcttcaacaagtacacctgaaccaacaagaaaaccttgggaaagaacaaatacaatgaatggcagcaagtcacctgttatctccagaccaaaatccacacccttatcacagcccagtgccaatggagtccagacggaaggacttgactatgacaggctgaagcaggacattttagatgaaatgagaaaagaattaacaaagctaaaagaagagctcattgatgcaatcaggcaggaactgagcaagtcaaatactgcatagaggaacagactaaggagagataggactttaatctggaggaaaaatatcctacaaacaacaactgttcacaacagcaaacccctacatttatgagctgtaagaagaaaatggagacaaacagaaggagggaaaaaccaacctactctgaaagccttcagacattatgactctggtgataagctctttccctctccgtttgctgcttttttctggcctttacaacagaatggaagagaatcatttaagagttcctgtaacagttatgcagaaaatactaaaacccatcaggcaagatcaccacgcattgaaatattttcatatcaagataaagtcgcacattttccacaatacattgctaaaataaagaggagaaaggcttaggaagtttttttgcagagagtgctggtaaagaattgagcaagtttgctattgtattgtaatgtttctctcaggtttgttcttcctatcatgtttgatattccatgaataattgagatcagccctatgtaagttaagatcataatatgtggaacaaatggaattgtaagtgctttcaaagggtaatatttataagaaagtgtccgaaaaatgtttcttcagcttgagaaattttagaatgataggaagtttctcgagttagccttcatgcaattttgtagattaaaacataaaatttgtccagaacttaaagatttagatgccttcctaaattgttacaatgctttaccaaatctatgacttctacataacacaaaccagtggtcaaatgtaaacactatattgtagatttactgtaggttttcaaccttttttagatttatgcatgtggacatttttataatgtaattacaatcaccacaaggttagcttttttaattgcagacagtaatgcatgtcacactaatatgtagtggccttttcaaggcctagtcccagggaaaacattttgtagagtataggggagtgggaggaaggggaggaataattttttatttaaagttgatttctgcactatctttttctcagttacctgcatgaataaataatgagaaatattttgtgactttaattggtaaatatgttacaaaaccaagtacttaatcttttacatcatgtcttcagctatttgtattttaaccagtaatttcaatggtctgaaacatgattctgagcttcacataatatcttaactgtggaactcaaaagtttgatcactgaatttggcagttattattacctaggtacccccgctgttacacaggtgtttagatacgtgttcctgaatgaagctgcttttgaattttgttatgttgaaatgcaagaaataacaatgatggcagcaattaaggtcacagaaatcattaggtaaaggaaaaccaatgaggagttctgcagttttcttttaataagtaaagtgagacttgggtggtgggaagaaggaaggtgggaagaaggaattagacactctgcctgccactctgcgtgtgtgtgctctcgcgcacgtgctgtctatatggaagccactcccttttctttcctttgaaactggtaaggttaaaataggggagaaatcctacatgttggaatgatagctttttggaaaatttaagaaactctccaggctctccatcttgatttatgcttgagttgttatgtgccatatttgctttgaactctgattatcagaagttttactaaaactttgaaataattcactttcatctgctttctagattttgtacatctcagtccataaagcaaagcttgttgatagtgtagttttctaaacgctgcaaatttgcagcctttaccactacaaagaagtttggatgagggattttttttttctttgtcaaaatagttcctgtttctgtagaaatttcatttttagattaaactgtgatggatgagctatcataattcaagtatacatttcttttttctatcagatattcattgtcatgcagtagtagtaaaaacatcaaagatgcagcaagcttattaagtattattttctaaaagaaataggaggcattttcatctttattattgtacttttggttatgcaaacactttgataatataaacagttatgtcccctataaatctggtcagcaacctcttttgattttgttgggtaagttaaatagtctgtagtaggtagagtactgggtacaagtggtccaaactaagataagagactaaaataaaatgctaaatcttaaaagaaactgggtttatgcactaaacgttttgtgccttggtctaatattaacatgatgtatgtgtaaactgacaaaaaaaaaaaaaaaaaaaaaaaaacccagggttgagaactctgtgcctaatatttccccattcatctcccagaattggccttaaatggtgttccctttcccaagaangttcntgantgtgaatttnntattattccntnnggncgtatcattacatgtgancngcntgggtgtcattntttnngaganttccnggtattcaaagnggggaancaganaccntaggtttnttnccctttattcaaaaccnncgtntccttngggacccactttatttnatggagggntntntgggtgnctcgnggtacggnngggnatggnctnnaanggcnngangtanncaggttaagggggnatccctttnccttaattggaccgggangggcanntggtttttcccctcnaacatcggntgnatnctggccnctggtggacagngtcnctgnnatctaatcccatctnatnntnaagnggngnctccacanttntccatnnngncaacacaatcnnngattggtccaatntcntaagggcngggnggcnngaaaatcctcctnccaaaanaangtccttccnatg

SEQ ID NO: 303511 - DNA, 3529 bp, Homo sapiens
  misc_feature (3058)..(3058): n is a, c, g, or t
  misc_feature (3063)..(3063): n is a, c, g, or t
  misc_feature (3067)..(3067): n is a, c, g, or t
  misc_feature (3077)..(3078): n is a, c, g, or t
  misc_feature (3088)..(3088): n is a, c, g, or t
  misc_feature (3090)..(3091): n is a, c, g, or t
  misc_feature (3094)..(3094): n is a, c, g, or t
  misc_feature (3112)..(3112): n is a, c, g, or t
  misc_feature (3114)..(3114): n is a, c, g, or t
  misc_feature (3117)..(3117): n is a, c, g, or t
  misc_feature (3129)..(3129): n is a, c, g, or t
  misc_feature (3133)..(3134): n is a, c, g, or t
  misc_feature (3139)..(3139): n is a, c, g, or t
  misc_feature (3144)..(3144): n is a, c, g, or t
  misc_feature (3156)..(3156): n is a, c, g, or t
  misc_feature (3163)..(3163): n is a, c, g, or t
  misc_feature (3168)..(3168): n is a, c, g, or t
  misc_feature (3172)..(3172): n is a, c, g, or t
  misc_feature (3180)..(3180): n is a, c, g, or t
  misc_feature (3183)..(3183): n is a, c, g, or t
  misc_feature (3200)..(3201): n is a, c, g, or t
  misc_feature (3205)..(3205): n is a, c, g, or t
  misc_feature (3211)..(3211): n is a, c, g, or t
  misc_feature (3228)..(3228): n is a, c, g, or t
  misc_feature (3237)..(3237): n is a, c, g, or t
  misc_feature (3239)..(3239): n is a, c, g, or t
  misc_feature (3241)..(3241): n is a, c, g, or t
  misc_feature (3248)..(3248): n is a, c, g, or t
  misc_feature (3253)..(3253): n is a, c, g, or t
  misc_feature (3261)..(3262): n is a, c, g, or t
  misc_feature (3266)..(3266): n is a, c, g, or t
  misc_feature (3271)..(3271): n is a, c, g, or t
  misc_feature (3274)..(3275): n is a, c, g, or t
  misc_feature (3278)..(3278): n is a, c, g, or t
  misc_feature (3282)..(3283): n is a, c, g, or t
  misc_feature (3286)..(3286): n is a, c, g, or t
  misc_feature (3290)..(3291): n is a, c, g, or t
  misc_feature (3305)..(3305): n is a, c, g, or t
  misc_feature (3314)..(3314): n is a, c, g, or t
  misc_feature (3332)..(3332): n is a, c, g, or t
  misc_feature (3338)..(3339): n is a, c, g, or t
  misc_feature (3354)..(3354): n is a, c, g, or t
  misc_feature (3363)..(3363): n is a, c, g, or t
  misc_feature (3366)..(3366): n is a, c, g, or t
  misc_feature (3369)..(3369): n is a, c, g, or t
  misc_feature (3376)..(3376): n is a, c, g, or t
  misc_feature (3388)..(3388): n is a, c, g, or t
  misc_feature (3392)..(3392): n is a, c, g, or t
  misc_feature (3396)..(3397): n is a, c, g, or t
  misc_feature (3412)..(3412): n is a, c, g, or t
  misc_feature (3415)..(3416): n is a, c, g, or t
  misc_feature (3418)..(3418): n is a, c, g, or t
  misc_feature (3422)..(3422): n is a, c, g, or t
  misc_feature (3425)..(3425): n is a, c, g, or t
  misc_feature (3427)..(3427): n is a, c, g, or t
  misc_feature (3435)..(3435): n is a, c, g, or t
  misc_feature (3438)..(3438): n is a, c, g, or t
  misc_feature (3444)..(3446): n is a, c, g, or t
  misc_feature (3448)..(3448): n is a, c, g, or t
  misc_feature (3459)..(3461): n is a, c, g, or t
  misc_feature (3474)..(3474): n is a, c, g, or t
  misc_feature (3477)..(3477): n is a, c, g, or t
  misc_feature (3485)..(3485): n is a, c, g, or t
  misc_feature (3489)..(3489): n is a, c, g, or t
  misc_feature (3493)..(3494): n is a, c, g, or t
  misc_feature (3507)..(3507): n is a, c, g, or t
  misc_feature (3514)..(3514): n is a, c, g, or t
  misc_feature (3517)..(3517): n is a, c, g, or t
  misc_feature (3526)..(3526): n is a, c, g, or t
ccaccgccccctcctccccctcctctccctaatcaagtaccccctcctcctccaccacctcctgccccacccctccctgcatctggattctttttggcatccatgtcagaagacaatcgccctttaactggacttgcagctgcaattgccggagcaaaacttaggaaagtgtcacggatggaggatacctctttcccaagtggagggaatgctattggtgtgaactccgcctcatctaaaacagatacaggccgtggaaatggaccccttcctttagggggtagtggtttaatggaagaaatgagtgccctgctggccaggaggagaagaattgctgaaaagggatcaacaatagaaacagaacaaaaagaggacaaaggtgaagattcagagcctgtaacttctaaggcctcttcaacaagtacacctgaaccaacaagaaaaccttgggaaagaacaaatacaatgaatggcagcaagtcacctgttatctccagaccaaaatccacacccttatcacagcccagtgccaatggagtccagacggaaggacttgactatgacaggctgaagcaggacattttagatgaaatgagaaaagaattaacaaagctaaaagaagagctcattgatgcaatcaggcaggaactgagcaagtcaaatactgcatagaggaacagactaaggagagataggactttaatctggaggaaaaatatcctacaaacaacaactgttcacaacagcaaacccctacatttatgagctgtaagaagaaaatggagacaaacagaaggagggaaaaaccaacctactctgaaagccttcagacattatgactctggtgataagctctttccctctccgtttgctgcttttttctggcctttacaacagaatggaagagaatcatttaagagttcctgtaacagttatgcagaaaatactaaaacccatcaggcaagatcaccacgcattgaaatattttcatatcaagataaagtcgcacattttccacaatacattgctaaaataaagaggagaaaggcttaggaagtttttttgcagagagtgctggtaaagaattgagcaagtttgctattgtattgtaatgtttctctcaggtttgttcttcctatcatgtttgatattccatgaataattgagatcagccctatgtaagttaagatcataatatgtggaacaaatggaattgtaagtgctttcaaagggtaatatttataagaaagtgtccgaaaaatgtttcttcagcttgagaaattttagaatgataggaagtttctcgagttagccttcatgcaattttgtagattaaaacataaaatttgtccagaacttaaagatttagatgccttcctaaattgttacaatgctttaccaaatctatgacttctacataacacaaaccagtggtcaaatgtaaacactatattgtagatttactgtaggttttcaaccttttttagatttatgcatgtggacatttttataatgtaattacaatcaccacaaggttagcttttttaattgcagacagtaatgcatgtcacactaatatgtagtggccttttcaaggcctagtcccagggaaaacattttgtagagtataggggagtgggaggaaggggaggaataattttttatttaaagttgatttctgcactatctttttctcagttacctgcatgaataaataatgagaaatattttgtgactttaattggtaaatatgttacaaaaccaagtacttaatcttttacatcatgtcttcagctatttgtattttaaccagtaatttcaatggtctgaaacatgattctgagcttcacataatatcttaactgtggaactcaaaagtttgatcactgaatttggcagttattattacctaggtacccccgctgttacacaggtgtttagatacgtgttcctgaatgaagctgcttttgaattttgttatgttgaaatgcaagaaataacaatgatggcagcaattaaggtcacagaaatcattaggtaaaggaaaaccaatgaggagttctgcagttttcttttaataagtaaagtgagacttgggtggtgggaagaaggaaggtgggaagaaggaattagacactctgcctgccactctgcgtgtgtgtgctctcgcgcacgtgctgtctatatggaagccactcccttttctttcctttgaaactggtaaggttaaaataggggagaaatcctacatgttggaatgatagctttttggaaaatttaagaaactctccaggctctccatcttgatttatgcttgagttgttatgtgccatatttgctttgaactctgattatcagaagttttactaaaactttgaaataattcactttcatctgctttctagattttgtacatctcagtccataaagcaaagcttgttgatagtgtagttttctaaacgctgcaaatttgcagcctttaccactacaaagaagtttggatgagggattttttttttctttgtcaaaatagttcctgtttctgtagaaatttcatttttagattaaactgtgatggatgagctatcataattcaagtatacatttcttttttctatcagatattcattgtcatgcagtagtagtaaaaacatcaaagatgcagcaagcttattaagtattattttctaaaagaaataggaggcattttcatctttattattgtacttttggttatgcaaacactttgataatataaacagttatgtcccctataaatctggtcagcaacctcttttgattttgttgggtaagttaaatagtctgtagtaggtagagtactgggtacaagtggtccaaactaagataagagactaaaataaaatgctaaatcttaaaagaaactgggtttatgcactaaacgttttgtgccttggtctaatattaacatgatgtatgtgtaaactgacaaaaaaaaaaaaaaaaaaaaaaaacccggggtggattctggttattttccccataatcccaaatggttaagttgttctttcccaagaangttcntgantgtgaatttnntattattccntnnggncgtatcattacatgtgancngcntgggtgtcattntttnngaganttccnggtattcaaagnggggaancaganaccntaggtttnttnccctttattcaaaaccnncgtntccttngggacccactttatttnatggagggntntntgggtgnctcgnggtacggnngggnatggnctnnaanggcnngangtanncaggttaagggggnatccctttnccttaattggaccgggangggcanntggtttttcccctcnaacatcggntgnatnctggccnctggtggacagngtcnctgnnatctaatcccatctnatnntnaagnggngnctccacanttntccatnnngncaacacaatcnnngattggtccaatntcntaagggcngggnggcnngaaaatcctcctnccaaaanaangtccttccnatg

SEQ ID NO: 303512 - DNA, 3460 bp, Homo sapiens
ccaccgccccctcctccccctcctctccctaatcaagtaccccctcctcctccaccacctcctgccccacccctccctgcatctggattctttttggcatccatgtcagaagacaatcgccctttaactggacttgcagctgcaattgccggagcaaaacttaggaaagtgtcacggatggaggatacctctttcccaagtggagggaatgctattggtgtgaactccgcctcatctaaaacagatacaggccgtggaaatggaccccttcctttagggggtagtggtttaatggaagaaatgagtgccctgctggccaggaggagaagaattgctgaaaagggatcaacaatagaaacagaacaaaaagaggacaaaggtgaagattcagagcctgtaacttctaaggcctcttcaacaagtacacctgaaccaacaagaaaaccttgggaaagaacaaatacaatgaatggcagcaagtcacctgttatctccagaccaaaatccacacccttatcacagcccagtgccaatggagtccagacggaaggacttgactatgacaggctgaagcaggacattttagatgaaatgagaaaagaattaacaaagctaaaagaagagctcattgatgcaatcaggcaggaactgagcaagtcaaatactgcatagaggaacagactaaggagagataggactttaatctggaggaaaaatatcctacaaacaacaactgttcacaacagcaaacccctacatttatgagctgtaagaagaaaatggagacaaacagaaggagggaaaaaccaacctactctgaaagccttcagacattatgactctggtgataagctctttccctctccgtttgctgcttttttctggcctttacaacagaatggaagagaatcatttaagagttcctgtaacagttatgcagaaaatactaaaacccatcaggcaagatcaccacgcattgaaatattttcatatcaagataaagtcgcacattttccacaatacattgctaaaataaagaggagaaaggcttaggaagtttttttgcagagagtgctggtaaagaattgagcaagtttgctattgtattgtaatgtttctctcaggtttgttcttcctatcatgtttgatattccatgaataattgagatcagccctatgtaagttaagatcataatatgtggaacaaatggaattgtaagtgctttcaaagggtaatatttataagaaagtgtccgaaaaatgtttcttcagcttgagaaattttagaatgataggaagtttctcgagttagccttcatgcaattttgtagattaaaacataaaatttgtccagaacttaaagatttagatgccttcctaaattgttacaatgctttaccaaatctatgacttctacataacacaaaccagtggtcaaatgtaaacactatattgtagatttactgtaggttttcaaccttttttagatttatgcatgtggacatttttataatgtaattacaatcaccacaaggttagcttttttaattgcagacagtaatgcatgtcacactaatatgtagtggccttttcaaggcctagtcccagggaaaacattttgtagagtataggggagtgggaggaaggggaggaataattttttatttaaagttgatttctgcactatctttttctcagttacctgcatgaataaataatgagaaatattttgtgactttaattggtaaatatgttacaaaaccaagtacttaatcttttacatcatgtcttcagctatttgtattttaaccagtaatttcaatggtctgaaacatgattctgagcttcacataatatcttaactgtggaactcaaaagtttgatcactgaatttggcagttattattacctaggtacccccgctgttacacaggtgtttagatacgtgttcctgaatgaagctgcttttgaattttgttatgttgaaatgcaagaaataacaatgatggcagcaattaaggtcacagaaatcattaggtaaaggaaaaccaatgaggagttctgcagttttcttttaataagtaaagtgagacttgggtggtgggaagaaggaaggtgggaagaaggaattagacactctgcctgccactctgcgtgtgtgtgctctcgcgcacgtgctgtctatatggaagccactcccttttctttcctttgaaactggtaaggttaaaataggggagaaatcctacatgttggaatgatagctttttggaaaatttaagaaactctccaggctctccatcttgatttatgcttgagttgttatgtgccatatttgctttgaactctgattatcagaagttttactaaaactttgaaataattcactttcatctgctttctagattttgtacatctcagtccataaagcaaagcttgttgatagtgtagttttctaaacgctgcaaatttgcagcctttaccactacaaagaagtttggatgagggattttttttttctttgtcaaaatagttcctgtttctgtagaaatttcatttttagattaaactgtgatggatgagctatcataattcaagtatacatttcttttttctatcagatattcattgtcatgcagtagtagtaaaaacatcaaagatgcagcaagcttattaagtattattttctaaaagaaataggaggcattttcatctttattattgtacttttggttatgcaaacactttgataatataaacagttatgtcccctataaatctggtcagcaacctcttttgattttgttgggtaagttaaatagtctgtagtaggtagagtactgggtacaagtggtccaaactaagataagagactaaaataaaatgctaaatcttaaaagaaactgggtttatgcactaaacgttttgtgccttggtctaatattaacatgatgtatgtgtaaactgacaaatagacataaacaaataagatagaaagaagcccagtgtgaattcagcttttttctccccattgatcccagttgtctgaagaggcttgtccccacatgattgttctcatgcgagtgtttccaagtctatgacgatggggcttgaccatcgctttagcctgtggacacgcttcttgaagagaagttccgagtatcggatacctgggtaacacagatgcccccatgggtctattcccccttattccaagaatacccagttgtcctttgggaacacccgaattgatgtaatgccatcggggtttagggtcaagtccttcctgtgtccccggttgtggactgtccttgaaagccgtgaagtatacgaccattcaggggggaacacccttgtgcaaaatgtatgtcgcggaaaaaggcccgcgtgttgttcccctctacaaaaccgttgtgctttttgacccttgttggaccaagcttttgttcatcatccccag

SEQ ID NO: 303513 - DNA, 7631 bp, Homo sapiens
ccaccgccccctcctccccctcctctccctaatcaagtaccccctcctcctccaccacctcctgccccacccctccctgcatctggattctttttggcatccatgtcagaagacaatcgccctttaactggacttgcagctgcaattgccggagcaaaacttaggaaagtgtcacggatggaggatacctctttcccaagtggagggaatgctattggtgtgaactccgcctcatctaaaacagatacaggccgtggaaatggaccccttcctttagggggtagtggtttaatggaagaaatgagtgccctgctggccaggaggagaagaattgctgaaaagggatcaacaatagaaacagaacaaaaagaggacaaaggtgaagattcagagcctgtaacttctaaggcctcttcaacaagtacacctgaaccaacaagaaaaccttgggaaagaacaaatacaatgaatggcagcaagtcacctgttatctccagacgggattctccaaggaaaaatcagattgtttttgacaacaggtcctatgattcattacacagaccaaaatccacacccttatcacagcccagtgccaatggagtccagacggaaggacttgactatgacaggctgaagcaggacattttagatgaaatgagaaaagaattaacaaagctaaaagaagagctcattgatgcaatcaggcaggaactgagcaagtcaaatactgcatagaggaacagactaaggagagataggactttaatctggaggaaaaatatcctacaaacaacaactgttcacaacagcaaacccctacatttatgagctgtaagaagaaaatggagacaaacagaaggagggaaaaaccaacctactctgaaagccttcagacattatgactctggtgataagctctttccctctccgtttgctgcttttttctggcctttacaacagaatggaagagaatcatttaagagttcctgtaacagttatgcagaaaatactaaaacccatcaggcaagatcaccacgcattgaaatattttcatatcaagataaagtcgcacattttccacaatacattgctaaaataaagaggagaaaggcttaggaagtttttttgcagagagtgctggtaaagaattgagcaagtttgctattgtattgtaatgtttctctcaggtttgttcttcctatcatgtttgatattccatgaataattgagatcagccctatgtaagttaagatcataatatgtggaacaaatggaattgtaagtgctttcaaagggtaatatttataagaaagtgtccgaaaaatgtttcttcagcttgagaaattttagaatgataggaagtttctcgagttagccttcatgcaattttgtagattaaaacataaaatttgtccagaacttaaagatttagatgccttcctaaattgttacaatgctttaccaaatctatgacttctacataacacaaaccagtggtcaaatgtaaacactatattgtagatttactgtaggttttcaaccttttttagatttatgcatgtggacatttttataatgtaattacaatcaccacaaggttagcttttttaattgcagacagtaatgcatgtcacactaatatgtagtggccttttcaaggcctagtcccagggaaaacattttgtagagtataggggagtgggaggaaggggaggaataattttttatttaaagttgatttctgcactatctttttctcagttacctgcatgaataaataatgagaaatattttgtgactttaattggtaaatatgttacaaaaccaagtacttaatcttttacatcatgtcttcagctatttgtattttaaccagtaatttcaatggtctgaaacatgattctgagcttcacataatatcttaactgtggaactcaaaagtttgatcactgaatttggcagttattattacctaggtacccccgctgttacacaggtgtttagatacgtgttcctgaatgaagctgcttttgaattttgttatgttgaaatgcaagaaataacaatgatggcagcaattaaggtcacagaaatcattaggtaaaggaaaaccaatgaggagttctgcagttttcttttaataagtaaagtgagacttgggtggtgggaagaaggaaggtgggaagaaggaattagacactctgcctgccactctgcgtgtgtgtgctctcgcgcacgtgctgtctatatggaagccactcccttttctttcctttgaaactggtaaggttaaaataggggagaaatcctacatgttggaatgatagctttttggaaaatttaagaaactctccaggctctccatcttgatttatgcttgagttgttatgtgccatatttgctttgaactctgattatcagaagttttactaaaactttgaaataattcactttcatctgctttctagattttgtacatctcagtccataaagcaaagcttgttgatagtgtagttttctaaacgctgcaaatttgcagcctttaccactacaaagaagtttggatgagggattttttttttctttgtcaaaatagttcctgtttctgtagaaatttcatttttagattaaactgtgatggatgagctatcataattcaagtatacatttcttttttctatcagatattcattgtcatgcagtagtagtaaaaacatcaaagatgcagcaagcttattaagtattattttctaaaagaaataggaggcattttcatctttattattgtacttttggttatgcaaacactttgataatataaacagttatgtcccctataaatctggtcagcaacctcttttgattttgttgggtaagttaaatagtctgtagtaggtagagtactgggtacaagtggtccaaactaagataagagactaaaataaaatgctaaatcttaaaagaaactgggtttatgcactaaacgttttgtgccttggtctaatattaacatgatgtatgtgtaaactgacaaaaaaaaaaaaaaaaaaaaaaaccagtgttgaatcatgctatatttcccatcatcccagattgctaaatgttctttccaagaagtctgaatgaattattatatacatttgctatcatacatgacagttgtgtcattattagagatttcagtaattaaaatgggaaacagaagcctaagttatttaccttatcaaaaccacgttccttggaaccacattattatgatggtttttgtgctcttgtacgttggatgtcttaagctgagtacagtttaggggatcctttctaatgacaggaaggcactgctttcctcaacactgtgatctgacctgtgacaagtctgtactatccactatgtaaatggctcacaagtcaattgcaaacaaactgaatgtacaaatcttagtgctggtgctgaaatctcttcagaatagtcatcatgatttaaaagtttgtttaaaaatttgcaagcatcaagtgtcaatcaaaactgaagatgaaacactaatgaatgttgaattctcatgcttttaggtgtacttcctttttagaattttcagttttctgctatttttaccgtaactatttcgtttaaatttgtttcatttaagtttcctacatgctaacttcgtttgtgcgattgaaataaaattgcagtatatatatgttgcttgtttgtgacacttagataatcttctgaaataatttgttttaaagtaagttatattggatgtgaaaaacaccttttaaagtccaagactttactacttaaaagtttacatgtcacgtcactattctttacagatttcatagaagtcgtgaatactaagtaatgtatacaaaagaaatatgtgatgatgtgtctactttttgtttgaaataactgttgggtgttccctcttcttattttctctctgcccaccttgacacagtaacttcctcttatagtcaagatgatgattaagtgtttaatttttattccattttgttctgcaacacgttcagatacttaaaactcattcatgcagttagaattatcctttatgtagtttgcatggtaaaggacattgtgtggtaaagggcattattgagtaatgaattttaagtatagcaaaatatgtatagtgtttatacatgatgctgatttcttaaaacctacatataagcagtagtactttttctctattataaagtattaattttgagttccattttataattctgatgtcttcattagaaatacaaaaatacaatccttgtattttttctttgaccagacccaaattttccccttcccccctccattctcctctccacttctcgtggaccgcgtgttcccaatattcattaacatttgcagccattacagagttacagttgtaaaattttcagctgtttttttttttttttttttgctctagcctgtctcatgttcttgcttctcttcatatgtaagtcagtatttttgtctacaaattaaaagtcacttgtcattcaaaaatgagttaagtaacatgataatcttttaaatttacctagctacaacttttatgtctcttgtaaatttatatatactttcagtgccattgtgaagaattggccttttaattctaagtagtattaccctatgaagcacagtgtgcaaaggtatgctacaaggtctctttaattcctgtgtggccattataattttataacaccattaccctttaaattctaccgattataagcagcgtaaaagtaactatataaagcaaacatcgcaaaggaactctgcaggagctcttaattcctttatgtagctatcataaaattcactttcctgaagacatttactctcattcacttccaaactccaaacctttttctggtagcaccacttttgtttttaatagaaagatgagttcatatctgtacatctctccaaagctctaaggaatgagaaaaggatcctagtatattgaaattactgatgtttaatacctctgccttttcactaaaagccatttaatatttttaaagtcaaaacttgacatacaggtatttataaggaatctccatgactctgaaggaatgaaattgatgtaggtagctttggctatgtaaagacatagtagaggacaattacttaaagaagagttttcttttgaggatttgtagatttgactaagcagctgaagtcagtaacccctcaagaaaggccgtttatagaagccaagaactgttggaggtctgtgatgcaggtttttctgttcccaacatcaaaagctgtggattatttggtgtgttcccctttatgttatctctcgataatttttgagacatcaagattttttaaaatatcaatactggaaagatgaaaccttcaaattaaaacctaaaattgattagaaagaaaagtaaaatattaatgcagtaaatttaggatggttacagatactcaccatcaacataaataaatggagttctaggataaattatttgtggaatactaatggtcaagtcacataagagtaaaatcttttggtgaggagacacatttgacaactgctaaagaattaactaaatttgtctttctaaatagttttctttataaagtaacagaaacattgtaaaaggataaataaatgactgtcataatgacttaggatgttgtaagaatgtctgccacatttattggttatttctgttgaaatctgaaggaatcgatacatctgaaaattgagaaagggaaataggactgtccccgttacagatactctgtgatgcacacaaccttctaaacggaagtgttagtatcatttaaagcacatagtaggccttgagtatttgcagattaacatgcagaaaaaatcaaagatgaagccccaattaagtgtttgaaccaaagaatcacagtcactgagctgcacccccgttctgtgaagcatgttaaatactcataaagagcagagagcagggcccgtagacgcttctggtgtaggacacaggaattctaggcagagggagaaaattaggggccccagttggtggctgagagtaaaaagaatataccatttgagtagtgctgttctttttcctcagtttttaaagacatataattcctagtagttaggacatctaaatagctcggtaaactggtcagaggcgggaggattgcttgaggccagaagttttgagatcagcctgggcaacatagcgaggcctgtctccttaaaaaataaataaataaataataaataaataaataaataaaaaccttgtccttgactattgtgctgtctgctgcccctttgtagggatggggttggggtcagaataagcatgtgcatgaatggcggaaagctttggtggtgtttgtttgtttgtttgttttttgagaggtgggggagtcagcagtgaacctttctggttaaagaacaacgtacataatttctattatgagatttagaaggttaaatacttttttttttcaggcctaccaagttgatagaccaaaagtatatagtagaacagcacagtagaaaaaatttaaaagtgaatttcttatggtccaaaaggatggatagtcacagtccataacctttcataatatatgctggaattggaatctcttgtcatcttgctttgctctgaattttagaactagaagtgtgcatgtatgtcaaaagattatgcagagctattttctttgctaacaatgtaaacatttgcaccccatgaatgggactttataatctggaagtgagcctaaggttgcgtatactgaagtcatgttttaaaagttaaggttgacttaaacatatacaaggctgtattttaattgtaactagaaatcatttactatgcatacagaacctcatgtatcttatcatggaatttgtgaattaatgggcccttgccgaacttcaagggtaagggaaactggtaacaacttgttttaaatcaacatactataagctcctgcttgcttgactcaagttgtttgaaaatctgaattaaacaggatctcattgtcaggaaacatcttctaagcttgacatctacgtttaagaagggaacgtggaagagaaggtgagacatgaaactaaaacagctgggagggtaggatcagactgcacctgatttttggaccaaagtttcatataggaataaataaaaaggaggaccacttgtgagccaacctaggaaggacttgccagaaagtagcagctcctgctgcaaaatacagtgccttcaaaatgattctctgtgtgaattgcatgcaatttcatgtaaccataaagtgtaacctgtatgtgcatgacatgtgtctagaatgtgtaaagttaggattcagcaggaaggggcctggccctgtcactgtggtggatcagtggacctgctgaagtcactggactcatgtgacttaggtttgcagcatcagacccctgtgtttgcattaagtggccacatcgttgaaatcggatcaatctctccctcagctttctttcctactttgcagctttgctggttttaactgcttcattcttctgcttcttggtatccttttttcttttgaaataaaaacatgaaatacttaattcaaaaaaaaaatg

SEQ ID NO: 303514 - DNA, 7147 bp, Homo sapiens
taaatttgcaattatttatgaactcattaagtattaagaatgttgtttacctgtcctggaaatctcatttatacagaccaaaatccacacccttatcacagcccagtgccaatggagtccagacggaaggacttgactatgacaggctgaagcaggacattttagatgaaatgagaaaagaattaacaaagctaaaagaagagctcattgatgcaatcaggcaggaactgagcaagtcaaatactgcatagaggaacagactaaggagagataggactttaatctggaggaaaaatatcctacaaacaacaactgttcacaacagcaaacccctacatttatgagctgtaagaagaaaatggagacaaacagaaggagggaaaaaccaacctactctgaaagccttcagacattatgactctggtgataagctctttccctctccgtttgctgcttttttctggcctttacaacagaatggaagagaatcatttaagagttcctgtaacagttatgcagaaaatactaaaacccatcaggcaagatcaccacgcattgaaatattttcatatcaagataaagtcgcacattttccacaatacattgctaaaataaagaggagaaaggcttaggaagtttttttgcagagagtgctggtaaagaattgagcaagtttgctattgtattgtaatgtttctctcaggtttgttcttcctatcatgtttgatattccatgaataattgagatcagccctatgtaagttaagatcataatatgtggaacaaatggaattgtaagtgctttcaaagggtaatatttataagaaagtgtccgaaaaatgtttcttcagcttgagaaattttagaatgataggaagtttctcgagttagccttcatgcaattttgtagattaaaacataaaatttgtccagaacttaaagatttagatgccttcctaaattgttacaatgctttaccaaatctatgacttctacataacacaaaccagtggtcaaatgtaaacactatattgtagatttactgtaggttttcaaccttttttagatttatgcatgtggacatttttataatgtaattacaatcaccacaaggttagcttttttaattgcagacagtaatgcatgtcacactaatatgtagtggccttttcaaggcctagtcccagggaaaacattttgtagagtataggggagtgggaggaaggggaggaataattttttatttaaagttgatttctgcactatctttttctcagttacctgcatgaataaataatgagaaatattttgtgactttaattggtaaatatgttacaaaaccaagtacttaatcttttacatcatgtcttcagctatttgtattttaaccagtaatttcaatggtctgaaacatgattctgagcttcacataatatcttaactgtggaactcaaaagtttgatcactgaatttggcagttattattacctaggtacccccgctgttacacaggtgtttagatacgtgttcctgaatgaagctgcttttgaattttgttatgttgaaatgcaagaaataacaatgatggcagcaattaaggtcacagaaatcattaggtaaaggaaaaccaatgaggagttctgcagttttcttttaataagtaaagtgagacttgggtggtgggaagaaggaaggtgggaagaaggaattagacactctgcctgccactctgcgtgtgtgtgctctcgcgcacgtgctgtctatatggaagccactcccttttctttcctttgaaactggtaaggttaaaataggggagaaatcctacatgttggaatgatagctttttggaaaatttaagaaactctccaggctctccatcttgatttatgcttgagttgttatgtgccatatttgctttgaactctgattatcagaagttttactaaaactttgaaataattcactttcatctgctttctagattttgtacatctcagtccataaagcaaagcttgttgatagtgtagttttctaaacgctgcaaatttgcagcctttaccactacaaagaagtttggatgagggattttttttttctttgtcaaaatagttcctgtttctgtagaaatttcatttttagattaaactgtgatggatgagctatcataattcaagtatacatttcttttttctatcagatattcattgtcatgcagtagtagtaaaaacatcaaagatgcagcaagcttattaagtattattttctaaaagaaataggaggcattttcatctttattattgtacttttggttatgcaaacactttgataatataaacagttatgtcccctataaatctggtcagcaacctcttttgattttgttgggtaagttaaatagtctgtagtaggtagagtactgggtacaagtggtccaaactaagataagagactaaaataaaatgctaaatcttaaaagaaactgggtttatgcactaaacgttttgtgccttggtctaatattaacatgatgtatgtgtaaactgacaaaaaaaaaaaaaaaaaaaaaaaccagtgttgaatcatgctatatttcccatcatcccagattgctaaatgttctttccaagaagtctgaatgaattattatatacatttgctatcatacatgacagttgtgtcattattagagatttcagtaattaaaatgggaaacagaagcctaagttatttaccttatcaaaaccacgttccttggaaccacattattatgatggtttttgtgctcttgtacgttggatgtcttaagctgagtacagtttaggggatcctttctaatgacaggaaggcactgctttcctcaacactgtgatctgacctgtgacaagtctgtactatccactatgtaaatggctcacaagtcaattgcaaacaaactgaatgtacaaatcttagtgctggtgctgaaatctcttcagaatagtcatcatgatttaaaagtttgtttaaaaatttgcaagcatcaagtgtcaatcaaaactgaagatgaaacactaatgaatgttgaattctcatgcttttaggtgtacttcctttttagaattttcagttttctgctatttttaccgtaactatttcgtttaaatttgtttcatttaagtttcctacatgctaacttcgtttgtgcgattgaaataaaattgcagtatatatatgttgcttgtttgtgacacttagataatcttctgaaataatttgttttaaagtaagttatattggatgtgaaaaacaccttttaaagtccaagactttactacttaaaagtttacatgtcacgtcactattctttacagatttcatagaagtcgtgaatactaagtaatgtatacaaaagaaatatgtgatgatgtgtctactttttgtttgaaataactgttgggtgttccctcttcttattttctctctgcccaccttgacacagtaacttcctcttatagtcaagatgatgattaagtgtttaatttttattccattttgttctgcaacacgttcagatacttaaaactcattcatgcagttagaattatcctttatgtagtttgcatggtaaaggacattgtgtggtaaagggcattattgagtaatgaattttaagtatagcaaaatatgtatagtgtttatacatgatgctgatttcttaaaacctacatataagcagtagtactttttctctattataaagtattaattttgagttccattttataattctgatgtcttcattagaaatacaaaaatacaatccttgtattttttctttgaccagacccaaattttccccttcccccctccattctcctctccacttctcgtggaccgcgtgttcccaatattcattaacatttgcagccattacagagttacagttgtaaaattttcagctgtttttttttttttttttttgctctagcctgtctcatgttcttgcttctcttcatatgtaagtcagtatttttgtctacaaattaaaagtcacttgtcattcaaaaatgagttaagtaacatgataatcttttaaatttacctagctacaacttttatgtctcttgtaaatttatatatactttcagtgccattgtgaagaattggccttttaattctaagtagtattaccctatgaagcacagtgtgcaaaggtatgctacaaggtctctttaattcctgtgtggccattataattttataacaccattaccctttaaattctaccgattataagcagcgtaaaagtaactatataaagcaaacatcgcaaaggaactctgcaggagctcttaattcctttatgtagctatcataaaattcactttcctgaagacatttactctcattcacttccaaactccaaacctttttctggtagcaccacttttgtttttaatagaaagatgagttcatatctgtacatctctccaaagctctaaggaatgagaaaaggatcctagtatattgaaattactgatgtttaatacctctgccttttcactaaaagccatttaatatttttaaagtcaaaacttgacatacaggtatttataaggaatctccatgactctgaaggaatgaaattgatgtaggtagctttggctatgtaaagacatagtagaggacaattacttaaagaagagttttcttttgaggatttgtagatttgactaagcagctgaagtcagtaacccctcaagaaaggccgtttatagaagccaagaactgttggaggtctgtgatgcaggtttttctgttcccaacatcaaaagctgtggattatttggtgtgttcccctttatgttatctctcgataatttttgagacatcaagattttttaaaatatcaatactggaaagatgaaaccttcaaattaaaacctaaaattgattagaaagaaaagtaaaatattaatgcagtaaatttaggatggttacagatactcaccatcaacataaataaatggagttctaggataaattatttgtggaatactaatggtcaagtcacataagagtaaaatcttttggtgaggagacacatttgacaactgctaaagaattaactaaatttgtctttctaaatagttttctttataaagtaacagaaacattgtaaaaggataaataaatgactgtcataatgacttaggatgttgtaagaatgtctgccacatttattggttatttctgttgaaatctgaaggaatcgatacatctgaaaattgagaaagggaaataggactgtccccgttacagatactctgtgatgcacacaaccttctaaacggaagtgttagtatcatttaaagcacatagtaggccttgagtatttgcagattaacatgcagaaaaaatcaaagatgaagccccaattaagtgtttgaaccaaagaatcacagtcactgagctgcacccccgttctgtgaagcatgttaaatactcataaagagcagagagcagggcccgtagacgcttctggtgtaggacacaggaattctaggcagagggagaaaattaggggccccagttggtggctgagagtaaaaagaatataccatttgagtagtgctgttctttttcctcagtttttaaagacatataattcctagtagttaggacatctaaatagctcggtaaactggtcagaggcgggaggattgcttgaggccagaagttttgagatcagcctgggcaacatagcgaggcctgtctccttaaaaaataaataaataaataataaataaataaataaataaaaaccttgtccttgactattgtgctgtctgctgcccctttgtagggatggggttggggtcagaataagcatgtgcatgaatggcggaaagctttggtggtgtttgtttgtttgtttgttttttgagaggtgggggagtcagcagtgaacctttctggttaaagaacaacgtacataatttctattatgagatttagaaggttaaatacttttttttttcaggcctaccaagttgatagaccaaaagtatatagtagaacagcacagtagaaaaaatttaaaagtgaatttcttatggtccaaaaggatggatagtcacagtccataacctttcataatatatgctggaattggaatctcttgtcatcttgctttgctctgaattttagaactagaagtgtgcatgtatgtcaaaagattatgcagagctattttctttgctaacaatgtaaacatttgcaccccatgaatgggactttataatctggaagtgagcctaaggttgcgtatactgaagtcatgttttaaaagttaaggttgacttaaacatatacaaggctgtattttaattgtaactagaaatcatttactatgcatacagaacctcatgtatcttatcatggaatttgtgaattaatgggcccttgccgaacttcaagggtaagggaaactggtaacaacttgttttaaatcaacatactataagctcctgcttgcttgactcaagttgtttgaaaatctgaattaaacaggatctcattgtcaggaaacatcttctaagcttgacatctacgtttaagaagggaacgtggaagagaaggtgagacatgaaactaaaacagctgggagggtaggatcagactgcacctgatttttggaccaaagtttcatataggaataaataaaaaggaggaccacttgtgagccaacctaggaaggacttgccagaaagtagcagctcctgctgcaaaatacagtgccttcaaaatgattctctgtgtgaattgcatgcaatttcatgtaaccataaagtgtaacctgtatgtgcatgacatgtgtctagaatgtgtaaagttaggattcagcaggaaggggcctggccctgtcactgtggtggatcagtggacctgctgaagtcactggactcatgtgacttaggtttgcagcatcagacccctgtgtttgcattaagtggccacatcgttgaaatcggatcaatctctccctcagctttctttcctactttgcagctttgctggttttaactgcttcattcttctgcttcttggtatccttttttcttttgaaataaaaacatgaaatacttaattcaaaaaaaaaatg

SEQ ID NO: 303515 - DNA, 6987 bp, Homo sapiens
ttatcttactttatcattatatttattttcaatacttgttcttttccatccagcaatcaggcaggaactgagcaagtcaaatactgcatagaggaacagactaaggagagataggactttaatctggaggaaaaatatcctacaaacaacaactgttcacaacagcaaacccctacatttatgagctgtaagaagaaaatggagacaaacagaaggagggaaaaaccaacctactctgaaagccttcagacattatgactctggtgataagctctttccctctccgtttgctgcttttttctggcctttacaacagaatggaagagaatcatttaagagttcctgtaacagttatgcagaaaatactaaaacccatcaggcaagatcaccacgcattgaaatattttcatatcaagataaagtcgcacattttccacaatacattgctaaaataaagaggagaaaggcttaggaagtttttttgcagagagtgctggtaaagaattgagcaagtttgctattgtattgtaatgtttctctcaggtttgttcttcctatcatgtttgatattccatgaataattgagatcagccctatgtaagttaagatcataatatgtggaacaaatggaattgtaagtgctttcaaagggtaatatttataagaaagtgtccgaaaaatgtttcttcagcttgagaaattttagaatgataggaagtttctcgagttagccttcatgcaattttgtagattaaaacataaaatttgtccagaacttaaagatttagatgccttcctaaattgttacaatgctttaccaaatctatgacttctacataacacaaaccagtggtcaaatgtaaacactatattgtagatttactgtaggttttcaaccttttttagatttatgcatgtggacatttttataatgtaattacaatcaccacaaggttagcttttttaattgcagacagtaatgcatgtcacactaatatgtagtggccttttcaaggcctagtcccagggaaaacattttgtagagtataggggagtgggaggaaggggaggaataattttttatttaaagttgatttctgcactatctttttctcagttacctgcatgaataaataatgagaaatattttgtgactttaattggtaaatatgttacaaaaccaagtacttaatcttttacatcatgtcttcagctatttgtattttaaccagtaatttcaatggtctgaaacatgattctgagcttcacataatatcttaactgtggaactcaaaagtttgatcactgaatttggcagttattattacctaggtacccccgctgttacacaggtgtttagatacgtgttcctgaatgaagctgcttttgaattttgttatgttgaaatgcaagaaataacaatgatggcagcaattaaggtcacagaaatcattaggtaaaggaaaaccaatgaggagttctgcagttttcttttaataagtaaagtgagacttgggtggtgggaagaaggaaggtgggaagaaggaattagacactctgcctgccactctgcgtgtgtgtgctctcgcgcacgtgctgtctatatggaagccactcccttttctttcctttgaaactggtaaggttaaaataggggagaaatcctacatgttggaatgatagctttttggaaaatttaagaaactctccaggctctccatcttgatttatgcttgagttgttatgtgccatatttgctttgaactctgattatcagaagttttactaaaactttgaaataattcactttcatctgctttctagattttgtacatctcagtccataaagcaaagcttgttgatagtgtagttttctaaacgctgcaaatttgcagcctttaccactacaaagaagtttggatgagggattttttttttctttgtcaaaatagttcctgtttctgtagaaatttcatttttagattaaactgtgatggatgagctatcataattcaagtatacatttcttttttctatcagatattcattgtcatgcagtagtagtaaaaacatcaaagatgcagcaagcttattaagtattattttctaaaagaaataggaggcattttcatctttattattgtacttttggttatgcaaacactttgataatataaacagttatgtcccctataaatctggtcagcaacctcttttgattttgttgggtaagttaaatagtctgtagtaggtagagtactgggtacaagtggtccaaactaagataagagactaaaataaaatgctaaatcttaaaagaaactgggtttatgcactaaacgttttgtgccttggtctaatattaacatgatgtatgtgtaaactgacaaaaaaaaaaaaaaaaaaaaaaaccagtgttgaatcatgctatatttcccatcatcccagattgctaaatgttctttccaagaagtctgaatgaattattatatacatttgctatcatacatgacagttgtgtcattattagagatttcagtaattaaaatgggaaacagaagcctaagttatttaccttatcaaaaccacgttccttggaaccacattattatgatggtttttgtgctcttgtacgttggatgtcttaagctgagtacagtttaggggatcctttctaatgacaggaaggcactgctttcctcaacactgtgatctgacctgtgacaagtctgtactatccactatgtaaatggctcacaagtcaattgcaaacaaactgaatgtacaaatcttagtgctggtgctgaaatctcttcagaatagtcatcatgatttaaaagtttgtttaaaaatttgcaagcatcaagtgtcaatcaaaactgaagatgaaacactaatgaatgttgaattctcatgcttttaggtgtacttcctttttagaattttcagttttctgctatttttaccgtaactatttcgtttaaatttgtttcatttaagtttcctacatgctaacttcgtttgtgcgattgaaataaaattgcagtatatatatgttgcttgtttgtgacacttagataatcttctgaaataatttgttttaaagtaagttatattggatgtgaaaaacaccttttaaagtccaagactttactacttaaaagtttacatgtcacgtcactattctttacagatttcatagaagtcgtgaatactaagtaatgtatacaaaagaaatatgtgatgatgtgtctactttttgtttgaaataactgttgggtgttccctcttcttattttctctctgcccaccttgacacagtaacttcctcttatagtcaagatgatgattaagtgtttaatttttattccattttgttctgcaacacgttcagatacttaaaactcattcatgcagttagaattatcctttatgtagtttgcatggtaaaggacattgtgtggtaaagggcattattgagtaatgaattttaagtatagcaaaatatgtatagtgtttatacatgatgctgatttcttaaaacctacatataagcagtagtactttttctctattataaagtattaattttgagttccattttataattctgatgtcttcattagaaatacaaaaatacaatccttgtattttttctttgaccagacccaaattttccccttcccccctccattctcctctccacttctcgtggaccgcgtgttcccaatattcattaacatttgcagccattacagagttacagttgtaaaattttcagctgtttttttttttttttttttgctctagcctgtctcatgttcttgcttctcttcatatgtaagtcagtatttttgtctacaaattaaaagtcacttgtcattcaaaaatgagttaagtaacatgataatcttttaaatttacctagctacaacttttatgtctcttgtaaatttatatatactttcagtgccattgtgaagaattggccttttaattctaagtagtattaccctatgaagcacagtgtgcaaaggtatgctacaaggtctctttaattcctgtgtggccattataattttataacaccattaccctttaaattctaccgattataagcagcgtaaaagtaactatataaagcaaacatcgcaaaggaactctgcaggagctcttaattcctttatgtagctatcataaaattcactttcctgaagacatttactctcattcacttccaaactccaaacctttttctggtagcaccacttttgtttttaatagaaagatgagttcatatctgtacatctctccaaagctctaaggaatgagaaaaggatcctagtatattgaaattactgatgtttaatacctctgccttttcactaaaagccatttaatatttttaaagtcaaaacttgacatacaggtatttataaggaatctccatgactctgaaggaatgaaattgatgtaggtagctttggctatgtaaagacatagtagaggacaattacttaaagaagagttttcttttgaggatttgtagatttgactaagcagctgaagtcagtaacccctcaagaaaggccgtttatagaagccaagaactgttggaggtctgtgatgcaggtttttctgttcccaacatcaaaagctgtggattatttggtgtgttcccctttatgttatctctcgataatttttgagacatcaagattttttaaaatatcaatactggaaagatgaaaccttcaaattaaaacctaaaattgattagaaagaaaagtaaaatattaatgcagtaaatttaggatggttacagatactcaccatcaacataaataaatggagttctaggataaattatttgtggaatactaatggtcaagtcacataagagtaaaatcttttggtgaggagacacatttgacaactgctaaagaattaactaaatttgtctttctaaatagttttctttataaagtaacagaaacattgtaaaaggataaataaatgactgtcataatgacttaggatgttgtaagaatgtctgccacatttattggttatttctgttgaaatctgaaggaatcgatacatctgaaaattgagaaagggaaataggactgtccccgttacagatactctgtgatgcacacaaccttctaaacggaagtgttagtatcatttaaagcacatagtaggccttgagtatttgcagattaacatgcagaaaaaatcaaagatgaagccccaattaagtgtttgaaccaaagaatcacagtcactgagctgcacccccgttctgtgaagcatgttaaatactcataaagagcagagagcagggcccgtagacgcttctggtgtaggacacaggaattctaggcagagggagaaaattaggggccccagttggtggctgagagtaaaaagaatataccatttgagtagtgctgttctttttcctcagtttttaaagacatataattcctagtagttaggacatctaaatagctcggtaaactggtcagaggcgggaggattgcttgaggccagaagttttgagatcagcctgggcaacatagcgaggcctgtctccttaaaaaataaataaataaataataaataaataaataaataaaaaccttgtccttgactattgtgctgtctgctgcccctttgtagggatggggttggggtcagaataagcatgtgcatgaatggcggaaagctttggtggtgtttgtttgtttgtttgttttttgagaggtgggggagtcagcagtgaacctttctggttaaagaacaacgtacataatttctattatgagatttagaaggttaaatacttttttttttcaggcctaccaagttgatagaccaaaagtatatagtagaacagcacagtagaaaaaatttaaaagtgaatttcttatggtccaaaaggatggatagtcacagtccataacctttcataatatatgctggaattggaatctcttgtcatcttgctttgctctgaattttagaactagaagtgtgcatgtatgtcaaaagattatgcagagctattttctttgctaacaatgtaaacatttgcaccccatgaatgggactttataatctggaagtgagcctaaggttgcgtatactgaagtcatgttttaaaagttaaggttgacttaaacatatacaaggctgtattttaattgtaactagaaatcatttactatgcatacagaacctcatgtatcttatcatggaatttgtgaattaatgggcccttgccgaacttcaagggtaagggaaactggtaacaacttgttttaaatcaacatactataagctcctgcttgcttgactcaagttgtttgaaaatctgaattaaacaggatctcattgtcaggaaacatcttctaagcttgacatctacgtttaagaagggaacgtggaagagaaggtgagacatgaaactaaaacagctgggagggtaggatcagactgcacctgatttttggaccaaagtttcatataggaataaataaaaaggaggaccacttgtgagccaacctaggaaggacttgccagaaagtagcagctcctgctgcaaaatacagtgccttcaaaatgattctctgtgtgaattgcatgcaatttcatgtaaccataaagtgtaacctgtatgtgcatgacatgtgtctagaatgtgtaaagttaggattcagcaggaaggggcctggccctgtcactgtggtggatcagtggacctgctgaagtcactggactcatgtgacttaggtttgcagcatcagacccctgtgtttgcattaagtggccacatcgttgaaatcggatcaatctctccctcagctttctttcctactttgcagctttgctggttttaactgcttcattcttctgcttcttggtatccttttttcttttgaaataaaaacatgaaatacttaattcaaaaaaaaaatg

SEQ ID NO: 303516 - DNA, 6414 bp, Homo sapiens
gtgggaggcggcggccgcctggggaccagctccgcgcctcggcctctccgccccctccccagcctttctctcgccctcttctcccacactcccggccggcgcctcggctttgtgcgaggagatggtgtagccccctggccgccgaaggaggagccggacacttgtctcccgtctccgagctgctccccacccctggaggagagacccccccctcggctcggcgccttctgcgtctcccggctggtggggaagcctctgcgccgccggcaccatgagtgaacagagtatctgtcaggcaagagctgctgtgatggtttatgatgatgccaataagaagtgggtgccagctggtggctcaactggattcagcagagttcatatctatcaccatacaggcaacaacacattcagagtggtgggcaggaagattcaggaccatcaggtcgtgataaactgtgccattcctaaagggttgaagtacaatcaagctacacagaccttccaccagtggcgagatgctagacaggtgtatggtctcaactttggcagcaaagaggatgccaatgtcttcgcaagtgccatgatgcatgccttagaagtgttaaattcacaggaaacagggccaacattgcctagacaaaactcacaactacctgctcaagttcaaaatggcccatcccaagaagaattggaaattcaaagaagacaactacaagaacagcaacggcaaaaggagctggagcgggaaaggctggagcgagaaagaatggaaagagaaaggttggagagagagaggttagaaagggaaaggctggagagggagcgactggaacaagaacagctggagagagagagacaagaacgggaacggcaggaacgcctggagcggcaggaacgcctggagcggcaggaacgcctggagcggcaggaacgcctggatcgggagaggcaagaaagacaagaacgagagaggctggagagactggaacgggagaggcaagaaagggagcgacaagagcagttagaaagggaacagctggaatgggagagagagcgcagaatatcaagtgctgctgcccctgcctctgttgagactcctctaaactctgtgctgggagactcttctgcttctgagccaggctctccatcttgatttatgcttgagttgttatgtgccatatttgctttgaactctgattatcagaagttttactaaaactttgaaataattcactttcatctgctttctagattttgtacatctcagtccataaagcaaagcttgttgatagtgtagttttctaaacgctgcaaatttgcagcctttaccactacaaagaagtttggatgagggattttttttttctttgtcaaaatagttcctgtttctgtagaaatttcatttttagattaaactgtgatggatgagctatcataattcaagtatacatttcttttttctatcagatattcattgtcatgcagtagtagtaaaaacatcaaagatgcagcaagcttattaagtattattttctaaaagaaataggaggcattttcatctttattattgtacttttggttatgcaaacactttgataatataaacagttatgtcccctataaatctggtcagcaacctcttttgattttgttgggtaagttaaatagtctgtagtaggtagagtactgggtacaagtggtccaaactaagataagagactaaaataaaatgctaaatcttaaaagaaactgggtttatgcactaaacgttttgtgccttggtctaatattaacatgatgtatgtgtaaactgacaaaaaaaaaaaaaaaaaaaaaaaccagtgttgaatcatgctatatttcccatcatcccagattgctaaatgttctttccaagaagtctgaatgaattattatatacatttgctatcatacatgacagttgtgtcattattagagatttcagtaattaaaatgggaaacagaagcctaagttatttaccttatcaaaaccacgttccttggaaccacattattatgatggtttttgtgctcttgtacgttggatgtcttaagctgagtacagtttaggggatcctttctaatgacaggaaggcactgctttcctcaacactgtgatctgacctgtgacaagtctgtactatccactatgtaaatggctcacaagtcaattgcaaacaaactgaatgtacaaatcttagtgctggtgctgaaatctcttcagaatagtcatcatgatttaaaagtttgtttaaaaatttgcaagcatcaagtgtcaatcaaaactgaagatgaaacactaatgaatgttgaattctcatgcttttaggtgtacttcctttttagaattttcagttttctgctatttttaccgtaactatttcgtttaaatttgtttcatttaagtttcctacatgctaacttcgtttgtgcgattgaaataaaattgcagtatatatatgttgcttgtttgtgacacttagataatcttctgaaataatttgttttaaagtaagttatattggatgtgaaaaacaccttttaaagtccaagactttactacttaaaagtttacatgtcacgtcactattctttacagatttcatagaagtcgtgaatactaagtaatgtatacaaaagaaatatgtgatgatgtgtctactttttgtttgaaataactgttgggtgttccctcttcttattttctctctgcccaccttgacacagtaacttcctcttatagtcaagatgatgattaagtgtttaatttttattccattttgttctgcaacacgttcagatacttaaaactcattcatgcagttagaattatcctttatgtagtttgcatggtaaaggacattgtgtggtaaagggcattattgagtaatgaattttaagtatagcaaaatatgtatagtgtttatacatgatgctgatttcttaaaacctacatataagcagtagtactttttctctattataaagtattaattttgagttccattttataattctgatgtcttcattagaaatacaaaaatacaatccttgtattttttctttgaccagacccaaattttccccttcccccctccattctcctctccacttctcgtggaccgcgtgttcccaatattcattaacatttgcagccattacagagttacagttgtaaaattttcagctgtttttttttttttttttttgctctagcctgtctcatgttcttgcttctcttcatatgtaagtcagtatttttgtctacaaattaaaagtcacttgtcattcaaaaatgagttaagtaacatgataatcttttaaatttacctagctacaacttttatgtctcttgtaaatttatatatactttcagtgccattgtgaagaattggccttttaattctaagtagtattaccctatgaagcacagtgtgcaaaggtatgctacaaggtctctttaattcctgtgtggccattataattttataacaccattaccctttaaattctaccgattataagcagcgtaaaagtaactatataaagcaaacatcgcaaaggaactctgcaggagctcttaattcctttatgtagctatcataaaattcactttcctgaagacatttactctcattcacttccaaactccaaacctttttctggtagcaccacttttgtttttaatagaaagatgagttcatatctgtacatctctccaaagctctaaggaatgagaaaaggatcctagtatattgaaattactgatgtttaatacctctgccttttcactaaaagccatttaatatttttaaagtcaaaacttgacatacaggtatttataaggaatctccatgactctgaaggaatgaaattgatgtaggtagctttggctatgtaaagacatagtagaggacaattacttaaagaagagttttcttttgaggatttgtagatttgactaagcagctgaagtcagtaacccctcaagaaaggccgtttatagaagccaagaactgttggaggtctgtgatgcaggtttttctgttcccaacatcaaaagctgtggattatttggtgtgttcccctttatgttatctctcgataatttttgagacatcaagattttttaaaatatcaatactggaaagatgaaaccttcaaattaaaacctaaaattgattagaaagaaaagtaaaatattaatgcagtaaatttaggatggttacagatactcaccatcaacataaataaatggagttctaggataaattatttgtggaatactaatggtcaagtcacataagagtaaaatcttttggtgaggagacacatttgacaactgctaaagaattaactaaatttgtctttctaaatagttttctttataaagtaacagaaacattgtaaaaggataaataaatgactgtcataatgacttaggatgttgtaagaatgtctgccacatttattggttatttctgttgaaatctgaaggaatcgatacatctgaaaattgagaaagggaaataggactgtccccgttacagatactctgtgatgcacacaaccttctaaacggaagtgttagtatcatttaaagcacatagtaggccttgagtatttgcagattaacatgcagaaaaaatcaaagatgaagccccaattaagtgtttgaaccaaagaatcacagtcactgagctgcacccccgttctgtgaagcatgttaaatactcataaagagcagagagcagggcccgtagacgcttctggtgtaggacacaggaattctaggcagagggagaaaattaggggccccagttggtggctgagagtaaaaagaatataccatttgagtagtgctgttctttttcctcagtttttaaagacatataattcctagtagttaggacatctaaatagctcggtaaactggtcagaggcgggaggattgcttgaggccagaagttttgagatcagcctgggcaacatagcgaggcctgtctccttaaaaaataaataaataaataataaataaataaataaataaaaaccttgtccttgactattgtgctgtctgctgcccctttgtagggatggggttggggtcagaataagcatgtgcatgaatggcggaaagctttggtggtgtttgtttgtttgtttgttttttgagaggtgggggagtcagcagtgaacctttctggttaaagaacaacgtacataatttctattatgagatttagaaggttaaatacttttttttttcaggcctaccaagttgatagaccaaaagtatatagtagaacagcacagtagaaaaaatttaaaagtgaatttcttatggtccaaaaggatggatagtcacagtccataacctttcataatatatgctggaattggaatctcttgtcatcttgctttgctctgaattttagaactagaagtgtgcatgtatgtcaaaagattatgcagagctattttctttgctaacaatgtaaacatttgcaccccatgaatgggactttataatctggaagtgagcctaaggttgcgtatactgaagtcatgttttaaaagttaaggttgacttaaacatatacaaggctgtattttaattgtaactagaaatcatttactatgcatacagaacctcatgtatcttatcatggaatttgtgaattaatgggcccttgccgaacttcaagggtaagggaaactggtaacaacttgttttaaatcaacatactataagctcctgcttgcttgactcaagttgtttgaaaatctgaattaaacaggatctcattgtcaggaaacatcttctaagcttgacatctacgtttaagaagggaacgtggaagagaaggtgagacatgaaactaaaacagctgggagggtaggatcagactgcacctgatttttggaccaaagtttcatataggaataaataaaaaggaggaccacttgtgagccaacctaggaaggacttgccagaaagtagcagctcctgctgcaaaatacagtgccttcaaaatgattctctgtgtgaattgcatgcaatttcatgtaaccataaagtgtaacctgtatgtgcatgacatgtgtctagaatgtgtaaagttaggattcagcaggaaggggcctggccctgtcactgtggtggatcagtggacctgctgaagtcactggactcatgtgacttaggtttgcagcatcagacccctgtgtttgcattaagtggccacatcgttgaaatcggatcaatctctccctcagctttctttcctactttgcagctttgctggttttaactgcttcattcttctgcttcttggtatccttttttcttttgaaataaaaacatgaaatacttaattcaaaaaaaaaatg

SEQ ID NO: 303517 - DNA, 5749 bp, Homo sapiens
gtgggaggcggcggccgcctggggaccagctccgcgcctcggcctctccgccccctccccagcctttctctcgccctcttctcccacactcccggccggcgcctcggctttgtgcgaggagatggtgtagccccctggccgccgaaggaggagccggacacttgtctcccgtctccgagctgctccccacccctggaggagagacccccccctcggctcggcgccttctgcgtctcccggctggtggggaagcctctgcgccgccggcaccatgagtgaacagagtatctgtcaggcaagagctgctgtgatggtttatgatgatgccactctgcgtgtgtgtgctctcgcgcacgtgctgtctatatggaagccactcccttttctttcctttgaaactggtaaggttaaaataggggagaaatcctacatgttggaatgatagctttttggaaaatttaagaaactctccaggctctccatcttgatttatgcttgagttgttatgtgccatatttgctttgaactctgattatcagaagttttactaaaactttgaaataattcactttcatctgctttctagattttgtacatctcagtccataaagcaaagcttgttgatagtgtagttttctaaacgctgcaaatttgcagcctttaccactacaaagaagtttggatgagggattttttttttctttgtcaaaatagttcctgtttctgtagaaatttcatttttagattaaactgtgatggatgagctatcataattcaagtatacatttcttttttctatcagatattcattgtcatgcagtagtagtaaaaacatcaaagatgcagcaagcttattaagtattattttctaaaagaaataggaggcattttcatctttattattgtacttttggttatgcaaacactttgataatataaacagttatgtcccctataaatctggtcagcaacctcttttgattttgttgggtaagttaaatagtctgtagtaggtagagtactgggtacaagtggtccaaactaagataagagactaaaataaaatgctaaatcttaaaagaaactgggtttatgcactaaacgttttgtgccttggtctaatattaacatgatgtatgtgtaaactgacaaaaaaaaaaaaaaaaaaaaaaaccagtgttgaatcatgctatatttcccatcatcccagattgctaaatgttctttccaagaagtctgaatgaattattatatacatttgctatcatacatgacagttgtgtcattattagagatttcagtaattaaaatgggaaacagaagcctaagttatttaccttatcaaaaccacgttccttggaaccacattattatgatggtttttgtgctcttgtacgttggatgtcttaagctgagtacagtttaggggatcctttctaatgacaggaaggcactgctttcctcaacactgtgatctgacctgtgacaagtctgtactatccactatgtaaatggctcacaagtcaattgcaaacaaactgaatgtacaaatcttagtgctggtgctgaaatctcttcagaatagtcatcatgatttaaaagtttgtttaaaaatttgcaagcatcaagtgtcaatcaaaactgaagatgaaacactaatgaatgttgaattctcatgcttttaggtgtacttcctttttagaattttcagttttctgctatttttaccgtaactatttcgtttaaatttgtttcatttaagtttcctacatgctaacttcgtttgtgcgattgaaataaaattgcagtatatatatgttgcttgtttgtgacacttagataatcttctgaaataatttgttttaaagtaagttatattggatgtgaaaaacaccttttaaagtccaagactttactacttaaaagtttacatgtcacgtcactattctttacagatttcatagaagtcgtgaatactaagtaatgtatacaaaagaaatatgtgatgatgtgtctactttttgtttgaaataactgttgggtgttccctcttcttattttctctctgcccaccttgacacagtaacttcctcttatagtcaagatgatgattaagtgtttaatttttattccattttgttctgcaacacgttcagatacttaaaactcattcatgcagttagaattatcctttatgtagtttgcatggtaaaggacattgtgtggtaaagggcattattgagtaatgaattttaagtatagcaaaatatgtatagtgtttatacatgatgctgatttcttaaaacctacatataagcagtagtactttttctctattataaagtattaattttgagttccattttataattctgatgtcttcattagaaatacaaaaatacaatccttgtattttttctttgaccagacccaaattttccccttcccccctccattctcctctccacttctcgtggaccgcgtgttcccaatattcattaacatttgcagccattacagagttacagttgtaaaattttcagctgtttttttttttttttttttgctctagcctgtctcatgttcttgcttctcttcatatgtaagtcagtatttttgtctacaaattaaaagtcacttgtcattcaaaaatgagttaagtaacatgataatcttttaaatttacctagctacaacttttatgtctcttgtaaatttatatatactttcagtgccattgtgaagaattggccttttaattctaagtagtattaccctatgaagcacagtgtgcaaaggtatgctacaaggtctctttaattcctgtgtggccattataattttataacaccattaccctttaaattctaccgattataagcagcgtaaaagtaactatataaagcaaacatcgcaaaggaactctgcaggagctcttaattcctttatgtagctatcataaaattcactttcctgaagacatttactctcattcacttccaaactccaaacctttttctggtagcaccacttttgtttttaatagaaagatgagttcatatctgtacatctctccaaagctctaaggaatgagaaaaggatcctagtatattgaaattactgatgtttaatacctctgccttttcactaaaagccatttaatatttttaaagtcaaaacttgacatacaggtatttataaggaatctccatgactctgaaggaatgaaattgatgtaggtagctttggctatgtaaagacatagtagaggacaattacttaaagaagagttttcttttgaggatttgtagatttgactaagcagctgaagtcagtaacccctcaagaaaggccgtttatagaagccaagaactgttggaggtctgtgatgcaggtttttctgttcccaacatcaaaagctgtggattatttggtgtgttcccctttatgttatctctcgataatttttgagacatcaagattttttaaaatatcaatactggaaagatgaaaccttcaaattaaaacctaaaattgattagaaagaaaagtaaaatattaatgcagtaaatttaggatggttacagatactcaccatcaacataaataaatggagttctaggataaattatttgtggaatactaatggtcaagtcacataagagtaaaatcttttggtgaggagacacatttgacaactgctaaagaattaactaaatttgtctttctaaatagttttctttataaagtaacagaaacattgtaaaaggataaataaatgactgtcataatgacttaggatgttgtaagaatgtctgccacatttattggttatttctgttgaaatctgaaggaatcgatacatctgaaaattgagaaagggaaataggactgtccccgttacagatactctgtgatgcacacaaccttctaaacggaagtgttagtatcatttaaagcacatagtaggccttgagtatttgcagattaacatgcagaaaaaatcaaagatgaagccccaattaagtgtttgaaccaaagaatcacagtcactgagctgcacccccgttctgtgaagcatgttaaatactcataaagagcagagagcagggcccgtagacgcttctggtgtaggacacaggaattctaggcagagggagaaaattaggggccccagttggtggctgagagtaaaaagaatataccatttgagtagtgctgttctttttcctcagtttttaaagacatataattcctagtagttaggacatctaaatagctcggtaaactggtcagaggcgggaggattgcttgaggccagaagttttgagatcagcctgggcaacatagcgaggcctgtctccttaaaaaataaataaataaataataaataaataaataaataaaaaccttgtccttgactattgtgctgtctgctgcccctttgtagggatggggttggggtcagaataagcatgtgcatgaatggcggaaagctttggtggtgtttgtttgtttgtttgttttttgagaggtgggggagtcagcagtgaacctttctggttaaagaacaacgtacataatttctattatgagatttagaaggttaaatacttttttttttcaggcctaccaagttgatagaccaaaagtatatagtagaacagcacagtagaaaaaatttaaaagtgaatttcttatggtccaaaaggatggatagtcacagtccataacctttcataatatatgctggaattggaatctcttgtcatcttgctttgctctgaattttagaactagaagtgtgcatgtatgtcaaaagattatgcagagctattttctttgctaacaatgtaaacatttgcaccccatgaatgggactttataatctggaagtgagcctaaggttgcgtatactgaagtcatgttttaaaagttaaggttgacttaaacatatacaaggctgtattttaattgtaactagaaatcatttactatgcatacagaacctcatgtatcttatcatggaatttgtgaattaatgggcccttgccgaacttcaagggtaagggaaactggtaacaacttgttttaaatcaacatactataagctcctgcttgcttgactcaagttgtttgaaaatctgaattaaacaggatctcattgtcaggaaacatcttctaagcttgacatctacgtttaagaagggaacgtggaagagaaggtgagacatgaaactaaaacagctgggagggtaggatcagactgcacctgatttttggaccaaagtttcatataggaataaataaaaaggaggaccacttgtgagccaacctaggaaggacttgccagaaagtagcagctcctgctgcaaaatacagtgccttcaaaatgattctctgtgtgaattgcatgcaatttcatgtaaccataaagtgtaacctgtatgtgcatgacatgtgtctagaatgtgtaaagttaggattcagcaggaaggggcctggccctgtcactgtggtggatcagtggacctgctgaagtcactggactcatgtgacttaggtttgcagcatcagacccctgtgtttgcattaagtggccacatcgttgaaatcggatcaatctctccctcagctttctttcctactttgcagctttgctggttttaactgcttcattcttctgcttcttggtatccttttttcttttgaaataaaaacatgaaatacttaattcaaaaaaaaaatg

SEQ ID NO: 303518 - DNA, 6218 bp, Homo sapiens
ttcgtatatatgtaaaaatttcatgcacttttgcctccgaactctcgtgtttaattaaaaaaggaagaaaagtttgaaagtgaacagagtatctgtcaggcaagagctgctgtgatggtttatgatgatgccaataagaagtgggtgccagctggtggctcaactggattcagcagagttcatatctatcaccatacaggcaacaacacattcagagtggtgggcaggaagattcaggaccatcaggtcgtgataaactgtgccattcctaaagggttgaagtacaatcaagctacacagaccttccaccagtggcgagatgctagacaggtgtatggtctcaactttggcagcaaagaggatgccaatgtcttcgcaagtgccatgatgcatgccttagaagtgttaaattcacaggaaacagggccaacattgcctagacaaaactcacaactacctgctcaagttcaaaatggcccatcccaagaagaattggaaattcaaagaagacaactacaagaacagcaacggcaaaaggagctggagcgggaaaggctggagcgagaaagaatggaaagagaaaggttggagagagagaggttagaaagggaaaggctggagagggagcgactggaacaagaacagctggagagagagagacaagaacgggaacggcaggaacgcctggagcggcaggaacgcctggagcggcaggaacgcctggagcggcaggaacgcctggatcgggagaggcaagaaagacaagaacgagagaggctggagagactggaacgggagaggcaagaaagggagcgacaagagcagttagaaagggaacagctggaatgggagagagagcgcagaatatcaagtgctgctgcccctgcctctgttgagactcctctaaactctgtgctgggagactcttctgcttctgagccaggctctccatcttgatttatgcttgagttgttatgtgccatatttgctttgaactctgattatcagaagttttactaaaactttgaaataattcactttcatctgctttctagattttgtacatctcagtccataaagcaaagcttgttgatagtgtagttttctaaacgctgcaaatttgcagcctttaccactacaaagaagtttggatgagggattttttttttctttgtcaaaatagttcctgtttctgtagaaatttcatttttagattaaactgtgatggatgagctatcataattcaagtatacatttcttttttctatcagatattcattgtcatgcagtagtagtaaaaacatcaaagatgcagcaagcttattaagtattattttctaaaagaaataggaggcattttcatctttattattgtacttttggttatgcaaacactttgataatataaacagttatgtcccctataaatctggtcagcaacctcttttgattttgttgggtaagttaaatagtctgtagtaggtagagtactgggtacaagtggtccaaactaagataagagactaaaataaaatgctaaatcttaaaagaaactgggtttatgcactaaacgttttgtgccttggtctaatattaacatgatgtatgtgtaaactgacaaaaaaaaaaaaaaaaaaaaaaaccagtgttgaatcatgctatatttcccatcatcccagattgctaaatgttctttccaagaagtctgaatgaattattatatacatttgctatcatacatgacagttgtgtcattattagagatttcagtaattaaaatgggaaacagaagcctaagttatttaccttatcaaaaccacgttccttggaaccacattattatgatggtttttgtgctcttgtacgttggatgtcttaagctgagtacagtttaggggatcctttctaatgacaggaaggcactgctttcctcaacactgtgatctgacctgtgacaagtctgtactatccactatgtaaatggctcacaagtcaattgcaaacaaactgaatgtacaaatcttagtgctggtgctgaaatctcttcagaatagtcatcatgatttaaaagtttgtttaaaaatttgcaagcatcaagtgtcaatcaaaactgaagatgaaacactaatgaatgttgaattctcatgcttttaggtgtacttcctttttagaattttcagttttctgctatttttaccgtaactatttcgtttaaatttgtttcatttaagtttcctacatgctaacttcgtttgtgcgattgaaataaaattgcagtatatatatgttgcttgtttgtgacacttagataatcttctgaaataatttgttttaaagtaagttatattggatgtgaaaaacaccttttaaagtccaagactttactacttaaaagtttacatgtcacgtcactattctttacagatttcatagaagtcgtgaatactaagtaatgtatacaaaagaaatatgtgatgatgtgtctactttttgtttgaaataactgttgggtgttccctcttcttattttctctctgcccaccttgacacagtaacttcctcttatagtcaagatgatgattaagtgtttaatttttattccattttgttctgcaacacgttcagatacttaaaactcattcatgcagttagaattatcctttatgtagtttgcatggtaaaggacattgtgtggtaaagggcattattgagtaatgaattttaagtatagcaaaatatgtatagtgtttatacatgatgctgatttcttaaaacctacatataagcagtagtactttttctctattataaagtattaattttgagttccattttataattctgatgtcttcattagaaatacaaaaatacaatccttgtattttttctttgaccagacccaaattttccccttcccccctccattctcctctccacttctcgtggaccgcgtgttcccaatattcattaacatttgcagccattacagagttacagttgtaaaattttcagctgtttttttttttttttttttgctctagcctgtctcatgttcttgcttctcttcatatgtaagtcagtatttttgtctacaaattaaaagtcacttgtcattcaaaaatgagttaagtaacatgataatcttttaaatttacctagctacaacttttatgtctcttgtaaatttatatatactttcagtgccattgtgaagaattggccttttaattctaagtagtattaccctatgaagcacagtgtgcaaaggtatgctacaaggtctctttaattcctgtgtggccattataattttataacaccattaccctttaaattctaccgattataagcagcgtaaaagtaactatataaagcaaacatcgcaaaggaactctgcaggagctcttaattcctttatgtagctatcataaaattcactttcctgaagacatttactctcattcacttccaaactccaaacctttttctggtagcaccacttttgtttttaatagaaagatgagttcatatctgtacatctctccaaagctctaaggaatgagaaaaggatcctagtatattgaaattactgatgtttaatacctctgccttttcactaaaagccatttaatatttttaaagtcaaaacttgacatacaggtatttataaggaatctccatgactctgaaggaatgaaattgatgtaggtagctttggctatgtaaagacatagtagaggacaattacttaaagaagagttttcttttgaggatttgtagatttgactaagcagctgaagtcagtaacccctcaagaaaggccgtttatagaagccaagaactgttggaggtctgtgatgcaggtttttctgttcccaacatcaaaagctgtggattatttggtgtgttcccctttatgttatctctcgataatttttgagacatcaagattttttaaaatatcaatactggaaagatgaaaccttcaaattaaaacctaaaattgattagaaagaaaagtaaaatattaatgcagtaaatttaggatggttacagatactcaccatcaacataaataaatggagttctaggataaattatttgtggaatactaatggtcaagtcacataagagtaaaatcttttggtgaggagacacatttgacaactgctaaagaattaactaaatttgtctttctaaatagttttctttataaagtaacagaaacattgtaaaaggataaataaatgactgtcataatgacttaggatgttgtaagaatgtctgccacatttattggttatttctgttgaaatctgaaggaatcgatacatctgaaaattgagaaagggaaataggactgtccccgttacagatactctgtgatgcacacaaccttctaaacggaagtgttagtatcatttaaagcacatagtaggccttgagtatttgcagattaacatgcagaaaaaatcaaagatgaagccccaattaagtgtttgaaccaaagaatcacagtcactgagctgcacccccgttctgtgaagcatgttaaatactcataaagagcagagagcagggcccgtagacgcttctggtgtaggacacaggaattctaggcagagggagaaaattaggggccccagttggtggctgagagtaaaaagaatataccatttgagtagtgctgttctttttcctcagtttttaaagacatataattcctagtagttaggacatctaaatagctcggtaaactggtcagaggcgggaggattgcttgaggccagaagttttgagatcagcctgggcaacatagcgaggcctgtctccttaaaaaataaataaataaataataaataaataaataaataaaaaccttgtccttgactattgtgctgtctgctgcccctttgtagggatggggttggggtcagaataagcatgtgcatgaatggcggaaagctttggtggtgtttgtttgtttgtttgttttttgagaggtgggggagtcagcagtgaacctttctggttaaagaacaacgtacataatttctattatgagatttagaaggttaaatacttttttttttcaggcctaccaagttgatagaccaaaagtatatagtagaacagcacagtagaaaaaatttaaaagtgaatttcttatggtccaaaaggatggatagtcacagtccataacctttcataatatatgctggaattggaatctcttgtcatcttgctttgctctgaattttagaactagaagtgtgcatgtatgtcaaaagattatgcagagctattttctttgctaacaatgtaaacatttgcaccccatgaatgggactttataatctggaagtgagcctaaggttgcgtatactgaagtcatgttttaaaagttaaggttgacttaaacatatacaaggctgtattttaattgtaactagaaatcatttactatgcatacagaacctcatgtatcttatcatggaatttgtgaattaatgggcccttgccgaacttcaagggtaagggaaactggtaacaacttgttttaaatcaacatactataagctcctgcttgcttgactcaagttgtttgaaaatctgaattaaacaggatctcattgtcaggaaacatcttctaagcttgacatctacgtttaagaagggaacgtggaagagaaggtgagacatgaaactaaaacagctgggagggtaggatcagactgcacctgatttttggaccaaagtttcatataggaataaataaaaaggaggaccacttgtgagccaacctaggaaggacttgccagaaagtagcagctcctgctgcaaaatacagtgccttcaaaatgattctctgtgtgaattgcatgcaatttcatgtaaccataaagtgtaacctgtatgtgcatgacatgtgtctagaatgtgtaaagttaggattcagcaggaaggggcctggccctgtcactgtggtggatcagtggacctgctgaagtcactggactcatgtgacttaggtttgcagcatcagacccctgtgtttgcattaagtggccacatcgttgaaatcggatcaatctctccctcagctttctttcctactttgcagctttgctggttttaactgcttcattcttctgcttcttggtatccttttttcttttgaaataaaaacatgaaatacttaattcaaaaaaaaaatg

SEQ ID NO: 303519 - DNA, 5762 bp, Homo sapiens
tattagaggatccccgttggcccatccaatgagaattggaaattcaaatgaagacaactacaagaacagcaacggcaaaaggagctggagcgggaaaggctggagcgagaaagaatggaaagagaaaggttggagagagagaggttagaaagggaaaggctggagagggagcgactggaacaagaacagctggagagagagagacaagaacgggaacggcaggaacgcctggagcggcaggaacgcctggagcggcaggaacgcctggagcggcaggaacgcctggatcgggagaggcaagaaagacaagaacgagagaggctggagagactggaacgggagaggcaagaaagggagcgacaagagcagttagaaagggaacagctggaatgggagagagagcgcagaatatcaagtgctgctgcccctgcctctgttgagactcctctaaactctgtgctgggagactcttctgcttctgagccaggctctccatcttgatttatgcttgagttgttatgtgccatatttgctttgaactctgattatcagaagttttactaaaactttgaaataattcactttcatctgctttctagattttgtacatctcagtccataaagcaaagcttgttgatagtgtagttttctaaacgctgcaaatttgcagcctttaccactacaaagaagtttggatgagggattttttttttctttgtcaaaatagttcctgtttctgtagaaatttcatttttagattaaactgtgatggatgagctatcataattcaagtatacatttcttttttctatcagatattcattgtcatgcagtagtagtaaaaacatcaaagatgcagcaagcttattaagtattattttctaaaagaaataggaggcattttcatctttattattgtacttttggttatgcaaacactttgataatataaacagttatgtcccctataaatctggtcagcaacctcttttgattttgttgggtaagttaaatagtctgtagtaggtagagtactgggtacaagtggtccaaactaagataagagactaaaataaaatgctaaatcttaaaagaaactgggtttatgcactaaacgttttgtgccttggtctaatattaacatgatgtatgtgtaaactgacaaaaaaaaaaaaaaaaaaaaaaaccagtgttgaatcatgctatatttcccatcatcccagattgctaaatgttctttccaagaagtctgaatgaattattatatacatttgctatcatacatgacagttgtgtcattattagagatttcagtaattaaaatgggaaacagaagcctaagttatttaccttatcaaaaccacgttccttggaaccacattattatgatggtttttgtgctcttgtacgttggatgtcttaagctgagtacagtttaggggatcctttctaatgacaggaaggcactgctttcctcaacactgtgatctgacctgtgacaagtctgtactatccactatgtaaatggctcacaagtcaattgcaaacaaactgaatgtacaaatcttagtgctggtgctgaaatctcttcagaatagtcatcatgatttaaaagtttgtttaaaaatttgcaagcatcaagtgtcaatcaaaactgaagatgaaacactaatgaatgttgaattctcatgcttttaggtgtacttcctttttagaattttcagttttctgctatttttaccgtaactatttcgtttaaatttgtttcatttaagtttcctacatgctaacttcgtttgtgcgattgaaataaaattgcagtatatatatgttgcttgtttgtgacacttagataatcttctgaaataatttgttttaaagtaagttatattggatgtgaaaaacaccttttaaagtccaagactttactacttaaaagtttacatgtcacgtcactattctttacagatttcatagaagtcgtgaatactaagtaatgtatacaaaagaaatatgtgatgatgtgtctactttttgtttgaaataactgttgggtgttccctcttcttattttctctctgcccaccttgacacagtaacttcctcttatagtcaagatgatgattaagtgtttaatttttattccattttgttctgcaacacgttcagatacttaaaactcattcatgcagttagaattatcctttatgtagtttgcatggtaaaggacattgtgtggtaaagggcattattgagtaatgaattttaagtatagcaaaatatgtatagtgtttatacatgatgctgatttcttaaaacctacatataagcagtagtactttttctctattataaagtattaattttgagttccattttataattctgatgtcttcattagaaatacaaaaatacaatccttgtattttttctttgaccagacccaaattttccccttcccccctccattctcctctccacttctcgtggaccgcgtgttcccaatattcattaacatttgcagccattacagagttacagttgtaaaattttcagctgtttttttttttttttttttgctctagcctgtctcatgttcttgcttctcttcatatgtaagtcagtatttttgtctacaaattaaaagtcacttgtcattcaaaaatgagttaagtaacatgataatcttttaaatttacctagctacaacttttatgtctcttgtaaatttatatatactttcagtgccattgtgaagaattggccttttaattctaagtagtattaccctatgaagcacagtgtgcaaaggtatgctacaaggtctctttaattcctgtgtggccattataattttataacaccattaccctttaaattctaccgattataagcagcgtaaaagtaactatataaagcaaacatcgcaaaggaactctgcaggagctcttaattcctttatgtagctatcataaaattcactttcctgaagacatttactctcattcacttccaaactccaaacctttttctggtagcaccacttttgtttttaatagaaagatgagttcatatctgtacatctctccaaagctctaaggaatgagaaaaggatcctagtatattgaaattactgatgtttaatacctctgccttttcactaaaagccatttaatatttttaaagtcaaaacttgacatacaggtatttataaggaatctccatgactctgaaggaatgaaattgatgtaggtagctttggctatgtaaagacatagtagaggacaattacttaaagaagagttttcttttgaggatttgtagatttgactaagcagctgaagtcagtaacccctcaagaaaggccgtttatagaagccaagaactgttggaggtctgtgatgcaggtttttctgttcccaacatcaaaagctgtggattatttggtgtgttcccctttatgttatctctcgataatttttgagacatcaagattttttaaaatatcaatactggaaagatgaaaccttcaaattaaaacctaaaattgattagaaagaaaagtaaaatattaatgcagtaaatttaggatggttacagatactcaccatcaacataaataaatggagttctaggataaattatttgtggaatactaatggtcaagtcacataagagtaaaatcttttggtgaggagacacatttgacaactgctaaagaattaactaaatttgtctttctaaatagttttctttataaagtaacagaaacattgtaaaaggataaataaatgactgtcataatgacttaggatgttgtaagaatgtctgccacatttattggttatttctgttgaaatctgaaggaatcgatacatctgaaaattgagaaagggaaataggactgtccccgttacagatactctgtgatgcacacaaccttctaaacggaagtgttagtatcatttaaagcacatagtaggccttgagtatttgcagattaacatgcagaaaaaatcaaagatgaagccccaattaagtgtttgaaccaaagaatcacagtcactgagctgcacccccgttctgtgaagcatgttaaatactcataaagagcagagagcagggcccgtagacgcttctggtgtaggacacaggaattctaggcagagggagaaaattaggggccccagttggtggctgagagtaaaaagaatataccatttgagtagtgctgttctttttcctcagtttttaaagacatataattcctagtagttaggacatctaaatagctcggtaaactggtcagaggcgggaggattgcttgaggccagaagttttgagatcagcctgggcaacatagcgaggcctgtctccttaaaaaataaataaataaataataaataaataaataaataaaaaccttgtccttgactattgtgctgtctgctgcccctttgtagggatggggttggggtcagaataagcatgtgcatgaatggcggaaagctttggtggtgtttgtttgtttgtttgttttttgagaggtgggggagtcagcagtgaacctttctggttaaagaacaacgtacataatttctattatgagatttagaaggttaaatacttttttttttcaggcctaccaagttgatagaccaaaagtatatagtagaacagcacagtagaaaaaatttaaaagtgaatttcttatggtccaaaaggatggatagtcacagtccataacctttcataatatatgctggaattggaatctcttgtcatcttgctttgctctgaattttagaactagaagtgtgcatgtatgtcaaaagattatgcagagctattttctttgctaacaatgtaaacatttgcaccccatgaatgggactttataatctggaagtgagcctaaggttgcgtatactgaagtcatgttttaaaagttaaggttgacttaaacatatacaaggctgtattttaattgtaactagaaatcatttactatgcatacagaacctcatgtatcttatcatggaatttgtgaattaatgggcccttgccgaacttcaagggtaagggaaactggtaacaacttgttttaaatcaacatactataagctcctgcttgcttgactcaagttgtttgaaaatctgaattaaacaggatctcattgtcaggaaacatcttctaagcttgacatctacgtttaagaagggaacgtggaagagaaggtgagacatgaaactaaaacagctgggagggtaggatcagactgcacctgatttttggaccaaagtttcatataggaataaataaaaaggaggaccacttgtgagccaacctaggaaggacttgccagaaagtagcagctcctgctgcaaaatacagtgccttcaaaatgattctctgtgtgaattgcatgcaatttcatgtaaccataaagtgtaacctgtatgtgcatgacatgtgtctagaatgtgtaaagttaggattcagcaggaaggggcctggccctgtcactgtggtggatcagtggacctgctgaagtcactggactcatgtgacttaggtttgcagcatcagacccctgtgtttgcattaagtggccacatcgttgaaatcggatcaatctctccctcagctttctttcctactttgcagctttgctggttttaactgcttcattcttctgcttcttggtatccttttttcttttgaaataaaaacatgaaatacttaattcaaaaaaaaaatg

SEQ ID NO: 303520 - DNA, 7515 bp, Homo sapiens
ccaccgccccctcctccccctcctctccctaatcaagtaccccctcctcctccaccacctcctgccccacccctccctgcatctggattctttttggcatccatgtcagaagacaatcgccctttaactggacttgcagctgcaattgccggagcaaaacttaggaaagtgtcacggatggaggatacctctttcccaagtggagggaatgctattggtgtgaactccgcctcatctaaaacagatacaggccgtggaaatggaccccttcctttagggggtagtggtttaatggaagaaatgagtgccctgctggccaggaggagaagaattgctgaaaagggatcaacaatagaaacagaacaaaaagaggacaaaggtgaagattcagagcctgtaacttctaaggcctcttcaacaagtacacctgaaccaacaagaaaaccttgggaaagaacaaatacaatgaatggcagcaagtcacctgttatctccagaccaaaatccacacccttatcacagcccagtgccaatggagtccagacggaaggacttgactatgacaggctgaagcaggacattttagatgaaatgagaaaagaattaacaaagctaaaagaagagctcattgatgcaatcaggcaggaactgagcaagtcaaatactgcatagaggaacagactaaggagagataggactttaatctggaggaaaaatatcctacaaacaacaactgttcacaacagcaaacccctacatttatgagctgtaagaagaaaatggagacaaacagaaggagggaaaaaccaacctactctgaaagccttcagacattatgactctggtgataagctctttccctctccgtttgctgcttttttctggcctttacaacagaatggaagagaatcatttaagagttcctgtaacagttatgcagaaaatactaaaacccatcaggcaagatcaccacgcattgaaatattttcatatcaagataaagtcgcacattttccacaatacattgctaaaataaagaggagaaaggcttaggaagtttttttgcagagagtgctggtaaagaattgagcaagtttgctattgtattgtaatgtttctctcaggtttgttcttcctatcatgtttgatattccatgaataattgagatcagccctatgtaagttaagatcataatatgtggaacaaatggaattgtaagtgctttcaaagggtaatatttataagaaagtgtccgaaaaatgtttcttcagcttgagaaattttagaatgataggaagtttctcgagttagccttcatgcaattttgtagattaaaacataaaatttgtccagaacttaaagatttagatgccttcctaaattgttacaatgctttaccaaatctatgacttctacataacacaaaccagtggtcaaatgtaaacactatattgtagatttactgtaggttttcaaccttttttagatttatgcatgtggacatttttataatgtaattacaatcaccacaaggttagcttttttaattgcagacagtaatgcatgtcacactaatatgtagtggccttttcaaggcctagtcccagggaaaacattttgtagagtataggggagtgggaggaaggggaggaataattttttatttaaagttgatttctgcactatctttttctcagttacctgcatgaataaataatgagaaatattttgtgactttaattggtaaatatgttacaaaaccaagtacttaatcttttacatcatgtcttcagctatttgtattttaaccagtaatttcaatggtctgaaacatgattctgagcttcacataatatcttaactgtggaactcaaaagtttgatcactgaatttggcagttattattacctaggtacccccgctgttacacaggtgtttagatacgtgttcctgaatgaagctgcttttgaattttgttatgttgaaatgcaagaaataacaatgatggcagcaattaaggtcacagaaatcattaggtaaaggaaaaccaatgaggagttctgcagttttcttttaataagtaaagtgagacttgggtggtgggaagaaggaaggtgggaagaaggaattagacactctgcctgccactctgcgtgtgtgtgctctcgcgcacgtgctgtctatatggaagccactcccttttctttcctttgaaactggtaaggttaaaataggggagaaatcctacatgttggaatgatagctttttggaaaatttaagaaactctccaggctctccatcttgatttatgcttgagttgttatgtgccatatttgctttgaactctgattatcagaagttttactaaaactttgaaataattcactttcatctgctttctagattttgtacatctcagtccataaagcaaagcttgttgatagtgtagttttctaaacgctgcaaatttgcagcctttaccactacaaagaagtttggatgagggattttttttttctttgtcaaaatagttcctgtttctgtagaaatttcatttttagattaaactgtgatggatgagctatcataattcaagtatacatttcttttttctatcagatattcattgtcatgcagtagtagtaaaaacatcaaagatgcagcaagcttattaagtattattttctaactttgataatataaacagttatgtcccctataaatctggtcagcaacctcttttgattttgttgggtaagttaaatagtctgtagtaggtagagtactgggtacaagtggtccaaactaagataagagactaaaataaaatgctaaatcttaaaagaaactgggtttatgcactaaacgttttgtgccttggtctaatattaacatgatgtatgtgtaaactgacaaaaaaaaaaaaaaaaaaaaaaaccagtgttgaatcatgctatatttcccatcatcccagattgctaaatgttctttccaagaagtctgaatgaattattatatacatttgctatcatacatgacagttgtgtcattattagagatttcagtaattaaaatgggaaacagaagcctaagttatttaccttatcaaaaccacgttccttggaaccacattattatgatggtttttgtgctcttgtacgttggatgtcttaagctgagtacagtttaggggatcctttctaatgacaggaaggcactgctttcctcaacactgtgatctgacctgtgacaagtctgtactatccactatgtaaatggctcacaagtcaattgcaaacaaactgaatgtacaaatcttagtgctggtgctgaaatctcttcagaatagtcatcatgatttaaaagtttgtttaaaaatttgcaagcatcaagtgtcaatcaaaactgaagatgaaacactaatgaatgttgaattctcatgcttttaggtgtacttcctttttagaattttcagttttctgctatttttaccgtaactatttcgtttaaatttgtttcatttaagtttcctacatgctaacttcgtttgtgcgattgaaataaaattgcagtatatatatgttgcttgtttgtgacacttagataatcttctgaaataatttgttttaaagtaagttatattggatgtgaaaaacaccttttaaagtccaagactttactacttaaaagtttacatgtcacgtcactattctttacagatttcatagaagtcgtgaatactaagtaatgtatacaaaagaaatatgtgatgatgtgtctactttttgtttgaaataactgttgggtgttccctcttcttattttctctctgcccaccttgacacagtaacttcctcttatagtcaagatgatgattaagtgtttaatttttattccattttgttctgcaacacgttcagatacttaaaactcattcatgcagttagaattatcctttatgtagtttgcatggtaaaggacattgtgtggtaaagggcattattgagtaatgaattttaagtatagcaaaatatgtatagtgtttatacatgatgctgatttcttaaaacctacatataagcagtagtactttttctctattataaagtattaattttgagttccattttataattctgatgtcttcattagaaatacaaaaatacaatccttgtattttttctttgaccagacccaaattttccccttcccccctccattctcctctccacttctcgtggaccgcgtgttcccaatattcattaacatttgcagccattacagagttacagttgtaaaattttcagctgtttttttttttttttttttgctctagcctgtctcatgttcttgcttctcttcatatgtaagtcagtatttttgtctacaaattaaaagtcacttgtcattcaaaaatgagttaagtaacatgataatcttttaaatttacctagctacaacttttatgtctcttgtaaatttatatatactttcagtgccattgtgaagaattggccttttaattctaagtagtattaccctatgaagcacagtgtgcaaaggtatgctacaaggtctctttaattcctgtgtggccattataattttataacaccattaccctttaaattctaccgattataagcagcgtaaaagtaactatataaagcaaacatcgcaaaggaactctgcaggagctcttaattcctttatgtagctatcataaaattcactttcctgaagacatttactctcattcacttccaaactccaaacctttttctggtagcaccacttttgtttttaatagaaagatgagttcatatctgtacatctctccaaagctctaaggaatgagaaaaggatcctagtatattgaaattactgatgtttaatacctctgccttttcactaaaagccatttaatatttttaaagtcaaaacttgacatacaggtatttataaggaatctccatgactctgaaggaatgaaattgatgtaggtagctttggctatgtaaagacatagtagaggacaattacttaaagaagagttttcttttgaggatttgtagatttgactaagcagctgaagtcagtaacccctcaagaaaggccgtttatagaagccaagaactgttggaggtctgtgatgcaggtttttctgttcccaacatcaaaagctgtggattatttggtgtgttcccctttatgttatctctcgataatttttgagacatcaagattttttaaaatatcaatactggaaagatgaaaccttcaaattaaaacctaaaattgattagaaagaaaagtaaaatattaatgcagtaaatttaggatggttacagatactcaccatcaacataaataaatggagttctaggataaattatttgtggaatactaatggtcaagtcacataagagtaaaatcttttggtgaggagacacatttgacaactgctaaagaattaactaaatttgtctttctaaatagttttctttataaagtaacagaaacattgtaaaaggataaataaatgactgtcataatgacttaggatgttgtaagaatgtctgccacatttattggttatttctgttgaaatctgaaggaatcgatacatctgaaaattgagaaagggaaataggactgtccccgttacagatactctgtgatgcacacaaccttctaaacggaagtgttagtatcatttaaagcacatagtaggccttgagtatttgcagattaacatgcagaaaaaatcaaagatgaagccccaattaagtgtttgaaccaaagaatcacagtcactgagctgcacccccgttctgtgaagcatgttaaatactcataaagagcagagagcagggcccgtagacgcttctggtgtaggacacaggaattctaggcagagggagaaaattaggggccccagttggtggctgagagtaaaaagaatataccatttgagtagtgctgttctttttcctcagtttttaaagacatataattcctagtagttaggacatctaaatagctcggtaaactggtcagaggcgggaggattgcttgaggccagaagttttgagatcagcctgggcaacatagcgaggcctgtctccttaaaaaataaataaataaataataaataaataaataaataaaaaccttgtccttgactattgtgctgtctgctgcccctttgtagggatggggttggggtcagaataagcatgtgcatgaatggcggaaagctttggtggtgtttgtttgtttgtttgttttttgagaggtgggggagtcagcagtgaacctttctggttaaagaacaacgtacataatttctattatgagatttagaaggttaaatacttttttttttcaggcctaccaagttgatagaccaaaagtatatagtagaacagcacagtagaaaaaatttaaaagtgaatttcttatggtccaaaaggatggatagtcacagtccataacctttcataatatatgctggaattggaatctcttgtcatcttgctttgctctgaattttagaactagaagtgtgcatgtatgtcaaaagattatgcagagctattttctttgctaacaatgtaaacatttgcaccccatgaatgggactttataatctggaagtgagcctaaggttgcgtatactgaagtcatgttttaaaagttaaggttgacttaaacatatacaaggctgtattttaattgtaactagaaatcatttactatgcatacagaacctcatgtatcttatcatggaatttgtgaattaatgggcccttgccgaacttcaagggtaagggaaactggtaacaacttgttttaaatcaacatactataagctcctgcttgcttgactcaagttgtttgaaaatctgaattaaacaggatctcattgtcaggaaacatcttctaagcttgacatctacgtttaagaagggaacgtggaagagaaggtgagacatgaaactaaaacagctgggagggtaggatcagactgcacctgatttttggaccaaagtttcatataggaataaataaaaaggaggaccacttgtgagccaacctaggaaggacttgccagaaagtagcagctcctgctgcaaaatacagtgccttcaaaatgattctctgtgtgaattgcatgcaatttcatgtaaccataaagtgtaacctgtatgtgcatgacatgtgtctagaatgtgtaaagttaggattcagcaggaaggggcctggccctgtcactgtggtggatcagtggacctgctgaagtcactggactcatgtgacttaggtttgcagcatcagacccctgtgtttgcattaagtggccacatcgttgaaatcggatcaatctctccctcagctttctttcctactttgcagctttgctggttttaactgcttcattcttctgcttcttggtatccttttttcttttgaaataaaaacatgaaatacttaattcaaaaaaaaaatg

SEQ ID NO: 303521 - DNA, 6408 bp, Homo sapiens
gtgggaggcggcggccgcctggggaccagctccgcgcctcggcctctccgccccctccccagcctttctctcgccctcttctcccacactcccggccggcgcctcggctttgtgcgaggagatggtgtagccccctggccgccgaaggaggagccggacacttgtctcccgtctccgagctgctccccacccctggaggagagacccccccctcggctcggcgccttctgcgtctcccggctggtggggaagcctctgcgccgccggcaccatgagtgaacagagtatctgtcaggcaagagctgctgtgatggtttatgatgatgccaataagaagtgggtgccagctggtggctcaactggattcagcagagttcatatctatcaccatacaggcaacaacacattcagagtggtgggcaggaagattcaggaccatcaggtcgtgataaactgtgccattcctaaagggttgaagtacaatcaagctacacagaccttccaccagtggcgagatgctagacaggtgtatggtctcaactttggcagcaaagaggatgccaatgtcttcgcaagtgccatgatgcatgccttagaagtgttaaattcacaggaaacagggccaacattgcctagacaaaactcacaactacctgctcaagttcaaaatggcccatcccaagaagaattggaaattcaaagaagacaactacaagaacagcaacggcaaaaggagctggagcgggaaaggctggagcgagaaagaatggaaagagaaaggttggagagagagaggttagaaagggaaaggctggagagggagcgactggaacaagaacagctggagagagagagacaagaacgggaacggcaggaacgcctggagcggcaggaacgcctggagcggcaggaacgcctggagcggcaggaacgcctggatcgggagaggcaagaaagacaagaacgagagaggctggagagactggaacgggagaggcaagaaagggagcgacaagagcagttagaaagggaacagctggaatgggagagagagcgcagaatatcaagtgctgctgcccctgcctctgttgagactcctctaaactctgtgctgggagactcttctgcttctgagccaggctctccatcttgatttatgcttgagttgttatgtgccatatttgctttgaactctgattatcagaagttttactaaaactttgaaataattcactttcatctgctttctagattttgtacatctcagtccataaagcaaagcttgttgatagtgtagttttctaaacgctgcaaatttgcagcctttaccactacaaagaagtttggatgagggattttttttttctttgtcaaaatagttcctgtttctgtagaaatttcatttttagattaaactgtgatggatagtaaaaaagaaaaattttttttttttacaatattttccttggcgcccggttgttggaaaacccctaaaagggggccggcgtttttttttatttttttttttcaaaaaaaaaaaaggcgggcctttttcttttttaatattggcctctggggtaccccacctttttttaatttaccgtttgtgcccacaaaatttgggcaacaacctcttttgattttgttgggtaagttaaatagtctgtagtaggtagagtactgggtacaagtggtccaaactaagataagagactaaaataaaatgctaaatcttaaaagaaactgggtttatgcactaaacgttttgtgccttggtctaatattaacatgatgtatgtgtaaactgacaaaaaaaaaaaaaaaaaaaaaaaccagtgttgaatcatgctatatttcccatcatcccagattgctaaatgttctttccaagaagtctgaatgaattattatatacatttgctatcatacatgacagttgtgtcattattagagatttcagtaattaaaatgggaaacagaagcctaagttatttaccttatcaaaaccacgttccttggaaccacattattatgatggtttttgtgctcttgtacgttggatgtcttaagctgagtacagtttaggggatcctttctaatgacaggaaggcactgctttcctcaacactgtgatctgacctgtgacaagtctgtactatccactatgtaaatggctcacaagtcaattgcaaacaaactgaatgtacaaatcttagtgctggtgctgaaatctcttcagaatagtcatcatgatttaaaagtttgtttaaaaatttgcaagcatcaagtgtcaatcaaaactgaagatgaaacactaatgaatgttgaattctcatgcttttaggtgtacttcctttttagaattttcagttttctgctatttttaccgtaactatttcgtttaaatttgtttcatttaagtttcctacatgctaacttcgtttgtgcgattgaaataaaattgcagtatatatatgttgcttgtttgtgacacttagataatcttctgaaataatttgttttaaagtaagttatattggatgtgaaaaacaccttttaaagtccaagactttactacttaaaagtttacatgtcacgtcactattctttacagatttcatagaagtcgtgaatactaagtaatgtatacaaaagaaatatgtgatgatgtgtctactttttgtttgaaataactgttgggtgttccctcttcttattttctctctgcccaccttgacacagtaacttcctcttatagtcaagatgatgattaagtgtttaatttttattccattttgttctgcaacacgttcagatacttaaaactcattcatgcagttagaattatcctttatgtagtttgcatggtaaaggacattgtgtggtaaagggcattattgagtaatgaattttaagtatagcaaaatatgtatagtgtttatacatgatgctgatttcttaaaacctacatataagcagtagtactttttctctattataaagtattaattttgagttccattttataattctgatgtcttcattagaaatacaaaaatacaatccttgtattttttctttgaccagacccaaattttccccttcccccctccattctcctctccacttctcgtggaccgcgtgttcccaatattcattaacatttgcagccattacagagttacagttgtaaaattttcagctgtttttttttttttttttttgctctagcctgtctcatgttcttgcttctcttcatatgtaagtcagtatttttgtctacaaattaaaagtcacttgtcattcaaaaatgagttaagtaacatgataatcttttaaatttacctagctacaacttttatgtctcttgtaaatttatatatactttcagtgccattgtgaagaattggccttttaattctaagtagtattaccctatgaagcacagtgtgcaaaggtatgctacaaggtctctttaattcctgtgtggccattataattttataacaccattaccctttaaattctaccgattataagcagcgtaaaagtaactatataaagcaaacatcgcaaaggaactctgcaggagctcttaattcctttatgtagctatcataaaattcactttcctgaagacatttactctcattcacttccaaactccaaacctttttctggtagcaccacttttgtttttaatagaaagatgagttcatatctgtacatctctccaaagctctaaggaatgagaaaaggatcctagtatattgaaattactgatgtttaatacctctgccttttcactaaaagccatttaatatttttaaagtcaaaacttgacatacaggtatttataaggaatctccatgactctgaaggaatgaaattgatgtaggtagctttggctatgtaaagacatagtagaggacaattacttaaagaagagttttcttttgaggatttgtagatttgactaagcagctgaagtcagtaacccctcaagaaaggccgtttatagaagccaagaactgttggaggtctgtgatgcaggtttttctgttcccaacatcaaaagctgtggattatttggtgtgttcccctttatgttatctctcgataatttttgagacatcaagattttttaaaatatcaatactggaaagatgaaaccttcaaattaaaacctaaaattgattagaaagaaaagtaaaatattaatgcagtaaatttaggatggttacagatactcaccatcaacataaataaatggagttctaggataaattatttgtggaatactaatggtcaagtcacataagagtaaaatcttttggtgaggagacacatttgacaactgctaaagaattaactaaatttgtctttctaaatagttttctttataaagtaacagaaacattgtaaaaggataaataaatgactgtcataatgacttaggatgttgtaagaatgtctgccacatttattggttatttctgttgaaatctgaaggaatcgatacatctgaaaattgagaaagggaaataggactgtccccgttacagatactctgtgatgcacacaaccttctaaacggaagtgttagtatcatttaaagcacatagtaggccttgagtatttgcagattaacatgcagaaaaaatcaaagatgaagccccaattaagtgtttgaaccaaagaatcacagtcactgagctgcacccccgttctgtgaagcatgttaaatactcataaagagcagagagcagggcccgtagacgcttctggtgtaggacacaggaattctaggcagagggagaaaattaggggccccagttggtggctgagagtaaaaagaatataccatttgagtagtgctgttctttttcctcagtttttaaagacatataattcctagtagttaggacatctaaatagctcggtaaactggtcagaggcgggaggattgcttgaggccagaagttttgagatcagcctgggcaacatagcgaggcctgtctccttaaaaaataaataaataaataataaataaataaataaataaaaaccttgtccttgactattgtgctgtctgctgcccctttgtagggatggggttggggtcagaataagcatgtgcatgaatggcggaaagctttggtggtgtttgtttgtttgtttgttttttgagaggtgggggagtcagcagtgaacctttctggttaaagaacaacgtacataatttctattatgagatttagaaggttaaatacttttttttttcaggcctaccaagttgatagaccaaaagtatatagtagaacagcacagtagaaaaaatttaaaagtgaatttcttatggtccaaaaggatggatagtcacagtccataacctttcataatatatgctggaattggaatctcttgtcatcttgctttgctctgaattttagaactagaagtgtgcatgtatgtcaaaagattatgcagagctattttctttgctaacaatgtaaacatttgcaccccatgaatgggactttataatctggaagtgagcctaaggttgcgtatactgaagtcatgttttaaaagttaaggttgacttaaacatatacaaggctgtattttaattgtaactagaaatcatttactatgcatacagaacctcatgtatcttatcatggaatttgtgaattaatgggcccttgccgaacttcaagggtaagggaaactggtaacaacttgttttaaatcaacatactataagctcctgcttgcttgactcaagttgtttgaaaatctgaattaaacaggatctcattgtcaggaaacatcttctaagcttgacatctacgtttaagaagggaacgtggaagagaaggtgagacatgaaactaaaacagctgggagggtaggatcagactgcacctgatttttggaccaaagtttcatataggaataaataaaaaggaggaccacttgtgagccaacctaggaaggacttgccagaaagtagcagctcctgctgcaaaatacagtgccttcaaaatgattctctgtgtgaattgcatgcaatttcatgtaaccataaagtgtaacctgtatgtgcatgacatgtgtctagaatgtgtaaagttaggattcagcaggaaggggcctggccctgtcactgtggtggatcagtggacctgctgaagtcactggactcatgtgacttaggtttgcagcatcagacccctgtgtttgcattaagtggccacatcgttgaaatcggatcaatctctccctcagctttctttcctactttgcagctttgctggttttaactgcttcattcttctgcttcttggtatccttttttcttttgaaataaaaacatgaaatacttaattcaaaaaaaaaatg

SEQ ID NO: 303522 - DNA, 2929 bp, Homo sapiens
ccaccgccccctcctccccctcctctccctaatcaagtaccccctcctcctccaccacctcctgccccacccctccctgcatctggattctttttggcatccatgtcagaagacaatcgccctttaactggacttgcagctgcaattgccggagcaaaacttaggaaagtgtcacggatggaggatacctctttcccaagtggagggaatgctattggtgtgaactccgcctcatctaaaacagatacaggccgtggaaatggaccccttcctttagggggtagtggtttaatggaagaaatgagtgccctgctggccaggaggagaagaattgctgaaaagggatcaacaatagaaacagaacaaaaagaggacaaaggtgaagattcagagcctgtaacttctaaggcctcttcaacaagtacacctgaaccaacaagaaaaccttgggaaagaacaaatacaatgaatggcagcaagtcacctgttatctccagaccaaaatccacacccttatcacagcccagtgccaatggagtccagacggaaggacttgactatgacaggctgaagcaggacattttagatgaaatgagaaaagaattaacaaagctaaaagaagagctcattgatgcaatcaggcaggaactgagcaagtcaaatactgcatagaggaacagactaaggagagataggactttaatctggaggaaaaatatcctacaaacaacaactgttcacaacagcaaacccctacatttatgagctgtaagaagaaaatggagacaaacagaaggagggaaaaaccaacctactctgaaagccttcagacattatgactctggtgataagctctttccctctccgtttgctgcttttttctggcctttacaacagaatggaagagaatcatttaagagttcctgtaacagttatgcagaaaatactaaaacccatcaggcaagatcaccacgcattgaaatattttcatatcaagataaagtcgcacattttccacaatacattgctaaaataaagaggagaaaggcttaggaagtttttttgcagagagtgctggtaaagaattgagcaagtttgctattgtattgtaatgtttctctcaggtttgttcttcctatcatgtttgatattccatgaataattgagatcagccctatgtaagttaagatcataatatgtggaacaaatggaattgtaagtgctttcaaagggtaatatttataagaaagtgtccgaaaaatgtttcttcagcttgagaaattttagaatgataggaagtttctcgagttagccttcatgcaattttgtagattaaaacataaaatttgtccagaacttaaagatttagatgccttcctaaattgttacaatgctttaccaaatctatgacttctacataacacaaaccagtggtcaaatgtaaacactatattgtagatttactgtaggttttcaaccttttttagatttatgcatgtggacatttttataatgtaattacaatcaccacaaggttagcttttttaattgcagacagtaatgcatgtcacactaatatgtagtggccttttcaaggcctagtcccagggaaaacattttgtagagtataggggagtgggaggaaggggaggaataattttttatttaaagttgatttctgcactatctttttctcagttacctgcatgaataaataatgagaaatattttgtgactttaattggtaaatatgttacaaaaccaagtacttaatcttttacatcatgtcttcagctatttgtattttaaccagtaatttcaatggtctgaaacatgattctgagcttcacataatatcttaactgtggaactcaaaagtttgatcactgaatttggcagttattattacctaggtacccccgctgttacacaggtgtttagatacgtgttcctgaatgaagctgcttttgaattttgttatgttgaaatgcaagaaataacaatgatggcagcaattaaggtcacagaaatcattaggtaaaggaaaaccaatgaggagttctgcagttttcttttaataagtaaagtgagacttgggtggtgggaagaaggaaggtgggaagaaggaattagacactctgcctgccactctgcgtgtgtgtgctctcgcgcacgtgctgtctatatggaagccactcccttttctttcctttgaaactggtaaggttaaaataggggagaaatcctacatgttggaatgatagctttttggaaaatttaagaaactctccaggctctccatcttgatttatgcttgagttgttatgtgccatatttgctttgaactctgattatcagaagttttactaaaactttgaaataattcactttcatctgctttctagattttgtacatctcagtccataaagcaaagcttgttgatagtgtagttttctaaacgctgcaaatttgcagcctttaccactacaaagaagtttggatgagggattttttttttctttgtcaaaatagttcctgtttctgtagaaatttcatttttagattaaactgtgatggatgagctatcataattcaagtatacatttcttttttctatcagatattcattgtcatgcagtagtagtaaaaacatcaaagatgcagcaagcttattaagtattattttctaaaagaaataggaggcattttcatctttattattgtacttttggttatgcaaacactttgataatataaacagttatgtcccctataaatctggtcagcaacctcttttgattttgttgggtaagttaaatagtctgtagtaggtagagtactgggtacaagtggtccaaactaagataagagactaaaataaaatgctaaatcttaaaagaaaccgtcgattcgaggggtcctcttggt

SEQ ID NO: 303523 - DNA, 4435 bp, Homo sapiens
gggagtgtctagaggatccctcaaacgtatagaacacgttccttggaaccacattattatgatggtttttgtgctcttgtacgttggatgtcttaagctgagtacagtttaggggatcctttctaatgacaggaaggcactgctttcctcaacactgtgatctgacctgtgacaagtctgtactatccactatgtaaatggctcacaagtcaattgcaaacaaactgaatgtacaaatcttagtgctggtgctgaaatctcttcagaatagtcatcatgatttaaaagtttgtttaaaaatttgcaagcatcaagtgtcaatcaaaactgaagatgaaacactaatgaatgttgaattctcatgcttttaggtgtacttcctttttagaattttcagttttctgctatttttaccgtaactatttcgtttaaatttgtttcatttaagtttcctacatgctaacttcgtttgtgcgattgaaataaaattgcagtatatatatgttgcttgtttgtgacacttagataatcttctgaaataatttgttttaaagtaagttatattggatgtgaaaaacaccttttaaagtccaagactttactacttaaaagtttacatgtcacgtcactattctttacagatttcatagaagtcgtgaatactaagtaatgtatacaaaagaaatatgtgatgatgtgtctactttttgtttgaaataactgttgggtgttccctcttcttattttctctctgcccaccttgacacagtaacttcctcttatagtcaagatgatgattaagtgtttaatttttattccattttgttctgcaacacgttcagatacttaaaactcattcatgcagttagaattatcctttatgtagtttgcatggtaaaggacattgtgtggtaaagggcattattgagtaatgaattttaagtatagcaaaatatgtatagtgtttatacatgatgctgatttcttaaaacctacatataagcagtagtactttttctctattataaagtattaattttgagttccattttataattctgatgtcttcattagaaatacaaaaatacaatccttgtattttttctttgaccagacccaaattttccccttcccccctccattctcctctccacttctcgtggaccgcgtgttcccaatattcattaacatttgcagccattacagagttacagttgtaaaattttcagctgtttttttttttttttttttgctctagcctgtctcatgttcttgcttctcttcatatgtaagtcagtatttttgtctacaaattaaaagtcacttgtcattcaaaaatgagttaagtaacatgataatcttttaaatttacctagctacaacttttatgtctcttgtaaatttatatatactttcagtgccattgtgaagaattggccttttaattctaagtagtattaccctatgaagcacagtgtgcaaaggtatgctacaaggtctctttaattcctgtgtggccattataattttataacaccattaccctttaaattctaccgattataagcagcgtaaaagtaactatataaagcaaacatcgcaaaggaactctgcaggagctcttaattcctttatgtagctatcataaaattcactttcctgaagacatttactctcattcacttccaaactccaaacctttttctggtagcaccacttttgtttttaatagaaagatgagttcatatctgtacatctctccaaagctctaaggaatgagaaaaggatcctagtatattgaaattactgatgtttaatacctctgccttttcactaaaagccatttaatatttttaaagtcaaaacttgacatacaggtatttataaggaatctccatgactctgaaggaatgaaattgatgtaggtagctttggctatgtaaagacatagtagaggacaattacttaaagaagagttttcttttgaggatttgtagatttgactaagcagctgaagtcagtaacccctcaagaaaggccgtttatagaagccaagaactgttggaggtctgtgatgcaggtttttctgttcccaacatcaaaagctgtggattatttggtgtgttcccctttatgttatctctcgataatttttgagacatcaagattttttaaaatatcaatactggaaagatgaaaccttcaaattaaaacctaaaattgattagaaagaaaagtaaaatattaatgcagtaaatttaggatggttacagatactcaccatcaacataaataaatggagttctaggataaattatttgtggaatactaatggtcaagtcacataagagtaaaatcttttggtgaggagacacatttgacaactgctaaagaattaactaaatttgtctttctaaatagttttctttataaagtaacagaaacattgtaaaaggataaataaatgactgtcataatgacttaggatgttgtaagaatgtctgccacatttattggttatttctgttgaaatctgaaggaatcgatacatctgaaaattgagaaagggaaataggactgtccccgttacagatactctgtgatgcacacaaccttctaaacggaagtgttagtatcatttaaagcacatagtaggccttgagtatttgcagattaacatgcagaaaaaatcaaagatgaagccccaattaagtgtttgaaccaaagaatcacagtcactgagctgcacccccgttctgtgaagcatgttaaatactcataaagagcagagagcagggcccgtagacgcttctggtgtaggacacaggaattctaggcagagggagaaaattaggggccccagttggtggctgagagtaaaaagaatataccatttgagtagtgctgttctttttcctcagtttttaaagacatataattcctagtagttaggacatctaaatagctcggtaaactggtcagaggcgggaggattgcttgaggccagaagttttgagatcagcctgggcaacatagcgaggcctgtctccttaaaaaataaataaataaataataaataaataaataaataaaaaccttgtccttgactattgtgctgtctgctgcccctttgtagggatggggttggggtcagaataagcatgtgcatgaatggcggaaagctttggtggtgtttgtttgtttgtttgttttttgagaggtgggggagtcagcagtgaacctttctggttaaagaacaacgtacataatttctattatgagatttagaaggttaaatacttttttttttcaggcctaccaagttgatagaccaaaagtatatagtagaacagcacagtagaaaaaatttaaaagtgaatttcttatggtccaaaaggatggatagtcacagtccataacctttcataatatatgctggaattggaatctcttgtcatcttgctttgctctgaattttagaactagaagtgtgcatgtatgtcaaaagattatgcagagctattttctttgctaacaatgtaaacatttgcaccccatgaatgggactttataatctggaagtgagcctaaggttgcgtatactgaagtcatgttttaaaagttaaggttgacttaaacatatacaaggctgtattttaattgtaactagaaatcatttactatgcatacagaacctcatgtatcttatcatggaatttgtgaattaatgggcccttgccgaacttcaagggtaagggaaactggtaacaacttgttttaaatcaacatactataagctcctgcttgcttgactcaagttgtttgaaaatctgaattaaacaggatctcattgtcaggaaacatcttctaagcttgacatctacgtttaagaagggaacgtggaagagaaggtgagacatgaaactaaaacagctgggagggtaggatcagactgcacctgatttttggaccaaagtttcatataggaataaataaaaaggaggaccacttgtgagccaacctaggaaggacttgccagaaagtagcagctcctgctgcaaaatacagtgccttcaaaatgattctctgtgtgaattgcatgcaatttcatgtaaccataaagtgtaacctgtatgtgcatgacatgtgtctagaatgtgtaaagttaggattcagcaggaaggggcctggccctgtcactgtggtggatcagtggacctgctgaagtcactggactcatgtgacttaggtttgcagcatcagacccctgtgtttgcattaagtggccacatcgttgaaatcggatcaatctctccctcagctttctttcctactttgcagctttgctggttttaactgcttcattcttctgcttcttggtatccttttttcttttgaaataaaaacatgaaatacttaattcaaaaaaaaaatg

SEQ ID NO: 303524 - DNA, 1207 bp, Homo sapiens
gtgggaggcggcggccgcctggggaccagctccgcgcctcggcctctccgccccctccccagcctttctctcgccctcttctcccacactcccggccggcgcctcggctttgtgcgaggagatggtgtagccccctggccgccgaaggaggagccggacacttgtctcccgtctccgagctgctccccacccctggaggagagacccccccctcggctcggcgccttctgcgtctcccggctggtggggaagcctctgcgccgccggcaccatgagtgaacagagtatctgtcaggcaagagctgctgtgatggtttatgatgatgccaataagaagtgggtgccagctggtggctcaactggattcagcagagttcatatctatcaccatacaggcaacaacacattcagagtggtgggcaggaagattcaggaccatcaggtcgtgataaactgtgccattcctaaagggttgaagtacaatcaagctacacagaccttccaccagtggcgagatgctagacaggtgtatggtctcaactttggcagcaaagaggatgccaatgtcttcgcaagtgccatgatgcatgccttagaagtgttaaattcacaggaaacagggccaacattgcctagacaaaactcacaactacctgctcaagttcaaaatggcccatcccaagaagaattggaaattcaaagaagacaactacaagaacagcaacggcaaaaggagctggagcgggaaaggctggagcgagaaagaatggaaagagaaaggttggagagagagaggttagaaagggaaaggctggagagggagcgactggaacaagaacagctggagagagagagacaagaacgggaacggcaggaacgcctggagcggcaggaacgcctggagcggcaggaacgcctggatcgggagaggcaagaaagacaagaacgagagaggctggagagactggaacgggagaggcaagaaagggagcgacaagagcagttagaaagggaacagctggaatgggagagagagcgcagaatatcaagtgctggtaagaagtttacaaactcttctgtgttcttgtatctgagcttggatgatgtctcttgtgcagtcatgtgttaaaatatttcacatttgagatgtttgggattaagccatacaatttgaaattatgaataaatatgcagcaattactacttt

SEQ ID NO: 303525 - DNA, 1849 bp, Homo sapiens
cttttcttttttggagaacatgaagtgtttctaacaaaactgaatgagctagaaagaattctattttgagacatctgtagttgatgcaaagtatttctgtaatcctcaatgacagtacttacatatttgcatagaattttttttttaatttttgaggaaacctctctggagtctgtatttataggagcatcctgaaagtccctattatgtagctggtgggagcgagagagggacagccacactcgtgctgtgagcagagcacaacttcaggcagagtgaatgccttctgagttctcattggaagctttctgttgctcagcctctggcagatttcagaaccttctacttaagccaggtgtggtggtgcgtgctcctaggcacagcgactcggggggctgaggcagaaggatcacttgagcccaaagttggaggccagcctgggcaacatagcgaggcctgtctccttaaaaaataaataaataaataataaataaataaataaataaaaaccttgtccttgactattgtgctgtctgctgcccctttgtagggatggggttggggtcagaataagcatgtgcatgaatggcggaaagctttggtggtgtttgtttgtttgtttgttttttgagaggtgggggagtcagcagtgaacctttctggttaaagaacaacgtacataatttctattatgagatttagaaggttaaatacttttttttttcaggcctaccaagttgatagaccaaaagtatatagtagaacagcacagtagaaaaaatttaaaagtgaatttcttatggtccaaaaggatggatagtcacagtccataacctttcataatatatgctggaattggaatctcttgtcatcttgctttgctctgaattttagaactagaagtgtgcatgtatgtcaaaagattatgcagagctattttctttgctaacaatgtaaacatttgcaccccatgaatgggactttataatctggaagtgagcctaaggttgcgtatactgaagtcatgttttaaaagttaaggttgacttaaacatatacaaggctgtattttaattgtaactagaaatcatttactatgcatacagaacctcatgtatcttatcatggaatttgtgaattaatgggcccttgccgaacttcaagggtaagggaaactggtaacaacttgttttaaatcaacatactataagctcctgcttgcttgactcaagttgtttgaaaatctgaattaaacaggatctcattgtcaggaaacatcttctaagcttgacatctacgtttaagaagggaacgtggaagagaaggtgagacatgaaactaaaacagctgggagggtaggatcagactgcacctgatttttggaccaaagtttcatataggaataaataaaaaggaggaccacttgtgagccaacctaggaaggacttgccagaaagtagcagctcctgctgcaaaatacagtgccttcaaaatgattctctgtgtgaattgcatgcaatttcatgtaaccataaagtgtaacctgtatgtgcatgacatgtgtctagaatgtgtaaagttaggattcagcaggaaggggcctggccctgtcactgtggtggatcagtggacctgctgaagtcactggactcatgtgacttaggtttgcagcatcagacccctgtgtttgcattaagtggccacatcgttgaaatcggatcaatctctccctcagctttctttcctactttgcagctttgctggttttaactgcttcattcttctgcttcttggtatccttttttcttttgaaataaaaacatgaaatacttaattcaaaaaaaaaatg

SEQ ID NO: 303526 - DNA, 1285 bp, Homo sapiens
gtgggaggcggcggccgcctggggaccagctccgcgcctcggcctctccgccccctccccagcctttctctcgccctcttctcccacactcccggccggcgcctcggctttgtgcgaggagatggtgtagccccctggccgccgaaggaggagccggacacttgtctcccgtctccgagctgctccccacccctggaggagagacccccccctcggctcggcgccttctgcgtctcccggctggtggggaagcctctgcgccgccggcaccatgagtgaacagagtatctgtcaggcaagagctgctgtgatggtttatgatgatgccaataagaagtgggtgccagctggtggctcaactggattcagcagagttcatatctatcaccatacaggcaacaacacattcagagtggtgggcaggaagattcaggaccatcaggtcgtgataaactgtgccattcctaaagggttgaagtacaatcaagctacacagaccttccaccagtggcgagatgctagacaggtgtatggtctcaactttggcagcaaagaggatgccaatgtcttcgcaagtgccatgatgcatgccttagaagtgttaaattcacaggaaacagggccaacattgcctagacaaaactcacaactacctgctcaagttcaaaatggcccatcccaagaagaattggaaattcaaagaagacaactacaagaacagcaacggcaaaaggagctggagcgggaaaggctggagcgagaaagaatggaaagagaaaggttggagagagagaggttagaaagggaaaggctggagagggagcgactggaacaagaacagctggagagagagagacaagaacgggaacggcaggaacgcctggagcggcaggaacgcctggagcggcaggaacgcctggagcggcaggaacgcctggatcgggagaggcaagaaagacaagaacgagagaggctggagagactggaacgggagaggcaagaaagggagcgacaagagcagttagaaagggaacagctggaatgggagagagagcgcagaatatcaagtgctgctgcccctgcctctgttgagactcctctaaactctgtgctgggagactcttctgcttctgagccaggcttgcaggcagcctctcagccggccgagactccatcccaacagggcattgtcttgggaccacttgcacctccacctcctccaccactcccaccagggcctgcacaggcttcagtagccctccctcctcccccagggcccctccac

SEQ ID NO: 303527 - DNA, 1084 bp, Homo sapiens
gtgggaggcggcggccgcctggggaccagctccgcgcctcggcctctccgccccctccccagcctttctctcgccctcttctcccacactcccggccggcgcctcggctttgtgcgaggagatggtgtagccccctggccgccgaaggaggagccggacacttgtctcccgtctccgagctgctccccacccctggaggagagacccccccctcggctcggcgccttctgcgtctcccggctggtggggaagcctctgcgccgccggcaccatgagtgaacagagtatctgtcaggcaagagctgctgtgatggtttatgatgatgccaataagaagtgggtgccagctggtggctcaactggattcagcagagttcatatctatcaccatacaggcaacaacacattcagagtggtgggcaggaagattcaggaccatcaggtcgtgataaactgtgccattcctaaagggttgaagtacaatcaagctacacagaccttccaccagtggcgagatgctagacaggtgtatggtctcaactttggcagcaaagaggatgccaatgtcttcgcaagtgccatgatgcatgccttagaagtgttaaattcacaggaaacagggccaacattgcctagacaaaactcacaactacctgctcaagttcaaaatggcccatcccaagaagaattggaaattcaaagaagacaactacaagaacagcaacggcaaaaggagctggagcgggaaaggctggagcgagaaagaatggaaagagaaaggttggagagagagaggttagaaagggaaaggctggagagggagcgactggaacaagaacagctggagagagagagacaagaacgggaacggcaggaacgcctggagcggcaggaacgcctggagcggcaggaacgcctggagcggcaggaacgcctggatcgggagaggcaagaaagacaagaacgagagaggtagctctatattgcccaggctggagtagctcattatcgcccaggccttgagtagctcatatcgcccaggctggagtagctcttaattgcccaggcatggagtagctctata

SEQ ID NO: 303528 - DNA, 1154 bp, Homo sapiens
gtgggaggcggcggccgcctggggaccagctccgcgcctcggcctctccgccccctccccagcctttctctcgccctcttctcccacactcccggccggcgcctcggctttgtgcgaggagatggtgtagccccctggccgccgaaggaggagccggacacttgtctcccgtctccgagctgctccccacccctggaggagagacccccccctcggctcggcgccttctgcgtctcccggctggtggggaagcctctgcgccgccggcaccatgagtgaacagagtatctgtcaggcaagagctgctgtgatggtttatgatgatgccaataagaagtgggtgccagctggtggctcaactggattcagcagagttcatatctatcaccatacaggcaacaacacattcagagtggtgggcaggaagattcaggaccatcaggtcgtgataaactgtgccattcctaaagggttgaagtacaatcaagctacacagaccttccaccagtggcgagatgctagacaggtgtatggtctcaactttggcagcaaagaggatgccaatgtcttcgcaagtgccatgatgcatgccttagaagtgttaaattcacaggaaacagggccaacattgcctagacaaaactcacaactacctgctcaagttcaaaatggcccatcccaagaagaattggaaattcaaagaagacaactacaagaacagcaacggcaaaaggagctggagcgggaaaggctggagcgagaaagaatggaaagagaaaggttggagagagagaggttagaaagggaaaggctggagagggagcgactggaacaagaacagctggagagagagagacaagaacgggaacggcaggaacgcctggagcggcaggaacgcctggagcggcaggaacgcctggagcggcaggaacgcctggatcgggagaggcaagaaagacaagaacgagagaggctggagagactggaacgggagaggcaagaaagggagcgacaagagcagttagaaagggaacagctggaatgggagagagagcgcagaatatcaagtgctgtgaacagagtatctgtcaggcaagagctgctgtgatggtttatgatgatgccaataagaagtgggtgccagctggtggctc

SEQ ID NO: 303529 - DNA, 1669 bp, Homo sapiens
gtgggaggcggcggccgcctggggaccagctccgcgcctcggcctctccgccccctccccagcctttctctcgccctcttctcccacactcccggccggcgcctcggctttgtgcgaggagatggtgtagccccctggccgccgaaggaggagccggacacttgtctcccgtctccgagctgctccccacccctggaggagagacccccccctcggctcggcgccttctgcgtctcccggctggtggggaagcctctgcgccgccggcaccatgagtgaacagagtatctgtcaggcaagagctgctgtgatggtttatgatgatgccaataagaagtgggtgccagctggtggctcaactggattcagcagagttcatatctatcaccatacaggcaacaacacattcagagtggtgggcaggaagattcaggaccatcaggtcgtgataaactgtgccattcctaaagggttgaagtacaatcaagctacacagaccttccaccagtggcgagatgctagacaggtgtatggtctcaactttggcagcaaagaggatgccaatgtcttcgcaagtgccatgatgcatgccttagaagtgttaaattcacaggaaacagggccaacattgcctagacaaaactcacaactacctgctcaagttcaaaatggcccatcccaagaagaattggaaattcaaagaagacaactacaagaacagcaacggcaaaaggagctggagcgggaaaggctggagcgagaaagaatggaaagagaaaggttggagagagagaggttagaaagggaaaggctggagagggagcgactggaacaagaacagctggagagagagagacaagaacgggaacggcaggaacgcctggagcggcaggaacgcctggagcggcaggaacgcctggagcggcaggaacgcctggatcgggagaggcaagaaagacaagaacgagagaggctggagagactggaacgggagaggcaagaaagggagcgacaagagcagttagaaagggaacagctggaatgggagagagagcgcagaatatcaagtgctgctccatcttcagacagctccctgtataacgctccacttcctgagtattccagttgccagcctccttcagcacctcctccatcatacgctaaagtcatctcagctccagtgtcagatgccactcctgattatgctgtagtgactgctttgccacctacttccacaccccctacaccaccactgcgacactcagcgacacgttttgcaacatctttaggttcagccttccaccctgttcttccccattacgctacagttcctcgtcctctgaacaaaaactctcgaccttcttctcctgtgaacacaccctcttctcagcctccagctacgaagccctgtgcctggtctacttccaatttttcgcccctccctccatctcctccaataatgattagcagccccccaggcaaagctactggtccaaggcctgtcctccctgtttgtgtttcttctcctgtgccccaaatgcctccatcaccgacagcacccaatgggctggttgctctgtaacatatccagtgtctccaccgcctacctcagggccagcagctcctccgccgccgcctccactgccttccctcgcatcactctcacact

SEQ ID NO: 303530 - DNA, 1651 bp, Homo sapiens
gtgggaggcggcggccgcctggggaccagctccgcgcctcggcctctccgccccctccccagcctttctctcgccctcttctcccacactcccggccggcgcctcggctttgtgcgaggagatggtgtagccccctggccgccgaaggaggagccggacacttgtctcccgtctccgagctgctccccacccctggaggagagacccccccctcggctcggcgccttctgcgtctcccggctggtggggaagcctctgcgccgccggcaccatgagtgaacagagtatctgtcaggcaagagctgctgtgatggtttatgatgatgccaataagaagtgggtgccagctggtggctcaactggattcagcagagttcatatctatcaccatacaggcaacaacacattcagagtggtgggcaggaagattcaggaccatcaggtcgtgataaactgtgccattcctaaagggttgaagtacaatcaagctacacagaccttccaccagtggcgagatgctagacaggtgtatggtctcaactttggcagcaaagaggatgccaatgtcttcgcaagtgccatgatgcatgccttagaagtgttaaattcacaggaaacagggccaacattgcctagacaaaactcacaactacctgctcaagttcaaaatggcccatcccaagaagaattggaaattcaaagaagacaactacaagaacagcaacggcaaaaggagctggagcgggaaaggctggagcgagaaagaatggaaagagaaaggttggagagagagaggttagaaagggaaaggctggagagggagcgactggaacaagaacagctggagagagagagacaagaacgggaacggcaggaacgcctggagcggcaggaacgcctggagcggcaggaacgcctggatcgggagaggcaagaaagacaagaacgagagaggctggagagactggaacgggagaggcaagaaagggagcgacaagagcagttagaaagggaacagctggaatgggagagagagcgcagaatatcaagtgctgctccatcttcagacagctccctgtataacgctccacttcctgagtattccagttgccagcctccttcagcacctcctccatcatacgctaaagtcatctcagctccagtgtcagatgccactcctgattatgctgtagtgactgctttgccacctacttccacaccccctacaccaccactgcgacactcagcgacacgttttgcaacatctttaggttcagccttccaccctgttcttccccattacgctacagttcctcgtcctctgaacaaaaactctcgaccttcttctcctgtgaacacaccctcttctcagcctccagctacgaagccctgtgcctggtctacttccaatttttcgcccctccctccatctcctccaataatgattagcagccccccaggcaaagctactggtccaaggcctgtcctccctgtttgtgtttcttctcctgtgccccaaatgcctccatcaccgacagcacccaatgggctggttgctctgtaacatatccagtgtctccaccgcctacctcagggccagcagctcctccgccgccgcctccactgccttccctcgcatcactctcacact

SEQ ID NO: 303531 - DNA, 573 bp, Homo sapiens
gtttagtcgtggctcatggtaaggggtagtgggagggcaatgtcatagatcaaataataagaaggtaatatcttgggtttagcagtggttctgtctagctggggcggatcctcataagtcaatctgtaagcatgctggcctgtgtgtgggccgtccgtatgacggagttgctcgagcaaagtagcagctcctgctgcaaaatacagtgccttcaaaatgattctctgtgtgaattgcatgcaatttcatgtaaccataaagtgtaacctgtatgtgcatgacatgtgtctagaatgtgtaaagttaggattcagcaggaaggggcctggccctgtcactgtggtggatcagtggacctgctgaagtcactggactcatgtgacttaggtttgcagcatcagacccctgtgtttgcattaagtggccacatcgttgaaatcggatcaatctctccctcagctttctttcctactttgcagctttgctggttttaactgcttcattcttctgcttcttggtatccttttttcttttgaaataaaaacatgaaatacttaattcaaaaaaaaaatg

SEQ ID NO: 303532 - DNA, 1802 bp, Homo sapiens
ccctgagtaggtgaggaggtgggtaggagcttgcttatagaaaagtggaatcgagtagtccttgctggtggagccgctgccgccagggaactcagggccggctcctgttccttcaagagtgctggaggccaaacttgaaatacaagtttaatgttcctcgtcgggcaaaagataaggatccgatctcccccggcccggtgtgcagcaggagcgaccaaccccgacccgggttaaaactcccagggactcttcgctgctgccacctcttgttctctcccccgttcccactcggggtctccctcagggccgggaggcacagcggtccctgcttgctgaagggctggatgtacgcatccgcaggttcccgcggacttgggggcgcccgctgagccccggcgcccgcagaagacttgtgtttgcctcctgcagcctcaacccggagggcagcgagggcctaccaccatgatcactggtgtgttcagcatgcgcttgtggaccccagtgggcgtcctgacctcgctggcgtactgcctgcaccagcggcgggtggccctggccgagctgcaggaggccgatggccagtgtccggtcgaccgcagcctgctgaagttgaaaatggtgcaggtcgtgtttcgacacggggctcggagtcctctcaagccgctcccgctggaggagcaggtagagtggaacccccagctattagaggtcccaccccaaactcagtttgattacacagtcaccaatctagctggtggtccgaaaccatattctccttacgactctcaataccatgagaccaccctgaaggggggcatgtttgctgggcagctgaccaaggtgggcatgcagcaaatgtttgccttgggagagagactgaggaagaactatgtggaagacattccctttctttcaccaaccttcaacccacaggaggtctttattcgttccactaacatttttcggaatctggagtccacccgttgtttgctggctgggcttttccagtgtcagaaagaaggacccatcatcatccacactgatgaagcagattcagaagtcttgtatcccaactaccaaagctgctggagcctgaggcagagaaccagaggccggaggcagactgcctctttacagccaggaatctcagaggatttgaaaaaggtgaaggacaggatgggcattgacagtagtgataaagtggacttcttcatcctcctggacaacgtggctgccgagcaggcacacaacctcccaagctgccccatgctgaagagatttgcacggatgatcgaacagagagctgtggacacatccttgtacatactgcccaaggaagacagggaaagtcttcagatggcagtaggcccattcctccacatcctagagagcaacctgctgaaagccatggactctgccactgcccccgacaagatcagaaagctgtatctctatgcggctcatgatgtgaccttcataccgctcttaatgaccctggggatttttgaccacaaatggccaccgtttgctgttgacctgaccatggaactttaccagcacctggaatctaaggagtggtttgtgcagctctattaccacgggaaggagcaggtgccgagaggttgccctgatgggctctgcccgctggacatgttcttgaatgccatgtcagtttataccttaagcccagaaaaataccatgcactctgctctcaaactcaggtgatggaagttggaaatgaagagtaactgatttataaaagcaggatgtgttgattttaaaataaagtgcctttatacaa

SEQ ID NO: 303533 - DNA, 905 bp, Homo sapiens
agaaggaaggctggcacataggaaacaaaattaaggatgttcttgttccttctgattatttttctaagggccttctagaattcctggaaattattaccccttcttcttcccagcttgtcagctttgttctttgattccccaaggcctagttggtcacggcttatccaggttaccactctcctgctccctcagcccctcccatctcagttgtgttcacaacaggtctgtgtgctggtgcctgtgttgttgggagtcttcattcacagaggaccccaagaccggactcggtgccatttctctccttctggcccgttgctggcccttatgcattacttgcctttttctcagctctgtctggactcatgaggtcctgggggcagaatcagtctgtgtcccctgaatgctgagtgccctctaggtgcttaaatgttgttcacttttcacagggaaagtcttcagatggcagtaggcccattcctccacatcctagagagcaacctgctgaaagccatggactctgccactgcccccgacaagatcagaaagctgtatctctatgcggctcatgatgtgaccttcataccgctcttaatgaccctggggatttttgaccacaaatggccaccgtttgctgttgacctgaccatggaactttaccagcacctggaatctaaggagtggtttgtgcagctctattaccacgggaaggagcaggtgccgagaggttgccctgatgggctctgcccgctggacatgttcttgaatgccatgtcagtttataccttaagcccagaaaaataccatgcactctgctctcaaactcaggtgatggaagttggaaatgaagagtaactgatttataaaagcaggatgtgttgattttaaaataaagtgcctttatacaa

SEQ ID NO: 303534 - DNA, 902 bp, Homo sapiens
ccctgagtaggtgaggaggtgggtaggagcttgcttatagaaaagtggaatcgagtagtccttgctggtggagccgctgccgccagggaactcagggccggctcctgttccttcaagagtgctggaggccaaacttgaaatacaagtttaatgttcctcgtcgggcaaaagataaggatccgatctcccccggcccggtgtgcagcaggagcgaccaaccccgacccgggttaaaactcccagggactcttcgctgctgccacctcttgttctctcccccgttcccactcggggtctccctcagggccgggaggcacagcggtccctgcttgctgaagggctggatgtacgcatccgcaggttcccgcggacttgggggcgcccgctgagccccggcgcccgcagaagacttgtgtttgcctcctgcagcctcaacccggagggcagcgagggcctaccaccatgatcactggtgtgttcagcatgcgcttgtggaccccagtgggcgtcctgacctcgctggcgtactgcctgcaccagcggcgggtggccctggccgagctgcaggaggccgatggccagtgtccggtcgaccgcagcctgctgaagttgaaaatggtgcaggtcgtgtttcgacacggggctcggagtcctctcaagccgctcccgctggaggagcaggtgagaggtcggcccgggctggggctggtggggcgaggaccgtgtgccaggccaggagtctcgccctgacacacatcttcagagctttactcgcgcggagcggggctcgggttgggtccagaagaagggaaaacagcagtagccagtgactccccaggctcttgagcaaaggacctgctggggttaggacagccccggaacttccagttttgccctgatgg

SEQ ID NO: 303535 - DNA, 797 bp, Homo sapiens
ccctgagtaggtgaggaggtgggtaggagcttgcttatagaaaagtggaatcgagtagtccttgctggtggagccgctgccgccagggaactcagggccggctcctgttccttcaagagtgctggaggccaaacttgaaatacaagtttaatgttcctcgtcgggcaaaagataaggatccgatctcccccggcccggtgtgcagcaggagcgaccaaccccgacccgggttaaaactcccagggactcttcgctgctgccacctcttgttctctcccccgttcccactcggggtctccctcagggccgggaggcacagcggtccctgcttgctgaagggctggatgtacgcatccgcaggttcccgcggacttgggggcgcccgctgagccccggcgcccgcagaagacttgtgtttgcctcctgcagcctcaacccggagggcagcgagggcctaccaccatgatcactggtgtgttcagcatgcgcttgtggaccccagtgggcgtcctgacctcgctggcgtactgcctgcaccagcggcgggtggccctggccgagctgcaggaggccgatggccagtgtccggtcgaccgcagcctgctgaagttgaaaatggtgcaggtcgtgtttcgacacggggctcggagtcctctcaagccgctcccgctggaggagcaggtacaagtggaaccccagtataaaggtcccaaccaaattcaggttgattacagttacaatctagctgggatacaaacattctcttacatctcaaaccataacactgtagggcagtg

SEQ ID NO: 303536 - DNA, 435 bp, Homo sapiens
tcggggatgtaactcgactctttcttcccagtcaattcaacactttttgagtgacttttacaagcagagcatagtgcttttattctggaagctcaccgggtagtggggccttcctgtctgtaatatgtatgcacatgtataccacatggatcagagcctctcagatctctgggcttagctggaaatagcagaaggacaggttcctcggcggacctgctgagttatgtttcttctgcaggagcaggtgccgagaggttgccctgatgggctctgcccgctggacatgttcttgaatgccatgtcagtttataccttaagcccagaaaaataccatgcactctgctctcaaactcaggtgatggaagttggaaatgaagagtaactgatttataaaagcaggatgtgttgattttaaaataaagtgcctttatacaa

SEQ ID NO: 303537 - DNA, 2008 bp, Homo sapiens
ccctgagtaggtgaggaggtgggtaggagcttgcttatagaaaagtggaatcgagtagtccttgctggtggagccgctgccgccagggaactcagggccggctcctgttccttcaagagtgctggaggccaaacttgaaatacaagtttaatgttcctcgtcgggcaaaagataaggatccgatctcccccggcccggtgtgcagcaggagcgaccaaccccgacccgggttaaaactcccagggactcttcgctgctgccacctcttgttctctcccccgttcccactcggggtctccctcagggccgggaggcacagcggtccctgcttgctgaagggctggatgtacgcatccgcaggttcccgcggacttgggggcgcccgctgagccccggcgcccgcagaagacttgtgtttgcctcctgcagcctcaacccggagggcagcgagggcctaccaccatgatcactggtgtgttcagcatgcgcttgtggaccccagtgggcgtcctgacctcgctggcgtactgcctgcaccagcggcgggtggccctggccgagctgcaggaggccgatggccagtgtccggtcgaccgcagcctgctgaagttgaaaatggtgcaggtcgtgtttcgacacggggctcggagtcctctcaagccgctcccgctggaggagcaggtagagtggaacccccagctattagaggtcccaccccaaactcagtttgattacacagtcaccaatctagctggtggtccgaaaccatattctccttacgactctcaataccatgagaccaccctgaaggggggcatgtttgctgggcagctgaccaaggtgggcatgcagcaaatgtttgccttgggagagagactgaggaagaactatgtggaagacattccctttctttcaccaaccttcaacccacaggaggtctttattcgttccactaacatttttcggaatctggagtccacccgttgtttgctggctgggcttttccagtgtcagaaagaaggacccatcatcatccacactgatgaagcagattcagaagtcttgtatcccaactaccaaagctgctggagcctgaggcagagaaccagaggccggaggcagactgcctctttacagccaggaatctcagaggatttgaaaaaggtgaaggacaggatgggcattgacagtagtgataaagtggacttcttcatcctcctggacaacgtggctgccgagcaggcacacaacctcccaagctgccccatgctgaagagatttgcacggatgatcgaacagagagctgtggacacatccttgtacatactgcccaaggaagacagggaaagtcttcagatggcagtaggcccattcctccacatcctagagagcaacctgctgaaagccatggactctgccactgcccccgacaagatcagaaagctgtatctctatgcggctcatgatgtgaccttcataccgctcttaatgaccctggggatttttgaccacaaatggccaccgtttgctgttgacctgaccatggaactttaccagcacctggaatctaaggagtggtttgtgcagctctattaccacgggaaggagcaggtgccgagaggttgccctgatgggctctgcccgctggacatgttcttgaatgccatgtcagtttataccttaagcccagaaaaataccatgcactctgctctcaaactcaggtgatggaagttggaaatgaagagtaactgatttataaaagcaggatgtgttgattttaaaataaagtgcctttatacaaaaaaaaaaaaaaaaaaaaaaaattgtgcgggggccgggcccgaaaaagtttaacacatttgtgggcggggccagggaatagacagggcaagcgtcaagaacccggcaggaaaggggggttccccaaaaaccccgggccgcgcgtgaaccccggtctggtcccggtcaggcgcctccccgggcgcgcccaaacaacaagcacacaga

SEQ ID NO: 303538 - DNA, 1359 bp, Homo sapiens
ccctgagtaggtgaggaggtgggtaggagcttgcttatagaaaagtggaatcgagtagtccttgctggtggagccgctgccgccagggaactcagggccggctcctgttccttcaagactgcaggaggccgatggccagtgtccggtcgaccgcagcctgctgaagttgaaaatggtgcaggtcgtgtttcgacacggggctcggagtcctctcaagccgctcccgctggaggagcaggtagagtggaacccccagctattagaggtcccaccccaaactcagtttgattacacagtcaccaatctagctggtggtccgaaaccatattctccttacgactctcaataccatgagaccaccctgaaggggggcatgtttgctgggcagctgaccaaggtgggcatgcagcaaatgtttgccttgggagagagactgaggaagaactatgtggaagacattccctttctttcaccaaccttcaacccacaggaggtctttattcgttccactaacatttttcggaatctggagtccacccgttgtttgctggctgggcttttccagtgtcagaaagaaggacccatcatcatccacactgatgaagcagattcagaagtcttgtatcccaactaccaaagctgctggagcctgaggcagagaaccagaggccggaggcagactgcctctttacagccaggaatctcagaggatttgaaaaaggtgaaggacaggatgggcattgacagtagtgataaagtggacttcttcatcctcctggacaacgtggctgccgagcaggcacacaacctcccaagctgccccatgctgaagagatttgcacggatgatcgaacagagagctgtggacacatccttgtacatactgcccaaggaagacagggaaagtcttcagatggcagtaggcccattcctccacatcctagagagcaacctgctgaaagccatggactctgccactgcccccgacaagatcagaaagctgtatctctatgcggctcatgatgtgaccttcataccgctcttaatgaccctggggatttttgaccacaaatggccaccgtttgctgttgacctgaccatggaactttaccagcacctggaatctaaggagtggtttgtgcagctctattaccacgggaaggagcaggtgccgagaggttgccctgatgggctctgcccgctggacatgttcttgaatgccatgtcagtttataccttaagcccagaaaaataccatgcactctgctctcaaactcaggtgatggaagttggaaatgaagagtaactgatttataaaagcaggatgtgttgattttaaaataaagtgcctttatacaa

SEQ ID NO: 303539 - DNA, 1256 bp, Homo sapiens
ccctgagtaggtgaggaggtgggtaggagcttgcttatagaaaagtggaatcgagtagtccttgctggtggagccgctgccgccagggaactcagggccggctcctgttccttcaagagtgctggaggccaaacttgaaatacaagtttaatgttcctcgtcgggcaaaagataaggatccgatctcccccggcccggtgtgcagcaggagcgaccaaccccgacccgggttaaaactcccagggactcttcgctgctgccacctcttgttctctcccccgttcccactcggggtctccctcagggccgggaggcacagcggtccctgcttgctgaagggctggatgtacgcatccgcaggttcccgcggacttgggggcgcccgctgagccccggcgcccgcagaagacttgtgtttgcctcctgcagcctcaacccggagggcagcgagggcctaccaccatgatcactggtgtgttcagcatgcgcttgtggaccccagtgggcgtcctgacctcgctggcgtactgcctgcaccagcggcgggtggccctggccgagctgcaggaggccgatggccagtgtccggtcgaccgcagcctgctgaagttgaaaatggtgcaggtcgtgtttcgacacggggctcggagtcctctcaagccgctcccgctggaggagcaggtagagtggaacccccagctattagaggtcccaccccaaactcagtttgattacacagtcaccaatctagctggtggtccgaaaccatattctccttacgactctcaataccatgagaccaccctgaaggggggcatgtttgctgggcagctgaccaaggtgggcatgcagcaaatgtttgccttgggagagagactgaggaagaactatgtggaagacattccctttctttcaccaaccttcaacccacaggaggtcttgtgagtcacttgaaaggggatgttgcacttaatttaaggtcttgaacatgaggatacctgtcctgactccccaagatggttcccactgtcacccaaggtagtttgggggacaacttgtcatgctgcatacccttatgtcacaggatctggtgaacaggtcgttcctggaggtcgcattcattgcacttcgagtctctcaggggctgacatcccacagaaaagtgaagcattcttcctagttccatagctctccttatgtactcttgaaagacccctggagcgtatgtggaataaaatagagtgtatataattaaa

SEQ ID NO: 303540 - DNA, 964 bp, Homo sapiens
ccctgagtaggtgaggaggtgggtaggagcttgcttatagaaaagtggaatcgagtagtccttgctggtggagccgctgccgccagggaactcagggccggctcctgttccttcaagagtgctggaggccaaacttgaaatacaagtttaatgttcctcgtcgggcaaaagataaggatccgatctcccccggcccggtgtgcagcaggagcgaccaaccccgacccgggttaaaactcccagggactcttcgctgctgccacctcttgttctctcccccgttcccactcggggtctccctcagggccgggaggcacagcggtccctgcttgctgaagggctggatgtacgcatccgcaggttcccgcggacttgggggcgcccgctgagccccggcgcccgcagaagacttgtgtttgcctcctgcagcctcaacccggagggcagcgagggcctaccaccatgatcactggtgtgttcagcatgcgcttgtggaccccagtgggcgtcctgacctcgctggcgtactgcctgcaccagcggcgggtggccctggccgagctgcaggaggccgatggccagtgtccggtcgaccgcagcctgctgaagttgaaaatggtgcaggtcgtgtttcgacacggggctcggagtcctctcaagccgctcccgctggaggagcaggtagagtggaacccccagctattagaggtcccaccccaaactcagtttgattacacagtcaccaatctagctggtggtccgaaaccatattctccttacgactctcaataccatgagaccaccctgaaggggggcatgtttgctgggcagctgaccaaggtgggcatgcagcaaatgtttgccttgggagagagactgaggaagaactatgtggaagacatggcctgaattgcacctgccttgagccaccaggacgtctgtactctcacagcgttacaaacat

SEQ ID NO: 303541 - DNA, 2163 bp, Homo sapiens
tgcaacctcagtctcccaggttcaagtgattctcctgccttagcctcccgagtagctgggattataggcacccaccaccacgcccagctaatttttgtattattagtagagacagggtttcaccatgttggccaggctggtctcaaactcaactcctgacctcaggtggtccacccgcctcagcctcccaaagtgctgggattacaggtgtgagccaccgcacctggcctctgtcctcttttagtctagtgtctggttttctagcaaacagtaaatttaaacaagtaaactattatggtttccattgcttacaaaatgattttcctttacattcttatcatgaacactattttaagcatcaaatgcaatcatctaaaatataaaggtcaatcatttataatagaaacaccttgaccacaagcccttgattgaacattttataatatttcatctacttattaaaacaaataatttcccttgggttggaggggaagtgatttcataaattaattagaaagccatctttagcatattgcttatgtctggatccatgtttctgaggaaaaagacattctcaggtgatgtatttttttcatgcattagtatgcatttttaaaaaataatgcatgtttctttaataattaattttcatcttctataagatgccatgtgaagaagttgtggaaatgtagaataaaaagctaaagctgccaaatttctgttgaactcttaaaaacagctcatgtttgtttgtcctctcgggttgtggcctagcctatttgcaatgtaatgaagctgcagggttcttgtatagctaaagcgttcaatgcatttcacgtgctgtggtggatgtgggtgctgtagacaggcttcttctcttcctgctctcaaaatacctcggcttgacatttggacagatcctgtcattgtttaagctgagcaaaaaaccacacaaaagttgtgtaagagatgagataacaaaggagcgagagaaatctcatgtgaatttccaagttttaattcgttctccatgaaggattttcatttcagtgaaagtcgcagcagaagagggaactttctggagtttttgagaatgccaaaccacatttttatcacacttctttggaaatcaatgcctttgcatagaaaatcaaattcagggaccacaaagaattttcagtgggaatgtctagtctgaggggtctgaggttgtttttactttattgtgttgtttaaatattttaaaaatatctttagcgtttggtcttttttttttctgtaaacatttaatttggtctgagaaaagctgaatgtttgggtgtgacgtttgactgaggtggattggggctgcctgtggacattagtgaacaggtggtaggcttcaggaatatccagttttaatcagttgcatttggtacagaattttgagtaatggtgaaaattgttgtctttggaaagcacaaaagaaacctggaaaggcagttcggctcaggtagctacacataacattgtgtatgattttcacttcaaagctgtctggaaggaaatgcagtcagctccagctagtactatttatgtacccagataactaagatattgtttcatggccttgccttagtcagaggcccttttctctgtcctgaacccccaggtatgggtgaaattggaaattactaatctattggaaatcagttcctgacatagtaaagtttgctttcataactgcagcaaaaaaggtcaacttgccaagtcactgctgccatgtgtgtactgtattattttcagaaaaaaatataatagtctgagtccaagttatcttgatttaaaattgatagagaaaagaaactgtcgagcaagttatataacaactaacaacattgcactttctgtatatgaaatcaatatttaaataacttatttttctccattgctgttcttaaaaacattgtaagtagctgtaatataccagtaccaatatgttcttgcaattgcttcagcccaagaaagctgtgtattgttttaaaaattgtaaaaattattgtgatgattcatttagcataaagagaggtggacggaagggttttcctatgtatcaaaacttgtctataattatgtcatctatgtacctagaaaaaagtaaataaatttcttcagttgaatatg

SEQ ID NO: 303542 - DNA, 776 bp, Homo sapiens
  misc_feature (751)..(751): n is a, c, g, or t
cataattgctttctagcaatcagcttttatttgccttaatataagcttttaagcagttatctaactagtgtccacaaccctgtaaccatacttccacatcttcagcttaggcagacatcgaacctctctgggatgtttccagcaaaagtgagcttttctaatcgtctcattgtaacatggcttattttgtagaggtattcatcagccacacacttcatgttggtttttggtttttaagctaactacaaatctagtaaaaagctatctgaaattcacaaatatcatgtgtgtgcgtgcgtgcgtgcgcgtgtgtgtctgtattcatagtgactgcttttggttttaaccagtttagtatcgttactgtgtggatcgtcgcgctgcagtattgacttggaatcctgaccatgtccatcccaaaattcagtcctcagttaacggatcatgtttgcaaaaggtcactgtgaggctgcatatttcagaaagatgtccttaataagggaagtcatgtataagatgttttctaaaagacttttcagtattacaactaatactattattatccttctttttttatttagataattcttttaatttaaacaaaggttcactatggaaccagacaaatctcattagccatgtgttaagtatttgctactttaaattgttttacaactgatttcagcaagaatcacttgaacccgggaggcagaggttgtagtgagcccagattgtgccactgctctccaanctgggaggcacagcaaactgtcccc

SEQ ID NO: 303543 - DNA, 671 bp, Homo sapiens
cgtctcattgtaacatggcttattttgtagaggtattcatcagccacacacttcatgttggtttttggtttttaagctaactacaaatctagtaaaaagctatctgaaattcacaaatatcatgtgtgtgcgtgcgtgcgtgcgcgtgtgtgtctgtattcatagtgactgcttttggttttaaccagtttagtatcgttactgtgtggatcgtcgcgctgcagtattgacttggaatcctgaccatgtccatcccaaaattcagtcctcagttaacggatcatgtttgcaaaaggtcactgtgaggctgcatatttcagaaagatgtccttaataagggaagtcatgtataagatgttttctaaaagacttttcagtattacaactaatactattattatccttctttttttatttagataattcttttaatttaaacaaaggttcactatggaaccagacaaatctcattagccatgtgttaagtatttgctactttaaattgttttacaactgatttcagcacattctatccttttttttttttgaaatggagtttcgctcttgtcacccaggctggagtgcaatggcacgatcttggctcactgcaacctcagtctcccaggttcaagtgattctcctgccttagcctcccgagtagctgggattat

SEQ ID NO: 303544 - DNA, 235 bp, Homo sapiens
gcacgaggttaagagttccagccttccctctgtaccccttgatagttccagccttccccttgatagttatttaattctgtttctcctagtggttcacaattgaactgaattgagatggtgtcgggtggctaaggagacacctcacctctccttccccattgtgccgcctttatcaattgcctgttttgttttgtttgttttttaactttccataataaaatggagttctcttcaa

SEQ ID NO: 303545 - DNA, 2813 bp, Homo sapiens
tcctcttcctctctctggacgcccggctcctccgcaccccctcccccgggggtcccgcggccttgctccctaccctcacctcaagacgaccatggccaccatcccagactggaagctacagctgctagcccggcgccggcaggaggaggcgtccgttcgaggccgagagaaagcagaacgggagcgcctgtcccagatgccagcctggaaacgagggctcctggagcgccgccgggccaagcttgggctgtcccctggggagcctagccctgtgctagggactgtagaggctggacctccagacccggatgagtctgcggtccttctggaggccatcgggccagtgcaccagaaccgattcatccggcaggagcggcagcagcagcagcagcaacaacaacggagtgaagagctgctagcagagagaaagcctgggcctctggaggcccgggagcggagacccagccctggggagatgcgggatcagagccccaagggaagagagtcaagagaagagagactaagtccgagggagaccagagagaggaggctggggatagggggagcccaagagttgagcctgaggcctctggaggctcgggactggaggcaaagcccaggagaggtgggagacaggagctcccgactgtcagaggcatggaaatggaggctgagtcctggagaaactccagagcggagtctgagactagcagagtctcgagagcaaagccccaggagaaaagaggtggaaagtagactgagcccaggggaatctgcctaccagaagttgggcctgacagaggcccataaatggagacctgactccagagagtctcaggaacagagtttggtacaactggaggcaacagagtggaggctgaggtcaggagaagaaagacaagactactcggaagaatgtgggagaaaagaagagtggccagttccaggggtagctccaaaagagactgcagagctgtccgagaccctgacaagggaggcccaaggcaacagttccgcaggagtggaggcagcagagcagaggcctgtggaagatggcgagaggggcatgaagccaacagaagggtggaaatggaccctgaactccgggaaggctcgagaatggacacccagggacatagaggctcaaactcagaaaccagaacctccagagtcagcagagaagcttctggaatctcccggtgtggaggctggagaaggggaggctgagaaggaggaggcgggggctcagggcaggcctctgagagccctgcagaactgctgctctgtgccctcccccctcccaccagaggacgctgggactggaggcctgagacagcaggaagaggaagcagtggagctccagcccccaccaccagcccctctgtctcccccacccccagccccaactgccccccaacctcctggggatcccctcatgagccgcctgttctatggggtgaaggcagggccaggggtgggggccccccgccgcagtggacacaccttcaccgtcaacccccggcggtctgtgccccctgcgaccccagccaccccaacctctccagccacagttgatgctgcagtcccgggggctgggaagaagcggtacccaactgccgaggagatcttggttctggggggctacctccgtctcagccgcagctgccttgccaaggggtcccccgaaagacaccacaaacagcttaagatctccttcagcgagacagccctggagaccacgtaccaatacccctccgagagttcggtactggaggagctgggcccggagcctgaggtccccagtgcccccaaccctccagcagcccaacccgacgacgaagaggatgaggaagagctgctgctgctgcagccagagctccagggcgggctgcgcaccaaggccctgattgtggatgagtcctgccggcggtgaccatcttccaacatagggatatacctccctccttcttataactgaagatcctggagcccggaagattcagggcagacagaccctgataatgagcctggcagggaagggcaaccaacatcttgtaacttgctttccccaccctgtttctgggggcagagccaattgcccaatttctaccctaatccaaagtccctggtgtgggtggggttaaacgtgctggtgcatcctaggtcatccaagagtgagcgccaagtcctgagaaggggcacagaactccctggagggtggagatggagcacctgccccccatggcagggtacactctccccacagccttcctccccaccatcccgtggggactctcgggatttaagcactcgtctctctgggaggcccagaccccactccatttataggcacatctccttcatttcctaggtcactgcccctttgtttacagctcctgcctcctcccttgaccacagcctggtttacaaattccatcagctcccagccccacctgccaaagtcccaggtttacaagccacgcttacttgctgtgtctgcgtggaattctctcctctgtcccctccagtctcctcattggagtgacctgaaggtgtggcttcctccactttttctcagtattactttgccttagttttccccaagagggaaggctggaactcttaactctgtaccccttgatagttatttaattctgtttctcctagtggttcacaattgaactgaattgagatggtgtcgggtggctaaggagacacctcacctctccttccccattgtgccgcctttatcaattgcctgttttgttttgtttgttttttaactttccataataaaatggagttctcttcaa

SEQ ID NO: 303546 - DNA, 1732 bp, Homo sapiens
tcctcttcctctctctggacgcccggctcctccgcaccccctcccccgggggtcccgcggccttgctccctaccctcacctcaagacgaccatggccaccatcccagactggaagctacagctgctagcccggcgccggcaggaggaggcgtccgttcgaggccgagagaaagcagaacgggagcgcctgtcccagatgccagcctggaaacgagggctcctggagcgccgccgggccaagcttgggctgtcccctggggagcctagccctgtgctagggactgtagaggctggacctccagacccggatgagtctgcggtccttctggaggccatcgggccagtgcaccagaaccgattcatccggcaggagcggcagcagcagcagcagcaacaacaacggagtgaagagctgctagcagagagaaagcctgggcctctggaggcccgggagcggagacccagcccaccccaacctctccagccacagttgatgctgcagtcccgggggctgggaagaagcggtacccaactgccgaggagatcttggttctggggggctacctccgtctcagccgcagctgccttgccaaggggtcccccgaaagacaccacaaacagcttaagatctccttcagcgagacagccctggagaccacgtaccaatacccctccgagagttcggtactggaggagctgggcccggagcctgaggtccccagtgcccccaaccctccagcagcccaacccgacgacgaagaggatgaggaagagctgctgctgctgcagccagagctccagggcgggctgcgcaccaaggccctgattgtggatgagtcctgccggcggtgaccatcttccaacatagggatatacctccctccttcttataactgaagatcctggagcccggaagattcagggcagacagaccctgataatgagcctggcagggaagggcaaccaacatcttgtaacttgctttccccaccctgtttctgggggcagagccaattgcccaatttctaccctaatccaaagtccctggtgtgggtggggttaaacgtgctggtgcatcctaggtcatccaagagtgagcgccaagtcctgagaaggggcacagaactccctggagggtggagatggagcacctgccccccatggcagggtacactctccccacagccttcctccccaccatcccgtggggactctcgggatttaagcactcgtctctctgggaggcccagaccccactccatttataggcacatctccttcatttcctaggtcactgcccctttgtttacagctcctgcctcctcccttgaccacagcctggtttacaaattccatcagctcccagccccacctgccaaagtcccaggtttacaagccacgcttacttgctgtgtctgcgtggaattctctcctctgtcccctccagtctcctcattggagtgacctgaaggtgtggcttcctccactttttctcagtattactttgccttagttttccccaagagggaaggctggaactcttaactctgtaccccttgatagttatttaattctgtttctcctagtggttcacaattgaactgaattgagatggtgtcgggtggctaaggagacacctcacctctccttccccattgtgccgcctttatcaattgcctgttttgttttgtttgttttttaactttccataataaaatggagttctcttcaa

SEQ ID NO: 303547 - DNA, 3540 bp, Homo sapiens
tcctcttcctctctctggacgcccggctcctccgcaccccctcccccgggggtcccgcggcctgtgagttgactgaggggctcagacttggggagtgggtgtctcctcgcccctgtccttgctcccgtccctggcccggaccttggctgtctcctctttgtgccgagattgtcagtctgtgcggctacagcggggtggagacggccggctctgtcacggcttcatgagagcggggacggggcgcaggacttgcaggcgccggggagaagagacatggagccggcccttggcactctggggtcgcgtggggcagtcggtgggggaggcaggcggtggtgacaggacagggtgggggtggacgccagggttctgggaacgcgctggcagccctgacgcccgggttccgaaagtctcgggggtgggtatttcccccgacccgcctcgggggcggagtgcggggcagaggggtgggggctggggagaggcgtggcccgagcggtgctggaagcggagccgggacctttggggcccgcgctgagacgcgcccggctgctgccgccgccctcctttcccctcttccctggtttcccttctcctctagacctgttcgctctccgcccctccttgcctccccaacaccccctcaggtcccgttgcctcctggtcctttcagggattcctggtccttccttcccacactagcctccctggggtatcgctgaggcagcctggcctgcacccaggttcccctcacccctgccacatttctctcttctccctcacgccaactttccttttcgcccttctctctctttctcacatcctagagacggtctttaatacgcattaaccctgtgctgccacatctggctcctgccctcattgcctccaatccggactcttcctctcacatcacccccaccacccccaacttgggctcacaacttctcttcactttttccatttccccagttctctgccttccgtctttccctctgtcctcatccttagcccctctgccctgctttgtgtcccacctctccccctccacttcctctcctcccaccctcagtctcacccccgggctgtctcactctctggagcctctccttcctgttctctgtccccagtgctccctaccctcacctcaagacgaccatggccaccatcccagactggaagctacagctgctagcccggcgccggcaggaggaggcgtccgttcgaggccgagagaaagcagaacgggagcgcctgtcccagatgccagcctggaaacgagggctcctggagcgccgccgggccaagcttgggctgtcccctggggagcctagccctgtgctagggactgtagaggctggacctccagacccggatgagtctgcggtccttctggaggccatcgggccagtgcaccagaaccgattcatccggcaggagcggcagcagcagcagcagcaacaacaacggagtgaagagctgctagcagagagaaagcctgggcctctggaggcccgggagcggagacccagccctggggagatgcgggatcagagccccaagggaagagagtcaagagaagagagactaagtccgagggagaccagagagaggaggctggggatagggggagcccaagagttgagcctgaggcctctggaggctcgggactggaggcaaagcccaggagaggtgggagacaggagctcccgactgtcagaggcatggaaatggaggctgagtcctggagaaactccagagcggagtctgagactagcagagtctcgagagcaaagccccaggagaaaagaggtggaaagtagactgagcccaggggaatctgcctaccagaagttgggcctgacagaggcccataaatggagacctgactccagagagtctcaggaacagagtttggtacaactggaggcaacagagtggaggctgaggtcaggagaagaaagacaagactactcggaagaatgtgggagaaaagaagagtggccagttccaggggtagctccaaaagagactgcagagctgtccgagaccctgacaagggaggcccaaggcaacagttccgcaggagtggaggcagcagagcagaggcctgtggaagatggcgagaggggcatgaagccaacagaagggtggaaatggaccctgaactccgggaaggctcgagaatggacacccagggacatagaggctcaaactcagaaaccagaacctccagagtcagcagagaagcttctggaatctcccggtgtggaggctggagaaggggaggctgagaaggaggaggcgggggctcagggcaggcctctgagagccctgcagaactgctgctctgtgccctcccccctcccaccagaggacgctgggactggaggcctgagacagcaggaagaggaagcagtggagctccagcccccaccaccagcccctctgtctcccccacccccagccccaactgccccccaacctcctggggatcccctcatgagccgcctgttctatggggtgaaggcagggccaggggtgggggccccccgccgcagtggacacaccttcaccgtcaacccccggcggtctgtgccccctgcgaccccagccaccccaacctctccagccacagttgatgctgcagtcccgggggctgggaagaagcggtacccaactgccgaggagatcttggttctggggggctacctccgtctcagccgcagctgccttgccaaggggtcccccgaaagacaccacaaacagcttaagatctccttcagcgagacagccctggagaccacgtaccaatacccctccgagagttcggtactggaggagctgggcccggagcctgaggtccccagtgcccccaaccctccagcagcccaacccgacgacgaagaggatgaggaagagctgctgctgctgcagccagagctccagggcgggctgcgcaccaaggccctgattgtggatgagtcctgccggcggtgaccatcttccaacatagggatatacctccctccttcttataactgaagatcctggagcccggaagattcagggcagacagaccctgataatgagcctggcagggaagggcaaccaacatcttgtaacttgctttccccaccctgtttctgggggcagagccaattgcccaatttctaccctaatccaaagtccctggtttacaagccacgcttacttgctgtgtctgcgtggaattctctcctctgtcccctccagtctcctcattggagtgacctgaaggtgtggcttcctccactttttctcagtattactttgccttagttttccccaagagggaaggctggaactcttaactctgtaccccttgatagttatttaattctgtttctcctagtggttcacaattgaactgaattgagatggtgtcgggtggctaaggagacacctcacctctccttccccattgtgccgcctttatcaattgcctgttttgttttgtttgttttttaactttccataataaaatggagttctcttcaa

SEQ ID NO: 303548 - DNA, 2580 bp, Homo sapiens
tcctcttcctctctctggacgcccggctcctccgcaccccctcccccgggggtcccgcggcctgtgagttgactgaggggctcagacttggggagtgggtgtctcctcgcccctgtccttgctcccgtccctggcccggaccttggctgtctcctctttgtgccgagattgtcagtctgtgcggctacagcggggtggagacggccggctctgtcacggcttcatgagagcggggacggggcgcaggacttgcaggcgccggggagaagagacatggagccggcccttggcactctggggtcgcgtggggcagtcggtgggggaggcaggcggtggtgacaggacagggtgggggtggacgccagggttctgggaacgcgctggcagccctgacgcccgggttccgaaagtctcgggggtgggtatttcccccgacccgcctcgggggcggagtgcggggcagaggggtgggggctggggagaggcgtggcccgagcggtgctggaagcggagccgggacctttggggcccgcgctgagacgcgcccggctgctgccgccgccctcctttcccctcttccctggtttcccttctcctctagacctgttcgctctccgcccctccttgcctccccaacaccccctcaggtcccgttgcctcctggtcctttcagggattcctggtccttccttcccacactagcctccctggggtatcgctgaggcagcctggcctgcacccaggttcccctcacccctgccacatttctctcttctccctcacgccaactttccttttcgcccttctctctctttctcacatcctagagacggtctttaatacgcattaaccctgtgctgccacatctggctcctgccctcattgcctccaatccggactcttcctctcacatcacccccaccacccccaacttgggctcacaacttctcttcactttttccatttccccagttctctgccttccgtctttccctctgtcctcatccttagcccctctgccctgctttgtgtcccacctctccccctccacttcctctcctcccaccctcagtctcacccccgggctgtctcactctctggagcctctccttcctgttctctgtccccagtgctccctaccctcacctcaagacgaccatggccaccatcccagactggaagctacagctgctagcccggcgccggcaggaggaggcgtccgttcgaggccgagagaaagcagaacgggagcgcctgtcccagatgccagcctggaaacgagggctcctggagcgccgccgggccaagcttgggctgtcccctggggagcctagccctgtgctagggactgtagaggctggacctccagacccggatgagtctgcggtccttctggaggccatcgggccagtgcaccagaaccgattcatccggcaggagcggcagcagcagcagcagcaacaacaacggagtgaagagctgctagcagagagaaagcctgggcctctggaggcccgggagcggagacccagccctggggagatgcgggatcagagccccaagggaagagagtcaagagaagagagactaagtccgagggagaccagagagaggaggctggggatagggggagcccaagagttgagcctgaggcctctggaggctcgggactggaggcaaagcccaggagaggtgggagacaggagctcccgactgtcagaggcatggaaatggaggctgagtcctggagaaactccagagcggagtctgagactagcagagtctcgagagcaaagccccaggagaaaagaggtggaaagtagactgagcccaggggaatctgcctaccagaagttgggcctgacagaggcccataaatggagacctgactccagagagtctcaggaacagagtttggtacaactggaggcaacagagtggaggctgaggtcaggagaagaaagacaagactactcggaagaatgtgggagaaaagaagagtggccagttccaggggtagctccaaaagagactgcagagctgtccgagaccctgacaagggaggcccaaggcaacagttccgcaggagtggaggcagcagagcagaggcctgtggaagatggcgagaggggcatgaagccaacagaagggtggaaatggaccctgcctcctcccttgaccacagcctggtttacaaattccatcagctcccagccccacctgccaaagtcccaggtttacaagccacgcttacttgctgtgtctgcgtggaattctctcctctgtcccctccagtctcctcattggagtgacctgaaggtgtggcttcctccactttttctcagtattactttgccttagttttccccaagagggaaggctggaactcttaactctgtaccccttgatagttatttaattctgtttctcctagtggttcacaattgaactgaattgagatggtgtcgggtggctaaggagacacctcacctctccttccccattgtgccgcctttatcaattgcctgttttgttttgtttgttttttaactttccataataaaatggagttctcttcaa

SEQ ID NO: 303549 - DNA, 3880 bp, Homo sapiens
tcctcttcctctctctggacgcccggctcctccgcaccccctcccccgggggtcccgcggcctgtgagttgactgaggggctcagacttggggagtgggtgtctcctcgcccctgtccttgctcccgtccctggcccggaccttggctgtctcctctttgtgccgagattgtcagtctgtgcggctacagcggggtggagacggccggctctgtcacggcttcatgagagcggggacggggcgcaggacttgcaggcgccggggagaagagacatggagccggcccttggcactctggggtcgcgtggggcagtcggtgggggaggcaggcggtggtgacaggacagggtgggggtggacgccagggttctgggaacgcgctggcagccctgacgcccgggttccgaaagtctcgggggtgggtatttcccccgacccgcctcgggggcggagtgcggggcagaggggtgggggctggggagaggcgtggcccgagcggtgctggaagcggagccgggacctttggggcccgcgctgagacgcgcccggctgctgccgccgccctcctttcccctcttccctggtttcccttctcctctagacctgttcgctctccgcccctccttgcctccccaacaccccctcaggtcccgttgcctcctggtcctttcagggattcctggtccttccttcccacactagcctccctggggtatcgctgaggcagcctggcctgcacccaggttcccctcacccctgccacatttctctcttctccctcacgccaactttccttttcgcccttctctctctttctcacatcctagagacggtctttaatacgcattaaccctgtgctgccacatctggctcctgccctcattgcctccaatccggactcttcctctcacatcacccccaccacccccaacttgggctcacaacttctcttcactttttccatttccccagttctctgccttccgtctttccctctgtcctcatccttagcccctctgccctgctttgtgtcccacctctccccctccacttcctctcctcccaccctcagtctcacccccgggctgtctcactctctggagcctctccttcctgttctctgtccccagtgctccctaccctcacctcaagacgaccatggccaccatcccagactggaagctacagctgctagcccggcgccggcaggaggaggcgtccgttcgaggccgagagaaagcagaacgggagcgcctgtcccagatgccagcctggaaacgagggctcctggagcgccgccgggccaagcttgggctgtcccctggggagcctagccctgtgctagggactgtagaggctggacctccagacccggatgagtctgcggtccttctggaggccatcgggccagtgcaccagaaccgattcatccggcaggagcggcagcagcagcagcagcaacaacaacggagtgaagagctgctagcagagagaaagcctgggcctctggaggcccgggagcggagacccagccctggggagatgcgggatcagagccccaagggaagagagtcaagagaagagagactaagtccgagggagaccagagagaggaggctggggatagggggagcccaagagttgagcctgaggcctctggaggctcgggactggaggcaaagcccaggagaggtgggagacaggagctcccgactgtcagaggcatggaaatggaggctgagtcctggagaaactccagagcggagtctgagactagcagagtctcgagagcaaagccccaggagaaaagaggtggaaagtagactgagcccaggggaatctgcctaccagaagttgggcctgacagaggcccataaatggagacctgactccagagagtctcaggaacagagtttggtacaactggaggcaacagagtggaggctgaggtcaggagaagaaagacaagactactcggaagaatgtgggagaaaagaagagtggccagttccaggggtagctccaaaagagactgcagagctgtccgagaccctgacaagggaggcccaaggcaacagttccgcaggagtggaggcagcagagcagaggcctgtggaagatggcgagaggggcatgaagccaacagaagggtggaaatggaccctgaactccgggaaggctcgagaatggacacccagggacatagaggctcaaactcagaaaccagaacctccagagtcagcagagaagcttctggaatctcccggtgtggaggctggagaaggggaggctgagaaggaggaggcgggggctcagggcaggcctctgagagccctgcagaactgctgctctgtgccctcccccctcccaccagaggacgctgggactggaggcctgagacagcaggaagaggaagcagtggagctccagcccccaccaccagcccctctgtctcccccacccccagccccaactgccccccaacctcctggggatcccctcatgagccgcctgttctatggggtgaaggcagggccaggggtgggggccccccgccgcagtggacacaccttcaccgtcaacccccggcggtctgtgccccctgcgaccccagccaccccaacctctccagccacagttgatgctgcagtcccgggggctgggaagaagcggtacccaactgccgaggagatcttggttctggggggctacctccgtctcagccgcagctgccttgccaaggggtcccccgaaagacaccacaaacagcttaagatctccttcagcgagacagccctggagaccacgtaccaatacccctccgagagttcggtactggaggagctgggcccggagcctgaggtccccagtgcccccaaccctccagcagcccaacccgacgacgaagaggatgaggaagagctgctgctgctgcagccagagctccagggcgggctgcgcaccaaggccctgattgtggatgagtcctgccggcggtgaccatcttccaacatagggatatacctccctccttcttataactgaagatcctggagcccggaagattcagggcagacagaccctgataatgagcctggcagggaagggcaaccaacatcttgtaacttgctttccccaccctgtttctgggggcagagccaattgcccaatttctaccctaatccaaagtccctggtgtgggtggggttaaacgtgctggtgcatcctaggtcatccaagagtgagcgccaagtcctgagaaggggcacagaactccctggagggtggagatggagcacctgccccccatggcagggtacactctccccacagccttcctccccaccatcccgtggggactctcgggatttaagcactcgtctctctgggaggcccagaccccactccatttataggcacatctccttcatttcctaggtcactgcccctttgtttacagctcctgcctcctcccttgaccacagcctggtttacaaattccatcagctcccagccccacctgccaaagtcccaggtttacaagccacgcttacttgctgtgtctgcgtggaattctctcctctgtcccctccagtctcctcattggagtgacctgaaggtgtggcttcctccactttttctcagtattactttgccttagttttccccaagagggaaggctggaactcttaactctgtaccccttgatagttatttaattctgtttctcctagtggttcacaattgaactgaattgagatggtgtcgggtggctaaggagacacctcacctctccttccccattgtgccgcctttatcaattgcctgttttgttttgtttgttttttaactttccataataaaatggagttctcttcaa

SEQ ID NO: 303550 - DNA, 3295 bp, Homo sapiens
cacgaggaggcagcctggcctgcacccaggtgcccctccttgcctccccaacaccccctcaggtcccgttgcctcctggtcctttcagggattcctggtccttccttcccacactagcctccctggggtatcgctgaggcagcctggcctgcacccaggttcccctcacccctgccacatttctctcttctccctcacgccaactttccttttcgcccttctctctctttctcacatcctagagacggtctttaatacgcattaaccctgtgctgccacatctggctcctgccctcattgcctccaatccggactcttcctctcacatcacccccaccacccccaacttgggctcacaacttctcttcactttttccatttccccagttctctgccttccgtctttccctctgtcctcatccttagcccctctgccctgctttgtgtcccacctctccccctccacttcctctcctcccaccctcagtctcacccccgggctgtctcactctctggagcctctccttcctgttctctgtccccagtgctccctaccctcacctcaagacgaccatggccaccatcccagactggaagctacagctgctagcccggcgccggcaggaggaggcgtccgttcgaggccgagagaaagcagaacgggagcgcctgtcccagatgccagcctggaaacgagggctcctggagcgccgccgggccaagcttgggctgtcccctggggagcctagccctgtgctagggactgtagaggctggacctccagacccggatgagtctgcggtccttctggaggccatcgggccagtgcaccagaaccgattcatccggcaggagcggcagcagcagcagcagcaacaacaacggagtgaagagctgctagcagagagaaagcctgggcctctggaggcccgggagcggagacccagccctggggagatgcgggatcagagccccaagggaagagagtcaagagaagagagactaagtccgagggagaccagagagaggaggctggggatagggggagcccaagagttgagcctgaggcctctggaggctcgggactggaggcaaagcccaggagaggtgggagacaggagctcccgactgtcagaggcatggaaatggaggctgagtcctggagaaactccagagcggagtctgagactagcagagtctcgagagcaaagccccaggagaaaagaggtggaaagtagactgagcccaggggaatctgcctaccagaagttgggcctgacagaggcccataaatggagacctgactccagagagtctcaggaacagagtttggtacaactggaggcaacagagtggaggctgaggtcaggagaagaaagacaagactactcggaagaatgtgggagaaaagaagagtggccagttccaggggtagctccaaaagagactgcagagctgtccgagaccctgacaagggaggcccaaggcaacagttccgcaggagtggaggcagcagagcagaggcctgtggaagatggcgagaggggcatgaagccaacagaagggtggaaatggaccctgaactccgggaaggctcgagaatggacacccagggacatagaggctcaaactcagaaaccagaacctccagagtcagcagagaagcttctggaatctcccggtgtggaggctggagaaggggaggctgagaaggaggaggcgggggctcagggcaggcctctgagagccctgcagaactgctgctctgtgccctcccccctcccaccagaggacgctgggactggaggcctgagacagcaggaagaggaagcagtggagctccagcccccaccaccagcccctctgtctcccccacccccagccccaactgccccccaacctcctggggatcccctcatgagccgcctgttctatggggtgaaggcagggccaggggtgggggccccccgccgcagtggacacaccttcaccgtcaacccccggcggtctgtgccccctgcgaccccagccaccccaacctctccagccacagttgatgctgcagtcccgggggctgggaagaagcggtacccaactgccgaggagatcttggttctggggggctacctccgtctcagccgcagctgccttgccaaggggtcccccgaaagacaccacaaacagcttaagatctccttcagcgagacagccctggagaccacgtaccaatacccctccgagagttcggtactggaggagctgggcccggagcctgaggtccccagtgcccccaaccctccagcagcccaacccgacgacgaagaggatgaggaagagctgctgctgctgcagccagagctccagggcgggctgcgcaccaaggccctgattgtggatgagtcctgccggcggtgaccatcttccaacatagggatatacctccctccttcttataactgaagatcctggagcccggaagattcagggcagacagaccctgataatgagcctggcagggaagggcaaccaacatcttgtaacttgctttccccaccctgtttctgggggcagagccaattgcccaatttctaccctaatccaaagtccctggtgtgggtggggttaaacgtgctggtgcatcctaggtcatccaagagtgagcgccaagtcctgagaaggggcacagaactccctggagggtggagatggagcacctgccccccatggcagggtacactctccccacagccttcctccccaccatcccgtggggactctcgggatttaagcactcgtctctctgggaggcccagaccccactccatttataggcacatctccttcatttcctaggtcactgcccctttgtttacagctcctgcctcctcccttgaccacagcctggtttacaaattccatcagctcccagccccacctgccaaagtcccaggtttacaagccacgcttacttgctgtgtctgcgtggaattctctcctctgtcccctccagtctcctcattggagtgacctgaaggtgtggcttcctccactttttctcagtattactttgccttagttttccccaagagggaaggctggaactcttaactctgtaccccttgatagttatttaattctgtttctcctagtggttcacaattgaactgaattgagatggtgtcgggtggctaaggagacacctcacctctccttccccattgtgccgcctttatcaattgcctgttttgttttgtttgttttttaactttccataataaaatggagttctcttcaa

SEQ ID NO: 303551 - DNA, 4290 bp, Homo sapiens
  misc_feature (3913)..(3913): n is a, c, g, or t
tcctcttcctctctctggacgcccggctcctccgcaccccctcccccgggggtcccgcggcctgtgagttgactgaggggctcagacttggggagtgggtgtctcctcgcccctgtccttgctcccgtccctggcccggaccttggctgtctcctctttgtgccgagattgtcagtctgtgcggctacagcggggtggagacggccggctctgtcacggcttcatgagagcggggacggggcgcaggacttgcaggcgccggggagaagagacatggagccggcccttggcactctggggtcgcgtggggcagtcggtgggggaggcaggcggtggtgacaggacagggtgggggtggacgccagggttctgggaacgcgctggcagccctgacgcccgggttccgaaagtctcgggggtgggtatttcccccgacccgcctcgggggcggagtgcggggcagaggggtgggggctggggagaggcgtggcccgagcggtgctggaagcggagccgggacctttggggcccgcgctgagacgcgcccggctgctgccgccgccctcctttcccctcttccctggtttcccttctcctctagacctgttcgctctccgcccctccttgcctccccaacaccccctcaggtcccgttgcctcctggtcctttcagggattcctggtccttccttcccacactagcctccctggggtatcgctgaggcagcctggcctgcacccaggttcccctcacccctgccacatttctctcttctccctcacgccaactttccttttcgcccttctctctctttctcacatcctagagacggtctttaatacgcattaaccctgtgctgccacatctggctcctgccctcattgcctccaatccggactcttcctctcacatcacccccaccacccccaacttgggctcacaacttctcttcactttttccatttccccagttctctgccttccgtctttccctctgtcctcatccttagcccctctgccctgctttgtgtcccacctctccccctccacttcctctcctcccaccctcagtctcacccccgggctgtctcactctctggagcctctccttcctgttctctgtccccagtgctccctaccctcacctcaagacgaccatggccaccatcccagactggaagctacagctgctagcccggcgccggcaggaggaggcgtccgttcgaggccgagagaaagcagaacgggagcgcctgtcccagatgccagcctggaaacgagggctcctggagcgccgccgggccaagcttgggctgtcccctggggagcctagccctgtgctagggactgtagaggctggacctccagacccggatgagtctgcggtccttctggaggccatcgggccagtgcaccagaaccgattcatccggcaggagcggcagcagcagcagcagcaacaacaacggagtgaagagctgctagcagagagaaagcctgggcctctggaggcccgggagcggagacccagccctggggagatgcgggatcagagccccaagggaagagagtcaagagaagagagactaagtccgagggagaccagagagaggaggctggggatagggggagcccaagagttgagcctgaggcctctggaggctcgggactggaggcaaagcccaggagaggtgggagacaggagctcccgactgtcagaggcatggaaatggaggctgagtcctggagaaactccagagcggagtctgagactagcagagtctcgagagcaaagccccaggagaaaagaggtggaaagtagactgagcccaggggaatctgcctaccagaagttgggcctgacagaggcccataaatggagacctgactccagagagtctcaggaacagagtttggtacaactggaggcaacagagtggaggctgaggtcaggagaagaaagacaagactactcggaagaatgtgggagaaaagaagagtggccagttccaggggtagctccaaaagagactgcagagctgtccgagaccctgacaagggaggcccaaggcaacagttccgcaggagtggaggcagcagagcagaggcctgtggaagatggcgagaggggcatgaagccaacagaagggtggaaatggaccctgaactccgggaaggctcgagaatggacacccagggacatagaggctcaaactcagaaaccagaacctccagagtcagcagagaagcttctggaatctcccggtgtggaggctggagaaggggaggctgagaaggaggaggcgggggctcagggcaggcctctgagagccctgcagaactgctgctctgtgccctcccccctcccaccagaggacgctgggactggaggcctgagacagcaggaagaggaagcagtggagctccagcccccaccaccagcccctctgtctcccccacccccagccccaactgccccccaacctcctggggatcccctcatgagccgcctgttctatggggtgaaggcagggccaggggtgggggccccccgccgcagtggacacaccttcaccgtcaacccccggcggtctgtgccccctgcgaccccagccaccccaacctctccagccacagttgatgctgcagtcccgggggctgggaagaagcggtacccaactgccgaggagatcttggttctggggggctacctccgtctcagccgcagctgccttgccaaggggtcccccgaaagacaccacaaacagcttaagatctccttcagcgagacagccctggagaccacgtaccaatacccctccgagagttcggtactggaggagctgggcccggagcctgaggtccccagtgcccccaaccctccagcagcccaacccgacgacgaagaggatgaggaagagctgctgctgctgcagccagagctccagggcgggctgcgcaccaaggccctgattgtggatgagtcctgccggcggtgaccatcttccaacatagggatatacctccctccttcttataactgaagatcctggagcccggaagattcagggcagacagaccctgataatgagcctggcagggaagggcaaccaacatcttgtaacttgctttccccaccctgtttctgggggcagagccaattgcccaatttctaccctaatccaaagtccctggtgtgggtggggttaaacgtgctggtgcatcctaggtcatccaagagtgagcgccaagtcctgagaaggggcacagaactccctggagggtggagatggagcacctgccccccatggcagggtacactctccccacagccttcctccccaccatcccgtggggactctcgggatttaagcactcgtctctctgggaggcccagaccccactccatttataggcacatctccttcatttcctaggtcactgcccctttgtttacagctcctgcctcctcccttgaccacagcctggtttacaaattccatcagctcccagccccacctgccaaagtcccaggtttacaagccacgcttacttgctgtgtctgcgtggaattctctcctctgtcccctccagtctcctcattggagtgacctgaaggtgtggcttcctccactttttctcagtattactttgccttagttttccccaagagggaaggctggaactcttaactctgtaccccttgatagttatttaattctgtttctcctagtggttcacaattgaactgaattgagatggtgtcgggtggctaaggagacacctcacctctccttccccattgtgccgcctttatcaattgcctgttttgttttgtttgttttttaactttccataataaaatggagttctcttcaaaaaaaaaaaaaaaaaaaaaaaaaaaaaaaaaanaaaaaaaaaaaaggggggggggggcaaaaaattccccggggggggcccatttagggggaccccgcgttttttgtggaaaaggggggcccccaaaaggggagcgccccctaataaaaacagcacgagagggacgcgcggccgcgcataacaacaccgttggtcgggggggaaaacacgggcccccgcgggacatcggggggaagcgagacccccactcgcgggggcggggccaccatcggggcgaccacaccccccacgagagatataacgccccggaggcaaataatcaacactggaggtgttatgggtgctatcccgagcgcgtatagtcgtggcgtcggaaaaatgcctcaccggggtaatgttgggacatttcg

SEQ ID NO: 303552 - DNA, 1974 bp, Homo sapiens
ggaaaatgcaactgaaggaattgttgtgaaaaaagggacagcgagtttgaaataaaagttgttagagtggtactgaggagaaaaaagaatccgagaccatgtactgcgcatacacaatcccgggcatgggcggcaactctttgatgtactactataatgggaaagcggtctatgctccatcagcaagcactgccgactacaatagggactcgccaggctatccttcctccaaaccagcaaccagcactttccctagctccttcttcatgcaagatggccatcacagcagtgacccttggagctcctccagtgggatgaatcagcctggctatgcaggaatgttgggcaactcttctcatattccacagtccagcagctactgtagcctgcatccacatgaacgtttgagctatccatcacactcctcagcagacatcaattccagtcttcctccgatgtccactttccatcgtagtggtacaaaccattacagcacctcttcctgtacgcctcctgccaacgggacagacagtataatggcaaatagaggaagcggggcagccggcagctcccagactggagatgctctggggaaagcacttgcttcgatctattctccagatcacactaacaacagcttttcatcaaacccttcaactcctgttggctctcctccatctctctcagcaggcacagctgtttggtctagaaatggaggacaggcctcatcgtctcctaattatgaaggacccttacactctttgcaaagccgaattgaagatcgtttagaaagactggatgatgctattcatgttctccggaaccatgcagtgggcccatccacagctatgcctggtggtcatggggacatgcatggaatcattggaccttctcataatggagccatgggtggtctgggctcagggtatggaaccggccttctttcagccaacagacattcactcatggtggggacccatcgtgaagatggcgtggccctgagaggcagccattctcttctgccaaaccaggttccggttccacagcttcctgtccagtctgcgacttcccctgacctgaacccaccccaggacccttacagaggcatgccaccaggactacaggggcagagtgtctcctctggcagctctgagatcaaatccgatgacgagggtgatgagaacctgcaagacacgaaatcttcggaggacaagaaattagatgacgacaagaaggatatcaaatcaattactagcaataatgacgatgaggacctgacaccagagcagaaggcagagcgtgagaaggagcggaggatggccaacaatgcccgagagcgtctgcgggtccgtgacatcaacgaggctttcaaagagctcggccgcatggtgcagctccacctcaagagtgacaagccccagaccaagctcctgatcctccaccaggcggtggccgtcatcctcagtctggagcagcaagtccgagaaaggaatctgaatccgaaagctgcgtgtctgaaaagaagggaggaagagaaggtgtcctcggagcctccccctctctccttggccggcccacaccctggaatgggagacgcatcgaatcacatgggacagatgtaaaagggtccaagttgccacattgcttcattaaaacaagagaccacttccttaacagctgtattatcttaaacccacataaacacttctccttaacccccatttttgtaatataagacaagtctgagtagttatgaatcgcagacgcaagaggtttcagcattcccaattatcaaaaaacagaaaaacaaaaaaaagaaagaaaaaagtgcaacttgagggacgactttctttaacatatcattcagaatgtgcaaagcagtatgtacaggctgagacacagcccagagactgaacggcaatctttccacactgtggaacaatgcatttgtgcctaaacttcttttggaaaaaa

SEQ ID NO: 303553 - DNA, 1107 bp, Homo sapiens
cttctctttataagcccgcagttcccggatgtgaatggattacaatgtatctttcagggaaacctattattatcaatgtgactccacgggggagtccatggtgatgatgatgaggaggaggatgatgatgatgagacacctctaaacttggaacaagtttaagactttatgagagaagaaaaaaaatcaccaacaagaattgtttgaggaaaaattataactatcctgtgttcatttttttttttataaacaataagaaaaagttgttggatttttttttaatgatttcttttttgggggagggaattttgttgcagttttatggtggaaaatgcaaaaaccagagccaggtgcataatcttgtaatctgtggatatccctggagcaggactgagtaccagttaaaatactttttggggatacacatgtgagatactaagtacttgcagaagatttttgtctctctttttaaagtctctttccttggaatattgtgagaatatttgtggccatttaaggtaacgtttcaatttgccgtcagagtaaactgtttgtaattgaatttaatttttaaaatgtcgatcccgatgttttattaaaacaaaagggacaacctattaaataattgccaatgggaaaaagtgtgtgcatgcattttgtgtatgtactcgcacatctagcaataccaggatttgtagaatgtgtgttttttttttcaaacacagcgttaaaatagcttatgttgcatataccggataaagcacgcttgttattacgaaacgatagaattatgaagcttaaattttatcctaaaaagtgatgtgaaaaagtatgttttaagagcatgcagggcctataatggtaaatgttgaattaaaaacttacagtgctggcgaacagggacttagcgtgcctaggaactcaagtgcaaaaacaaaacaacatccacccccaaaaattgccctttttttttttcgaagtttgcagttatactattctgtgacttaaaagggaggggaaagaaagtatgcaattcagatttcgcccccaacgcaaaactaccgaaacgaaaatctccccaggaaaatgtggcttgatttatagacg

SEQ ID NO: 303554 - DNA, 779 bp, Homo sapiens
gtataattcctaccatattgtcaaatggagtctatatctcctcaaagggaaagaaacactgacgtgagtcagaagttttcactcacttggcactgaatcagcttaaagttcgaggttgaaaaattcacaaatatttatagcacacctactaagtgccacgcctcctggaaggtggacagcaatggccaatgtttctgccattggaaagatttgcaccgaagtgtgtatggccacatgtagttgtacaaatcagagttcattttgtaatgctttataagggtctggtaccactgattctccttgcagactaataaacacagagcttatatgactcttaaaaatacagtgatagcaagtgcatcctaaattatgtaatcatgtggtccatgataacagtgtaatatatgatatacagatggaatcagccacctggcttactgtaattgttgttgaggtcctttgttatgaacatatatttctgttaacaatgcaacaaaataattttttaagctgtttttttttttctgtactgcctcaaatctagataaacggaatgtgttggaaaggacaacaaataagaagttaaatatgtggaaatgacatggaaagcacctgtttcttccctttgttttcttctacgtcatcaggaaataatatttaaccatagaatatggtgtccctctaagaaaatgtttataattgaatgttcaaagtagaatatagattaaataagtaaagatgacttgccaaaaaaaattaaagaacatttgaaacaaaca

SEQ ID NO: 303555 - DNA, 515 bp, Homo sapiens
cttctctttataagcccgcagttcccggatgtgaatggattacaatgtatctttcagggaaacctattattatcaatgtgactccacgggggagtccatggtgatgatgatgaggaggaggatgatgatgatgagacacctctaaacttggaacaagtttaagactttatgagagaagaaaaaaaatcaccaacaagaattgtttgaggaaaaattataactatcctgtgttcatttttttttttataaacaataagaaaaaaaaaaaaaaaaaaaaaaaaaaaaaaaaaaaaaaaaaaaaaaaaaaaaaaaaaaaaaaaaaaaaaaaaaaaaaaaaatagaaaaaaaataaaaacacaaaaaaatttatttttacaattttaaaatcacttacaattattattaccacaaccttaattacaattcttatgattttccctcaactcaattttcatttttctttttaattatctatcttcttcctcctaactttctctatctttccttcttgtccc

SEQ ID NO: 303556 - DNA, 2337 bp, Homo sapiens
acaggcaaatcctatacgagatggaaatggacattgccacgtttatggccaagatgttttcacctcctgtgagcagtgggaaaaatggaccaacttctttggcaagtggacattttactggctcaaatgtagaagacagaagtagctcagggtcctgggggaatggaggacatccaagcccgtccaggaactatggagatgggactccctatgaccacatgaccagcagggaccttgggtcacatgacaatctctctccaccttttgtcaattccagaatacaaagtaaaacagaaaggggctcatactcatcttatgggagagaatcaaacttacagggttgccaccagcagagtctccttggaggtgacatggatatgggcaacccaggaaccctttcgcccaccaaacctggttcccagtactatcagtattctagcaataatccccgaaggaggcctcttcacagtagtgccatggaggtacagacaaagaaagttcgaaaagttcctccaggtttgccatcttcagtctatgctccatcagcaagcactgccgactacaatagggactcgccaggctatccttcctccaaaccagcaaccagcactttccctagctccttcttcatgcaagatggccatcacagcagtgacccttggagctcctccagtgggatgaatcagcctggctatgcaggaatgttgggcaactcttctcatattccacagtccagcagctactgtagcctgcatccacatgaacgtttgagctatccatcacactcctcagcagacatcaattccagtcttcctccgatgtccactttccatcgtagtggtacaaaccattacagcacctcttcctgtacgcctcctgccaacgggacagacagtataatggcaaatagaggaagcggggcagccggcagctcccagactggagatgctctggggaaagcacttgcttcgatctattctccagatcacactaacaacagcttttcatcaaacccttcaactcctgttggctctcctccatctctctcagcaggcacagctgtttggtctagaaatggaggacaggcctcatcgtctcctaattatgaaggacccttacactctttgcaaagccgaattgaagatcgtttagaaagactggatgatgctattcatgttctccggaaccatgcagtgggcccatccacagctatgcctggtggtcatggggacatgcatggaatcattggaccttctcataatggagccatgggtggtctgggctcagggtatggaaccggccttctttcagccaacagacattcactcatggtggggacccatcgtgaagatggcgtggccctgagaggcagccattctcttctgccaaaccaggttccggttccacagcttcctgtccagtctgcgacttcccctgacctgaacccaccccaggacccttacagaggcatgccaccaggactacaggggcagagtgtctcctctggcagctctgagatcaaatccgatgacgagggtgatgagaacctgcaagacacgaaatcttcggaggacaagaaattagatgacgacaagaaggatatcaaatcaattactagcaataatgacgatgaggacctgacaccagagcagaaggcagagcgtgagaaggagcggaggatggccaacaatgcccgagagcgtctgcgggtccgtgacatcaacgaggctttcaaagagctcggccgcatggtgcagctccacctcaagagtgacaagccccagaccaagctcctgatcctccaccaggcggtggccgtcatcctcagtctggagcagcaagtccgagaaaggaatctgaatccgaaagctgcgtgtctgaaaagaagggaggaagagaaggtgtcctcggagcctccccctctctccttggccggcccacaccctggaatgggagacgcatcgaatcacatgggacagatgtaaaagggtccaagttgccacattgcttcattaaaacaagagaccacttccttaacagctgtattatcttaaacccacataaacacttctccttaacccccatttttgtaatataagacaagtctgagtagttatgaatcgcagacgcaagaggtttcagcattcccaattatcaaaaaacagaaaaacaaaaaaaagaaagaaaaaagtgcaacttgagggacgactttctttaacatatcattcagaatgtgcaaagcagtatgtacaggctgagacacagcccagagactgaacggcaatctttccacactgtggaacaatgcatttgtgcctaaacttcttttggaaaaaa

SEQ ID NO: 303557 - DNA, 2463 bp, Homo sapiens
cggggggatcttggctgtgtgtctgcggatctgtagtggcggcggcggcggcggcggcggggaggcagcaggcgcgggagcgggcgcaggagcaggcggcggcggtggcggcggcggttagacatgaacgccgcctcggcgccggcggtgcacggagagccccttctcgcgcgcgggcgatgttttcacctcctgtgagcagtgggaaaaatggaccaacttctttggcaagtggacattttactggctcaaatgtagaagacagaagtagctcagggtcctgggggaatggaggacatccaagcccgtccaggaactatggagatgggactccctatgaccacatgaccagcagggaccttgggtcacatgacaatctctctccaccttttgtcaattccagaatacaaagtaaaacagaaaggggctcatactcatcttatgggagagaatcaaacttacagggttgccaccagcagagtctccttggaggtgacatggatatgggcaacccaggaaccctttcgcccaccaaacctggttcccagtactatcagtattctagcaataatccccgaaggaggcctcttcacagtagtgccatggaggtacagacaaagaaagttcgaaaagttcctccaggtttgccatcttcagtctatgctccatcagcaagcactgccgactacaatagggactcgccaggctatccttcctccaaaccagcaaccagcactttccctagctccttcttcatgcaagatggccatcacagcagtgacccttggagctcctccagtgggatgaatcagcctggctatgcaggaatgttgggcaactcttctcatattccacagtccagcagctactgtagcctgcatccacatgaacgtttgagctatccatcacactcctcagcagacatcaattccagtcttcctccgatgtccactttccatcgtagtggtacaaaccattacagcacctcttcctgtacgcctcctgccaacgggacagacagtataatggcaaatagaggaagcggggcagccggcagctcccagactggagatgctctggggaaagcacttgcttcgatctattctccagatcacactaacaacagcttttcatcaaacccttcaactcctgttggctctcctccatctctctcagcaggcacagctgtttggtctagaaatggaggacaggcctcatcgtctcctaattatgaaggacccttacactctttgcaaagccgaattgaagatcgtttagaaagactggatgatgctattcatgttctccggaaccatgcagtgggcccatccacagctatgcctggtggtcatggggacatgcatggaatcattggaccttctcataatggagccatgggtggtctgggctcagggtatggaaccggccttctttcagccaacagacattcactcatggtggggacccatcgtgaagatggcgtggccctgagaggcagccattctcttctgccaaaccaggttccggttccacagcttcctgtccagtctgcgacttcccctgacctgaacccaccccaggacccttacagaggcatgccaccaggactacaggggcagagtgtctcctctggcagctctgagatcaaatccgatgacgagggtgatgagaacctgcaagacacgaaatcttcggaggacaagaaattagatgacgacaagaaggatatcaaatcaattactagcaataatgacgatgaggacctgacaccagagcagaaggcagagcgtgagaaggagcggaggatggccaacaatgcccgagagcgtctgcgggtccgtgacatcaacgaggctttcaaagagctcggccgcatggtgcagctccacctcaagagtgacaagccccagaccaagctcctgatcctccaccaggcggtggccgtcatcctcagtctggagcagcaagtccgagaaaggaatctgaatccgaaagctgcgtgtctgaaaagaagggaggaagagaaggtgtcctcggagcctccccctctctccttggccggcccacaccctggaatgggagacgcatcgaatcacatgggacagatgtaaaagggtccaagttgccacattgcttcattaaaacaagagaccacttccttaacagctgtattatcttaaacccacataaacacttctccttaacccccatttttgtaatataagacaagtctgagtagttatgaatcgcagacgcaagaggtttcagcattcccaattatcaaaaaacagaaaaacaaaaaaaagaaagaaaaaagtgcaacttgagggacgactttctttaacatatcattcagaatgtgcaaagcagtatgtacaggctgagacacagcccagagactgaacggcaatctttccacactgtggaacaatgcatttgtgcctaaacttcttttggaaaaaa

SEQ ID NO: 303558 - DNA, 2355 bp, Homo sapiens
tccttgttatctgtaatcatcacaacagtactggagggtaaatacggtcattcccattttacagatgaggatacattcaatgtgagatgttaaagatgttcttcagaatttcccaggtagcaggcagctcatggtattcaaaagatgtagaagacagaagtagctcagggtcctgggggaatggaggacatccaagcccgtccaggaactatggagatgggactccctatgaccacatgaccagcagggaccttgggtcacatgacaatctctctccaccttttgtcaattccagaatacaaagtaaaacagaaaggggctcatactcatcttatgggagagaatcaaacttacagggttgccaccagcagagtctccttggaggtgacatggatatgggcaacccaggaaccctttcgcccaccaaacctggttcccagtactatcagtattctagcaataatccccgaaggaggcctcttcacagtagtgccatggaggtacagacaaagaaagttcgaaaagttcctccaggtttgccatcttcagtctatgctccatcagcaagcactgccgactacaatagggactcgccaggctatccttcctccaaaccagcaaccagcactttccctagctccttcttcatgcaagatggccatcacagcagtgacccttggagctcctccagtgggatgaatcagcctggctatgcaggaatgttgggcaactcttctcatattccacagtccagcagctactgtagcctgcatccacatgaacgtttgagctatccatcacactcctcagcagacatcaattccagtcttcctccgatgtccactttccatcgtagtggtacaaaccattacagcacctcttcctgtacgcctcctgccaacgggacagacagtataatggcaaatagaggaagcggggcagccggcagctcccagactggagatgctctggggaaagcacttgcttcgatctattctccagatcacactaacaacagcttttcatcaaacccttcaactcctgttggctctcctccatctctctcagcaggcacagctgtttggtctagaaatggaggacaggcctcatcgtctcctaattatgaaggacccttacactctttgcaaagccgaattgaagatcgtttagaaagactggatgatgctattcatgttctccggaaccatgcagtgggcccatccacagctatgcctggtggtcatggggacatgcatggaatcattggaccttctcataatggagccatgggtggtctgggctcagggtatggaaccggccttctttcagccaacagacattcactcatggtggggacccatcgtgaagatggcgtggccctgagaggcagccattctcttctgccaaaccaggttccggttccacagcttcctgtccagtctgcgacttcccctgacctgaacccaccccaggacccttacagaggcatgccaccaggactacaggggcagagtgtctcctctggcagctctgagatcaaatccgatgacgagggtgatgagaacctgcaagacacgaaatcttcggaggacaagaaattagatgacgacaagaaggatatcaaatcaattactagcaataatgacgatgaggacctgacaccagagcagaaggcagagcgtgagaaggagcggaggatggccaacaatgcccgagagcgtctgcgggtccgtgacatcaacgaggctttcaaagagctcggccgcatggtgcagctccacctcaagagtgacaagccccagaccaagctcctgatcctccaccaggcggtggccgtcatcctcagtctggagcagcaagtccgagaaaggaatctgaatccgaaagctgcgtgtctgaaaagaagggaggaagagaaggtgtcctcggagcctccccctctctccttggccggcccacaccctggaatgggagacgcatcgaatcacatgggacagatgtaaaagggtccaagttgccacattgcttcattaaaacaagagaccacttccttaacagctgtattatcttaaacccacataaacacttctccttaacccccatttttgtaatataagacaagtctgagtagttatgaatcgcagacgcaagaggtttcagcattcccaattatcaaaaaacagaaaaacaaaaaaaagaaagaaaaaagtgcaacttgagggacgactttctttaacatatcattcagaatgtgcaaagcagtatgtacaggctgagacacagcccagagactgaacggcaatctttccacactgtggaacaatgcatttgtgcctaaacttcttttggaaaaaa

SEQ ID NO: 303559 - DNA, 2196 bp, Homo sapiens
cttactaataggaattggcgtgattcctcacagacacaaagatttcctctgctgagtaagcgtgaggccccttaacttgtgaaagcatcatccagaccgtgtgagtctgtctgtgtatgtgcagaacacagaccctcctttctccgtttgtggggaatacttccctcgggtgaaactgaagttaatttttttttttttccaaacacaagcagagtctccttggaggtgacatggatatgggcaacccaggaaccctttcgcccaccaaacctggttcccagtactatcagtattctagcaataatccccgaaggaggcctcttcacagtagtgccatggaggtacagacaaagaaagttcgaaaagttcctccaggtttgccatcttcagtctatgctccatcagcaagcactgccgactacaatagggactcgccaggctatccttcctccaaaccagcaaccagcactttccctagctccttcttcatgcaagatggccatcacagcagtgacccttggagctcctccagtgggatgaatcagcctggctatgcaggaatgttgggcaactcttctcatattccacagtccagcagctactgtagcctgcatccacatgaacgtttgagctatccatcacactcctcagcagacatcaattccagtcttcctccgatgtccactttccatcgtagtggtacaaaccattacagcacctcttcctgtacgcctcctgccaacgggacagacagtataatggcaaatagaggaagcggggcagccggcagctcccagactggagatgctctggggaaagcacttgcttcgatctattctccagatcacactaacaacagcttttcatcaaacccttcaactcctgttggctctcctccatctctctcagcaggcacagctgtttggtctagaaatggaggacaggcctcatcgtctcctaattatgaaggacccttacactctttgcaaagccgaattgaagatcgtttagaaagactggatgatgctattcatgttctccggaaccatgcagtgggcccatccacagctatgcctggtggtcatggggacatgcatggaatcattggaccttctcataatggagccatgggtggtctgggctcagggtatggaaccggccttctttcagccaacagacattcactcatggtggggacccatcgtgaagatggcgtggccctgagaggcagccattctcttctgccaaaccaggttccggttccacagcttcctgtccagtctgcgacttcccctgacctgaacccaccccaggacccttacagaggcatgccaccaggactacaggggcagagtgtctcctctggcagctctgagatcaaatccgatgacgagggtgatgagaacctgcaagacacgaaatcttcggaggacaagaaattagatgacgacaagaaggatatcaaatcaattactagcaataatgacgatgaggacctgacaccagagcagaaggcagagcgtgagaaggagcggaggatggccaacaatgcccgagagcgtctgcgggtccgtgacatcaacgaggctttcaaagagctcggccgcatggtgcagctccacctcaagagtgacaagccccagaccaagctcctgatcctccaccaggcggtggccgtcatcctcagtctggagcagcaagtccgagaaaggaatctgaatccgaaagctgcgtgtctgaaaagaagggaggaagagaaggtgtcctcggagcctccccctctctccttggccggcccacaccctggaatgggagacgcatcgaatcacatgggacagatgtaaaagggtccaagttgccacattgcttcattaaaacaagagaccacttccttaacagctgtattatcttaaacccacataaacacttctccttaacccccatttttgtaatataagacaagtctgagtagttatgaatcgcagacgcaagaggtttcagcattcccaattatcaaaaaacagaaaaacaaaaaaaagaaagaaaaaagtgcaacttgagggacgactttctttaacatatcattcagaatgtgcaaagcagtatgtacaggctgagacacagcccagagactgaacggcaatctttccacactgtggaacaatgcatttgtgcctaaacttcttttggaaaaaa

SEQ ID NO: 303560 - DNA, 2110 bp, Homo sapiens
ttgggcttagatcttctggtgcctccctcggcgtgctacccataaggtcgaaagaaaagtaaaacagaaaggggctcatactcatcttatgggagagaatcaaacttacagggttgccaccagcagagtctccttggaggtgacatggatatgggcaacccaggaaccctttcgcccaccaaacctggttcccagtactatcagtattctagcaataatccccgaaggaggcctcttcacagtagtgccatggaggtacagacaaagaaagttcgaaaagttcctccaggtttgccatcttcagtctatgctccatcagcaagcactgccgactacaatagggactcgccaggctatccttcctccaaaccagcaaccagcactttccctagctccttcttcatgcaagatggccatcacagcagtgacccttggagctcctccagtgggatgaatcagcctggctatgcaggaatgttgggcaactcttctcatattccacagtccagcagctactgtagcctgcatccacatgaacgtttgagctatccatcacactcctcagcagacatcaattccagtcttcctccgatgtccactttccatcgtagtggtacaaaccattacagcacctcttcctgtacgcctcctgccaacgggacagacagtataatggcaaatagaggaagcggggcagccggcagctcccagactggagatgctctggggaaagcacttgcttcgatctattctccagatcacactaacaacagcttttcatcaaacccttcaactcctgttggctctcctccatctctctcagcaggcacagctgtttggtctagaaatggaggacaggcctcatcgtctcctaattatgaaggacccttacactctttgcaaagccgaattgaagatcgtttagaaagactggatgatgctattcatgttctccggaaccatgcagtgggcccatccacagctatgcctggtggtcatggggacatgcatggaatcattggaccttctcataatggagccatgggtggtctgggctcagggtatggaaccggccttctttcagccaacagacattcactcatggtggggacccatcgtgaagatggcgtggccctgagaggcagccattctcttctgccaaaccaggttccggttccacagcttcctgtccagtctgcgacttcccctgacctgaacccaccccaggacccttacagaggcatgccaccaggactacaggggcagagtgtctcctctggcagctctgagatcaaatccgatgacgagggtgatgagaacctgcaagacacgaaatcttcggaggacaagaaattagatgacgacaagaaggatatcaaatcaattactagcaataatgacgatgaggacctgacaccagagcagaaggcagagcgtgagaaggagcggaggatggccaacaatgcccgagagcgtctgcgggtccgtgacatcaacgaggctttcaaagagctcggccgcatggtgcagctccacctcaagagtgacaagccccagaccaagctcctgatcctccaccaggcggtggccgtcatcctcagtctggagcagcaagtccgagaaaggaatctgaatccgaaagctgcgtgtctgaaaagaagggaggaagagaaggtgtcctcggagcctccccctctctccttggccggcccacaccctggaatgggagacgcatcgaatcacatgggacagatgtaaaagggtccaagttgccacattgcttcattaaaacaagagaccacttccttaacagctgtattatcttaaacccacataaacacttctccttaacccccatttttgtaatataagacaagtctgagtagttatgaatcgcagacgcaagaggtttcagcattcccaattatcaaaaaacagaaaaacaaaaaaaagaaagaaaaaagtgcaacttgagggacgactttctttaacatatcattcagaatgtgcaaagcagtatgtacaggctgagacacagcccagagactgaacggcaatctttccacactgtggaacaatgcatttgtgcctaaacttcttttggaaaaaa

SEQ ID NO: 303561 - DNA, 2192 bp, Homo sapiens
atttctgctttctgtgaaatttgagaatagaacagaccatagtgtgtcttccagtgaatcagtttctcttgtgccgtattgttatttgaatccctgtctacaacatcagctatgcaaaccaaagagaaaggcaaaatctcagtatcttgggcttcaagtctaaatagcagatcacagctgaaatgattccccactgtgtgacaagcagagtctccttggaggtgacatggatatgggcaacccaggaaccctttcgcccaccaaacctggttcccagtactatcagtattctagcaataatccccgaaggaggcctcttcacagtagtgccatggaggtacagacaaagaaagttcgaaaagttcctccaggtttgccatcttcagtctatgctccatcagcaagcactgccgactacaatagggactcgccaggctatccttcctccaaaccagcaaccagcactttccctagctccttcttcatgcaagatggccatcacagcagtgacccttggagctcctccagtgggatgaatcagcctggctatgcaggaatgttgggcaactcttctcatattccacagtccagcagctactgtagcctgcatccacatgaacgtttgagctatccatcacactcctcagcagacatcaattccagtcttcctccgatgtccactttccatcgtagtggtacaaaccattacagcacctcttcctgtacgcctcctgccaacgggacagacagtataatggcaaatagaggaagcggggcagccggcagctcccagactggagatgctctggggaaagcacttgcttcgatctattctccagatcacactaacaacagcttttcatcaaacccttcaactcctgttggctctcctccatctctctcagcaggcacagctgtttggtctagaaatggaggacaggcctcatcgtctcctaattatgaaggacccttacactctttgcaaagccgaattgaagatcgtttagaaagactggatgatgctattcatgttctccggaaccatgcagtgggcccatccacagctatgcctggtggtcatggggacatgcatggaatcattggaccttctcataatggagccatgggtggtctgggctcagggtatggaaccggccttctttcagccaacagacattcactcatggtggggacccatcgtgaagatggcgtggccctgagaggcagccattctcttctgccaaaccaggttccggttccacagcttcctgtccagtctgcgacttcccctgacctgaacccaccccaggacccttacagaggcatgccaccaggactacaggggcagagtgtctcctctggcagctctgagatcaaatccgatgacgagggtgatgagaacctgcaagacacgaaatcttcggaggacaagaaattagatgacgacaagaaggatatcaaatcaattactagcaataatgacgatgaggacctgacaccagagcagaaggcagagcgtgagaaggagcggaggatggccaacaatgcccgagagcgtctgcgggtccgtgacatcaacgaggctttcaaagagctcggccgcatggtgcagctccacctcaagagtgacaagccccagaccaagctcctgatcctccaccaggcggtggccgtcatcctcagtctggagcagcaagtccgagaaaggaatctgaatccgaaagctgcgtgtctgaaaagaagggaggaagagaaggtgtcctcggagcctccccctctctccttggccggcccacaccctggaatgggagacgcatcgaatcacatgggacagatgtaaaagggtccaagttgccacattgcttcattaaaacaagagaccacttccttaacagctgtattatcttaaacccacataaacacttctccttaacccccatttttgtaatataagacaagtctgagtagttatgaatcgcagacgcaagaggtttcagcattcccaattatcaaaaaacagaaaaacaaaaaaaagaaagaaaaaagtgcaacttgagggacgactttctttaacatatcattcagaatgtgcaaagcagtatgtacaggctgagacacagcccagagactgaacggcaatctttccacactgtggaacaatgcatttgtgcctaaacttcttttggaaaaaa

SEQ ID NO: 303562 - DNA, 343 bp, Homo sapiens
gggtcagaagccactatcatcatggtagcccggtgcctggttcttaattaaaggcaacaggagattaatttgaaacattaatttgaaagtgcatatacaaaaagaaaaaattactgcaagaaagcctaaagaacttttctcttgtccctagatgtagaagacagaagtagctcagggtcctgggggaatggaggacatccaagcccgtccagggtaagtatatctaatcttttctcccacaaccagacatcccacatatgtaaattgacaaacagaaggtgtgtttctctctctctctctctctctctctcacacacacacacacacacacacacacacacac

SEQ ID NO: 303563 - DNA, 2555 bp, Homo sapiens
cggggggatcttggctgtgtgtctgcggatctgtagtggcggcggcggcggcggcggcggggaggcagcaggcgcgggagcgggcgcaggagcaggcggcggcggtggcggcggcggttagacatgaacgccgcctcggcgccggcggtgcacggagagccccttctcgcgcgcgggcggtttgtgtgattttgctaaaatgcatcaccaacagcgaatggctgccttagggacggacaaagagctgagtgatttactggatttcagtgcgatgttttcacctcctgtgagcagtgggaaaaatggaccaacttctttggcaagtggacattttactggctcaaatgtagaagacagaagtagctcagggtcctgggggaatggaggacatccaagcccgtccaggaactatggagatgggactccctatgaccacatgaccagcagggaccttgggtcacatgacaatctctctccaccttttgtcaattccagaatacaaagtaaaacagaaaggggctcatactcatcttatgggagagaatcaaacttacagggttgccaccagcagagtctccttggaggtgacatggatatgggcaacccaggaaccctttcgcccaccaaacctggttcccagtactatcagtattctagcaataatccccgaaggaggcctcttcacagtagtgccatggaggtacagacaaagaaagttcgaaaagttcctccaggtttgccatcttcagtctatgctccatcagcaagcactgccgactacaatagggactcgccaggctatccttcctccaaaccagcaaccagcactttccctagctccttcttcatgcaagatggccatcacagcagtgacccttggagctcctccagtgggatgaatcagcctggctatgcaggaatgttgggcaactcttctcatattccacagtccagcagctactgtagcctgcatccacatgaacgtttgagctatccatcacactcctcagcagacatcaattccagtcttcctccgatgtccactttccatcgtagtggtacaaaccattacagcacctcttcctgtacgcctcctgccaacgggacagacagtataatggcaaatagaggaagcggggcagccggcagctcccagactggagatgctctggggaaagcacttgcttcgatctattctccagatcacactaacaacagcttttcatcaaacccttcaactcctgttggctctcctccatctctctcagcaggcacagctgtttggtctagaaatggaggacaggcctcatcgtctcctaattatgaaggacccttacactctttgcaaagccgaattgaagatcgtttagaaagactggatgatgctattcatgttctccggaaccatgcagtgggcccatccacagctatgcctggtggtcatggggacatgcatggaatcattggaccttctcataatggagccatgggtggtctgggctcagggtatggaaccggccttctttcagccaacagacattcactcatggtggggacccatcgtgaagatggcgtggccctgagaggcagccattctcttctgccaaaccaggttccggttccacagcttcctgtccagtctgcgacttcccctgacctgaacccaccccaggacccttacagaggcatgccaccaggactacaggggcagagtgtctcctctggcagctctgagatcaaatccgatgacgagggtgatgagaacctgcaagacacgaaatcttcggaggacaagaaattagatgacgacaagaaggatatcaaatcaattactagcaataatgacgatgaggacctgacaccagagcagaaggcagagcgtgagaaggagcggaggatggccaacaatgcccgagagcgtctgcgggtccgtgacatcaacgaggctttcaaagagctcggccgcatggtgcagctccacctcaagagtgacaagccccagaccaagctcctgatcctccaccaggcggtggccgtcatcctcagtctggagcagcaagtccgagaaaggaatctgaatccgaaagctgcgtgtctgaaaagaagggaggaagagaaggtgtcctcggagcctccccctctctccttggccggcccacaccctggaatgggagacgcatcgaatcacatgggacagatgtaaaagggtccaagttgccacattgcttcattaaaacaagagaccacttccttaacagctgtattatcttaaacccacataaacacttctccttaacccccatttttgtaatataagacaagtctgagtagttatgaatcgcagacgcaagaggtttcagcattcccaattatcaaaaaacagaaaaacaaaaaaaagaaagaaaaaagtgcaacttgagggacgactttctttaacatatcattcagaatgtgcaaagcagtatgtacaggctgagacacagcccagagactgaacggcaatctttccacactgtggaacaatgcatttgtgcctaaacttcttttggaaaaaa

SEQ ID NO: 303564 - DNA, 2836 bp, Homo sapiens
cttctctttataagcccgcagttcccggatgtgaatggattacaatgtatctttcagggaaacctattattatcaatgtgactccacgggggagtccatggtgatgatgatgaggaggaggatgatgatgatgagacacctctaaacttggaacaagtttaagactttatgagagaagtttttttttataaacaataagaaaaagttgttggatttttttttaatgatttcttttttgggggagggaattttgttgcagttttatggtggaaaatgcaaaaaccagagccaggtgcataatcttgtaatctgtggatatccctggagcaggactgagtaccagttaaaatactttttggggatacacatgtgagatactaagtacttgcagaagatttttgtctctctttttaaagtctctttccttggaatattgtgagaatatttgtggccatttaaggtttgtgtgattttgctaaaatgcatcaccaacagcgaatggctgccttagggacggacaaagagctgagtgatttactggatttcagtgcgatgttttcacctcctgtgagcagtgggaaaaatggaccaacttctttggcaagtggacattttactggctcaaatgtagaagacagaagtagctcagggtcctgggggaatggaggacatccaagcccgtccaggaactatggagatgggactccctatgaccacatgaccagcagggaccttgggtcacatgacaatctctctccaccttttgtcaattccagaatacaaagtaaaacagaaaggggctcatactcatcttatgggagagaatcaaacttacagggttgccaccagcagagtctccttggaggtgacatggatatgggcaacccaggaaccctttcgcccaccaaacctggttcccagtactatcagtattctagcaataatccccgaaggaggcctcttcacagtagtgccatggaggtacagacaaagaaagttcgaaaagttcctccaggtttgccatcttcagtctatgctccatcagcaagcactgccgactacaatagggactcgccaggctatccttcctccaaaccagcaaccagcactttccctagctccttcttcatgcaagatggccatcacagcagtgacccttggagctcctccagtgggatgaatcagcctggctatgcaggaatgttgggcaactcttctcatattccacagtccagcagctactgtagcctgcatccacatgaacgtttgagctatccatcacactcctcagcagacatcaattccagtcttcctccgatgtccactttccatcgtagtggtacaaaccattacagcacctcttcctgtacgcctcctgccaacgggacagacagtataatggcaaatagaggaagcggggcagccggcagctcccagactggagatgctctggggaaagcacttgcttcgatctattctccagatcacactaacaacagcttttcatcaaacccttcaactcctgttggctctcctccatctctctcagcaggcacagctgtttggtctagaaatggaggacaggcctcatcgtctcctaattatgaaggacccttacactctttgcaaagccgaattgaagatcgtttagaaagactggatgatgctattcatgttctccggaaccatgcagtgggcccatccacagctatgcctggtggtcatggggacatgcatggaatcattggaccttctcataatggagccatgggtggtctgggctcagggtatggaaccggccttctttcagccaacagacattcactcatggtggggacccatcgtgaagatggcgtggccctgagaggcagccattctcttctgccaaaccaggttccggttccacagcttcctgtccagtctgcgacttcccctgacctgaacccaccccaggacccttacagaggcatgccaccaggactacaggggcagagtgtctcctctggcagctctgagatcaaatccgatgacgagggtgatgagaacctgcaagacacgaaatcttcggaggacaagaaattagatgacgacaagaaggatatcaaatcaattactagcaataatgacgatgaggacctgacaccagagcagaaggcagagcgtgagaaggagcggaggatggccaacaatgcccgagagcgtctgcgggtccgtgacatcaacgaggctttcaaagagctcggccgcatggtgcagctccacctcaagagtgacaagccccagaccaagctcctgatcctccaccaggcggtggccgtcatcctcagtctggagcagcaagtccgagaaaggaatctgaatccgaaagctgcgtgtctgaaaagaagggaggaagagaaggtgtcctcggagcctccccctctctccttggccggcccacaccctggaatgggagacgcatcgaatcacatgggacagatgtaaaagggtccaagttgccacattgcttcattaaaacaagagaccacttccttaacagctgtattatcttaaacccacataaacacttctccttaacccccatttttgtaatataagacaagtctgagtagttatgaatcgcagacgcaagaggtttcagcattcccaattatcaaaaaacagaaaaacaaaaaaaagaaagaaaaaagtgcaacttgagggacgactttctttaacatatcattcagaatgtgcaaagcagtatgtacaggctgagacacagcccagagactgaacggcaatctttccacactgtggaacaatgcatttgtgcctaaacttcttttggaaaaaa

SEQ ID NO: 303565 - DNA, 2802 bp, Homo sapiens
cttctctttataagcccgcagttcccggatgtgaatggattacaatgtatctttcagggaaacctattattatcaatgtgactccacgggggagtccatggtgatgatgatgaggaggaggatgatgatgatgagacacctctaaacttggaacaagtttaagactttatgagagaagaaaaaaaatcaccaacaagaattgtttgaggaaaaattataactatcctgtgttcatttttttttttataaacaataagaaaaagttgttggatttttttttaatgatttcttttttgggggagggaattttgttgcagttttatggtggaaaatgcaaaaaccagagccaggtgcataatcttgtaatctgtggatatccctggagcaggactgagtaccagttaaaatactttttggggatacacatgtgagatactaagtacttgcagaagatttttgtctctctttttaaagtctctttccttggaatattgtgagaatatttgtggccatttaagatgttttcacctcctgtgagcagtgggaaaaatggaccaacttctttggcaagtggacattttactggctcaaatgtagaagacagaagtagctcagggtcctgggggaatggaggacatccaagcccgtccaggaactatggagatgggactccctatgaccacatgaccagcagggaccttgggtcacatgacaatctctctccaccttttgtcaattccagaatacaaagtaaaacagaaaggggctcatactcatcttatgggagagaatcaaacttacagggttgccaccagcagagtctccttggaggtgacatggatatgggcaacccaggaaccctttcgcccaccaaacctggttcccagtactatcagtattctagcaataatccccgaaggaggcctcttcacagtagtgccatggaggtacagacaaagaaagttcgaaaagttcctccaggtttgccatcttcagtctatgctccatcagcaagcactgccgactacaatagggactcgccaggctatccttcctccaaaccagcaaccagcactttccctagctccttcttcatgcaagatggccatcacagcagtgacccttggagctcctccagtgggatgaatcagcctggctatgcaggaatgttgggcaactcttctcatattccacagtccagcagctactgtagcctgcatccacatgaacgtttgagctatccatcacactcctcagcagacatcaattccagtcttcctccgatgtccactttccatcgtagtggtacaaaccattacagcacctcttcctgtacgcctcctgccaacgggacagacagtataatggcaaatagaggaagcggggcagccggcagctcccagactggagatgctctggggaaagcacttgcttcgatctattctccagatcacactaacaacagcttttcatcaaacccttcaactcctgttggctctcctccatctctctcagcaggcacagctgtttggtctagaaatggaggacaggcctcatcgtctcctaattatgaaggacccttacactctttgcaaagccgaattgaagatcgtttagaaagactggatgatgctattcatgttctccggaaccatgcagtgggcccatccacagctatgcctggtggtcatggggacatgcatggaatcattggaccttctcataatggagccatgggtggtctgggctcagggtatggaaccggccttctttcagccaacagacattcactcatggtggggacccatcgtgaagatggcgtggccctgagaggcagccattctcttctgccaaaccaggttccggttccacagcttcctgtccagtctgcgacttcccctgacctgaacccaccccaggacccttacagaggcatgccaccaggactacaggggcagagtgtctcctctggcagctctgagatcaaatccgatgacgagggtgatgagaacctgcaagacacgaaatcttcggaggacaagaaattagatgacgacaagaaggatatcaaatcaattactagcaataatgacgatgaggacctgacaccagagcagaaggcagagcgtgagaaggagcggaggatggccaacaatgcccgagagcgtctgcgggtccgtgacatcaacgaggctttcaaagagctcggccgcatggtgcagctccacctcaagagtgacaagccccagaccaagctcctgatcctccaccaggcggtggccgtcatcctcagtctggagcagcaagtccgagaaaggaatctgaatccgaaagctgcgtgtctgaaaagaagggaggaagagaaggtgtcctcggagcctccccctctctccttggccggcccacaccctggaatgggagacgcatcgaatcacatgggacagatgtaaaagggtccaagttgccacattgcttcattaaaacaagagaccacttccttaacagctgtattatcttaaacccacataaacacttctccttaacccccatttttgtaatataagacaagtctgagtagttatgaatcgcagacgcaagaggtttcagcattcccaattatcaaaaaacagaaaaacaaaaaaaagaaagaaaaaagtgcaacttgagggacgactttctttaacatatcattcagaatgtgcaaagcagtatgtacaggctgagacacagcccagagactgaacggcaatctttccacactgtggaacaatgcatttgtgcctaaacttcttttggaaaaaa

SEQ ID NO: 303566 - DNA, 2377 bp, Homo sapiens
agcacaggagagtaacaaggaaggccccttaaaagaaaggccttttaaagtggaggtctcagttcacaaactttaaaagtttacgaagtagtattttagaattttaatcaccagatatattgggggaatttattacttcctattcatatggaagaggacagcagagatgtagaagacagaagtagctcagggtcctgggggaatggaggacatccaagcccgtccaggaactatggagatgggactccctatgaccacatgaccagcagggaccttgggtcacatgacaatctctctccaccttttgtcaattccagaatacaaagtaaaacagaaaggggctcatactcatcttatgggagagaatcaaacttacagggttgccaccagcagagtctccttggaggtgacatggatatgggcaacccaggaaccctttcgcccaccaaacctggttcccagtactatcagtattctagcaataatccccgaaggaggcctcttcacagtagtgccatggaggtacagacaaagaaagttcgaaaagttcctccaggtttgccatcttcagtctatgctccatcagcaagcactgccgactacaatagggactcgccaggctatccttcctccaaaccagcaaccagcactttccctagctccttcttcatgcaagatggccatcacagcagtgacccttggagctcctccagtgggatgaatcagcctggctatgcaggaatgttgggcaactcttctcatattccacagtccagcagctactgtagcctgcatccacatgaacgtttgagctatccatcacactcctcagcagacatcaattccagtcttcctccgatgtccactttccatcgtagtggtacaaaccattacagcacctcttcctgtacgcctcctgccaacgggacagacagtataatggcaaatagaggaagcggggcagccggcagctcccagactggagatgctctggggaaagcacttgcttcgatctattctccagatcacactaacaacagcttttcatcaaacccttcaactcctgttggctctcctccatctctctcagcaggcacagctgtttggtctagaaatggaggacaggcctcatcgtctcctaattatgaaggacccttacactctttgcaaagccgaattgaagatcgtttagaaagactggatgatgctattcatgttctccggaaccatgcagtgggcccatccacagctatgcctggtggtcatggggacatgcatggaatcattggaccttctcataatggagccatgggtggtctgggctcagggtatggaaccggccttctttcagccaacagacattcactcatggtggggacccatcgtgaagatggcgtggccctgagaggcagccattctcttctgccaaaccaggttccggttccacagcttcctgtccagtctgcgacttcccctgacctgaacccaccccaggacccttacagaggcatgccaccaggactacaggggcagagtgtctcctctggcagctctgagatcaaatccgatgacgagggtgatgagaacctgcaagacacgaaatcttcggaggacaagaaattagatgacgacaagaaggatatcaaatcaattactagcaataatgacgatgaggacctgacaccagagcagaaggcagagcgtgagaaggagcggaggatggccaacaatgcccgagagcgtctgcgggtccgtgacatcaacgaggctttcaaagagctcggccgcatggtgcagctccacctcaagagtgacaagccccagaccaagctcctgatcctccaccaggcggtggccgtcatcctcagtctggagcagcaagtccgagaaaggaatctgaatccgaaagctgcgtgtctgaaaagaagggaggaagagaaggtgtcctcggagcctccccctctctccttggccggcccacaccctggaatgggagacgcatcgaatcacatgggacagatgtaaaagggtccaagttgccacattgcttcattaaaacaagagaccacttccttaacagctgtattatcttaaacccacataaacacttctccttaacccccatttttgtaatataagacaagtctgagtagttatgaatcgcagacgcaagaggtttcagcattcccaattatcaaaaaacagaaaaacaaaaaaaagaaagaaaaaagtgcaacttgagggacgactttctttaacatatcattcagaatgtgcaaagcagtatgtacaggctgagacacagcccagagactgaacggcaatctttccacactgtggaacaatgcatttgtgcctaaacttcttttggaaaaaa

SEQ ID NO: 303567 - DNA, 1264 bp, Homo sapiens
cttctctttataagcccgcagttcccggatgtgaatggattacaatgtatctttcagggaaacctattattatcaatgtgactccacgggggagtccatggtgatgatgatgaggaggaggatgatgatgatgagacacctctaaacttggaacaagtttaagactttatgagagaagtttttttttataaacaataagaaaaagttgttggatttttttttaatgatttcttttttgggggagggaattttgttgcagttttatggtggaaaatgcaaaaaccagagccaggtgcataatcttgtaatctgtggatatccctggagcaggactgagtaccagttaaaatactttttggggatacacatgtgagatactaagtacttgcagaagatttttgtctctctttttaaagtctctttccttggaatattgtgagaatatttgtggccatttaaggtttgtgtgattttgctaaaatgcatcaccaacagcgaatggctgccttagggacggacaaagagctgagtgatttactggatttcagtgcgatgttttcacctcctgtgagcagtgggaaaaatggaccaacttctttggcaagtggacattttactggctcaaatgtagaagacagaagtagctcagggtcctgggggaatggaggacatccaagcccgtccaggaactatggagatgggactccctatgaccacatgaccagcagggaccttgggtcacatgacaatctctctccaccttttgtcaattccagaatacaaagtaaaacagaaaggggctcatactcatcttatgggagagaatcaaacttacagggttgccaccagcagagtctccttggaggtgacatggatatgggcaacccaggaaccctttcgcccaccaaacctggttcccagtactatcagtattctagcaataatccccgaaggaggcctcttcacagtagtgccatggaggtacagacaaagaaagttcgaaaagttcctccaggtttgccatcttcaataaacggaatgtgttggaaaggacaacaaataagaagttaaatatgtggaaatgacatggaaagcacctgtttcttccctttgttttcttctacgtcatcaggaaataatatttaaccatagaatatggtgtccctctaagaaaatgtttataattgaatgttcaaagtagaatatagattaaataagtaaagatgacttgccaaaaaaaattaaagaacatttgaaacaaaca

SEQ ID NO: 303568 - DNA, 2190 bp, Homo sapiens
gtaattagttcagtcagtaaaagttgattacaagtaacgataaagttagatttttagtacttaattttaaaatttctttattaaatagtaaatttgttcttaatataaatggtactatctactcttgttttattgcatatcagaataattaaaagaacaatgtgttcaatgcagagtataatcaagcgatttatatattatggcagagtctccttggaggtgacatggatatgggcaacccaggaaccctttcgcccaccaaacctggttcccagtactatcagtattctagcaataatccccgaaggaggcctcttcacagtagtgccatggaggtacagacaaagaaagttcgaaaagttcctccaggtttgccatcttcagtctatgctccatcagcaagcactgccgactacaatagggactcgccaggctatccttcctccaaaccagcaaccagcactttccctagctccttcttcatgcaagatggccatcacagcagtgacccttggagctcctccagtgggatgaatcagcctggctatgcaggaatgttgggcaactcttctcatattccacagtccagcagctactgtagcctgcatccacatgaacgtttgagctatccatcacactcctcagcagacatcaattccagtcttcctccgatgtccactttccatcgtagtggtacaaaccattacagcacctcttcctgtacgcctcctgccaacgggacagacagtataatggcaaatagaggaagcggggcagccggcagctcccagactggagatgctctggggaaagcacttgcttcgatctattctccagatcacactaacaacagcttttcatcaaacccttcaactcctgttggctctcctccatctctctcagcaggcacagctgtttggtctagaaatggaggacaggcctcatcgtctcctaattatgaaggacccttacactctttgcaaagccgaattgaagatcgtttagaaagactggatgatgctattcatgttctccggaaccatgcagtgggcccatccacagctatgcctggtggtcatggggacatgcatggaatcattggaccttctcataatggagccatgggtggtctgggctcagggtatggaaccggccttctttcagccaacagacattcactcatggtggggacccatcgtgaagatggcgtggccctgagaggcagccattctcttctgccaaaccaggttccggttccacagcttcctgtccagtctgcgacttcccctgacctgaacccaccccaggacccttacagaggcatgccaccaggactacaggggcagagtgtctcctctggcagctctgagatcaaatccgatgacgagggtgatgagaacctgcaagacacgaaatcttcggaggacaagaaattagatgacgacaagaaggatatcaaatcaattactagcaataatgacgatgaggacctgacaccagagcagaaggcagagcgtgagaaggagcggaggatggccaacaatgcccgagagcgtctgcgggtccgtgacatcaacgaggctttcaaagagctcggccgcatggtgcagctccacctcaagagtgacaagccccagaccaagctcctgatcctccaccaggcggtggccgtcatcctcagtctggagcagcaagtccgagaaaggaatctgaatccgaaagctgcgtgtctgaaaagaagggaggaagagaaggtgtcctcggagcctccccctctctccttggccggcccacaccctggaatgggagacgcatcgaatcacatgggacagatgtaaaagggtccaagttgccacattgcttcattaaaacaagagaccacttccttaacagctgtattatcttaaacccacataaacacttctccttaacccccatttttgtaatataagacaagtctgagtagttatgaatcgcagacgcaagaggtttcagcattcccaattatcaaaaaacagaaaaacaaaaaaaagaaagaaaaaagtgcaacttgagggacgactttctttaacatatcattcagaatgtgcaaagcagtatgtacaggctgagacacagcccagagactgaacggcaatctttccacactgtggaacaatgcatttgtgcctaaacttcttttggaaaaaa

SEQ ID NO: 303569 - DNA, 1879 bp, Homo sapiens
ggttatctgtgagaaaggggttgtttggaaaggccaaggggtcatgccaatttaaggaaatgccccccatcctccgctgccccatggctctgccctgccccccaccccttcctgaccacggaaacaagatctcctttctggttatatcttccttggggcagagggagtttcagacaagacttctggcaagactgggacccaccttatctggcttcactcaggagccctggctcaaatggaccaaaggactgccctccacggaggaagctactagggtcatcagagtgttggatgatggtcaggctatagcccacacatgcttgagcagcagcagcatctggtgcagctgacccctccctccttgaagcactttctctccctgcttccagcccttctctctgcacctctctggtcaggcctagtcactagcccagcatgtcaactttggcatgacccagggccatggcgttgacatctctatctgcacccacccataggtgctcttgtctagcttaatgactctaaaccccgtctctattctgataatcctcaaatttctgtctgtaacctagacctggccacgaaaccttgggctcctacctcattaccatttctacccaagggtttaaaagacatctcaaattccataggtcctaaatggagtttccaatctttccccctaggcgtgcctctccccagcttctttttttttttttttttggatggagtctagctctgtcacccaggctggagtgccatagtgtgatctcggctcactgcaagcttcgcctcccgggttcacgccattctcctgcctcagcctcccgagtggctgggactacaggtgcccgccaccacggtcggctaattttttttgtatttttagtagagacggggtttcactgtgttagccaggatggtcttggtctcctgacctcgtgatccacccgcctcggcctcccaaagtgctgggattgcaggcgtgagccaccgtgctgggccccccctccccaactttcttcggctctgtcctttgccgctcagaccaaaaaccttagagttgtctttgacttctgtctttcccttccacccacagttaaccaggagaattgcttgaactcagaaggcagaggttgcagtggaaaaaaaaaaaaaagataatttctctctctttctctctctctctgacacttgctttagaggctacattaaaaaaaaaaactagttgccatgctggggaggggtttgggttacacaggtgtatgcacttatgaaacttagtgaagtgtgtgaatttcattgtatgtaaagtttacctcaaaagaaaatattgaacgccagttaaagatacgcctgtaatctgacttctttgggaggccaaggcgggaggatcacttgaggccaggagtttgagactaccctgggcaacacagcaagacctgtctctacaaaaataaataagtaaataaatagccagatgtggtggcacacgatttgcagtcccattactaggggcggggaggggcgctgaggcaggaggtttacttgagcccaggagttcaaggctgtattgtagtgaactaagatcatgccactgcactccagcctgggctacagagctagaccctgtctttaaaaaaaagaaaagaaaaaaaaaagtatgtacactgaaatatttagggaacaataaaccaatgtcgacaatttattttgaaatgcatccagagatgagttggattgatggataaatagtgtaataggtagatgtgagataaagcaaatacagcaaagtgttcatggtaggatctaagtggcggatatgcgggtgtccactgtaaaatttttcaactttgctgtaatttagaaacttttcatggcc

SEQ ID NO: 303570 - DNA, 1934 bp, Homo sapiens
tgggctcatcttcttgggaaaggagaaataattgaaaaactaagcatttaaagttactctaagtacgcaaaataaatttaattgggaggagtaagatgaaagagatagtaagtgggaaatggagactgtggggaaaaaaaatctaattgatgatagggtgatggaattccagaggggctagaattcctcctctgggcataatgaccacctgaacagctgctgaagtctgcagagttctttaactcaagcactgtgcctctattgataacttggtagcatagtaaagtaaacattctctttctttaatcattaggctgttggttcctctggaggatgaacatgttggatgatggtcaggctatagcccacacatgcttgagcagcagcagcatctggtgcagctgacccctccctccttgaagcactttctctccctgcttccagcccttctctctgcacctctctggtcaggcctagtcactagcccagcatgtcaactttggcatgacccagggccatggcgttgacatctctatctgcacccacccataggtgctcttgtctagcttaatgactctaaaccccgtctctattctgataatcctcaaatttctgtctgtaacctagacctggccacgaaaccttgggctcctacctcattaccatttctacccaagggtttaaaagacatctcaaattccataggtcctaaatggagtttccaatctttccccctaggcgtgcctctccccagcttctttttttttttttttttggatggagtctagctctgtcacccaggctggagtgccatagtgtgatctcggctcactgcaagcttcgcctcccgggttcacgccattctcctgcctcagcctcccgagtggctgggactacaggtgcccgccaccacggtcggctaattttttttgtatttttagtagagacggggtttcactgtgttagccaggatggtcttggtctcctgacctcgtgatccacccgcctcggcctcccaaagtgctgggattgcaggcgtgagccaccgtgctgggccccccctccccaactttcttcggctctgtcctttgccgctcagaccaaaaaccttagagttgtctttgacttctgtctttcccttccacccacagttaaccaggagaattgcttgaactcagaaggcagaggttgcagtggaaaaaaaaaaaaaagataatttctctctctttctctctctctctgacacttgctttagaggctacattaaaaaaaaaaactagttgccatgctggggaggggtttgggttacacaggtgtatgcacttatgaaacttagtgaagtgtgtgaatttcattgtatgtaaagtttacctcaaaagaaaatattgaacgccagttaaagatacgcctgtaatctgacttctttgggaggccaaggcgggaggatcacttgaggccaggagtttgagactaccctgggcaacacagcaagacctgtctctacaaaaataaataagtaaataaatagccagatgtggtggcacacgatttgcagtcccattactaggggcggggaggggcgctgaggcaggaggtttacttgagcccaggagttcaaggctgtattgtagtgaactaagatcatgccactgcactccagcctgggctacagagctagaccctgtctttaaaaaaaagaaaagaaaaaaaaaagtatgtacactgaaatatttagggaacaataaaccaatgtcgacaatttattttgaaatgcatccagagatgagttggattgatggataaatagtgtaataggtagatgtgagataaagcaaatacagcaaagtgttcatggtaggatctaagtggcggatatgcgggtgtccactgtaaaatttttcaactttgctgtaatttagaaacttttcatggcc

SEQ ID NO: 303571 - DNA, 1167 bp, Homo sapiens
ggttatctgtgagaaaggggttgtttggaaaggccaaggggtcatgccaatttaaggaaatgccccccatcctccgctgccccatggctctgccctgccccccaccccttcctgaccacggaaacaagatctcctttctggttatatcttccttggggcagagggagtttcagacaagacttctggcaagactgggacccaccttatctggcttcactcaggagccctggctcaaatggaccaaaggactgccctccacggaggaagctactagggtcatcagagtgttggatgatggtcaggctatagcccacacatgcttgagcagcagcagcatctggtgcagctgacccctccctccttgaagcactttctctccctgcttccagcccttctctctgcacctctctggtcaggcctagtcactagcccagcatgtcaactttggcatgacccagggccatggcgttgacatctctatctgcacccacccataggtgctcttgtctagcttaatgactctaaaccccgtctctattctgataatcctcaaatttctgtctgtaacctagacctggccacgaaaccttgggctcctacctcattaccatttctacccaagggtttaaaagacatctcaaattccataggtcctaaatggagtttccaatctttccccctaggcgtgcctctccccagcttctttttttttttttttttggatggagtctagctctgtcacccaggctggagtgccatagtgtgatctcggctcactgcaagcttcgcctcccgggttcacgccattctcctgcctcagcctcccgagtggctgggactacaggtgcccgccaccacggtcggctaattttttttgtatttttagtagagacggggtttcactgtgttagccaggatggtcttggtctcctgacctcgtgatccacccgcctcggcctcccaaagtgctgggattgcaggcgtgagccaccgtgctgggccccccctccccaactttcttcggctctgtcctttgccgctcagaccaaaaaccttagagttgtctttgacttctgtctttcccttccacccacagttaaccaggaaatcctgccatctccgcctttattttattttattttttgagatggagtttcacccttgttg

SEQ ID NO: 303572 - DNA, 1397 bp, Homo sapiens
ggttatctgtgagaaaggggttgtttggaaaggccaaggggtcatgccaatttaaggaaatgccccccatcctccgctgccccatggctctgccctgccccccaccccttcctgaccacggaaacaagatctcctttctggttatatcttccttggggcagagggagtttcagacaagacttctggcaagactgggacccaccttatctggcttcactcaggagccctggctcaaatggaccaaaggactgccctccacggaggaagctactagggtcatcagagtgttggatgatggtcaggctatagcccacacatgcttgagcagcagcagcatctggtgcagctgacccctccctccttgaagcactttctctccctgcttccagcccttctctctgcacctctctggtcaggcctagtcactagcccagcatgtcaactttggcatgacccagggccatggcgttgacatctctatctgcacccacccataggtgctcttgtctagcttaatgactctaaaccccgtctctattctgataatcctcaaatttctgtctgtaacctagacctggccacgaaaccttgggctcctacctcattaccatttctacccaagggtttaaaagacatctcaaattccataggttgcagtggaaaaaaaaaaaaaagataatttctctctctttctctctctctctgacacttgctttagaggctacattaaaaaaaaaaactagttgccatgctggggaggggtttgggttacacaggtgtatgcacttatgaaacttagtgaagtgtgtgaatttcattgtatgtaaagtttacctcaaaagaaaatattgaacgccagttaaagatacgcctgtaatctgacttctttgggaggccaaggcgggaggatcacttgaggccaggagtttgagactaccctgggcaacacagcaagacctgtctctacaaaaataaataagtaaataaatagccagatgtggtggcacacgatttgcagtcccattactaggggcggggaggggcgctgaggcaggaggtttacttgagcccaggagttcaaggctgtattgtagtgaactaagatcatgccactgcactccagcctgggctacagagctagaccctgtctttaaaaaaaagaaaagaaaaaaaaaagtatgtacactgaaatatttagggaacaataaaccaatgtcgacaatttattttgaaatgcatccagagatgagttggattgatggataaatagtgtaataggtagatgtgagataaagcaaatacagcaaagtgttcatggtaggatctaagtggcggatatgcgggtgtccactgtaaaatttttcaactttgctgtaatttagaaacttttcatggcc

SEQ ID NO: 303573 - DNA, 1497 bp, Homo sapiens
ggttatctgtgagaaaggggttgtttggaaaggccaaggggtcatgccaatttaaggaaatgccccccatcctccgctgccccatggctctgccctgccccccaccccttcctgaccacggaaacaagatctcctttctggttatatcttccttggggcagagggagtttcagacaagacttctggcaagactgggacccaccttatctggcttcactcaggagccctggctcaaatggaccaaaggactgccctccacggaggaagctactagggtcatcagagtgttggatgatggtcaggctatagcccacacatgcttgagcagcagcagcatctggtgcagctgacccctccctccttgaagcactttctctccctgcttccagcccttctctctgcacctctctggtcaggcctagtcactagcccagcatgtcaactttggcatgacccagggccatggcgttgacatctctatctgcacccacccataggtgctcttgtctagcttaatgactctaaaccccgtctctattctgataatcctcaaatttctgtctgtaacctagacctggccacgaaaccttgggctcctacctcattaccatttctacccaagggtttaaaagacatctcaaattccataggtcctaaatggagtttccaatctttccccctaggcgtgcctgtaatcccagctactcaggaggctgaggcaagagaattgcttgaactcagaaggcagaggttgcagtggaaaaaaaaaaaaaagataatttctctctctttctctctctctctgacacttgctttagaggctacattaaaaaaaaaaactagttgccatgctggggaggggtttgggttacacaggtgtatgcacttatgaaacttagtgaagtgtgtgaatttcattgtatgtaaagtttacctcaaaagaaaatattgaacgccagttaaagatacgcctgtaatctgacttctttgggaggccaaggcgggaggatcacttgaggccaggagtttgagactaccctgggcaacacagcaagacctgtctctacaaaaataaataagtaaataaatagccagatgtggtggcacacgatttgcagtcccattactaggggcggggaggggcgctgaggcaggaggtttacttgagcccaggagttcaaggctgtattgtagtgaactaagatcatgccactgcactccagcctgggctacagagctagaccctgtctttaaaaaaaagaaaagaaaaaaaaaagtatgtacactgaaatatttagggaacaataaaccaatgtcgacaatttattttgaaatgcatccagagatgagttggattgatggataaatagtgtaataggtagatgtgagataaagcaaatacagcaaagtgttcatggtaggatctaagtggcggatatgcgggtgtccactgtaaaatttttcaactttgctgtaatttagaaacttttcatggcc

SEQ ID NO: 303574 - DNA, 3314 bp, Homo sapiens
attgctccaagatggcggcggcggcggcagcgggagcgcagctcagctgggctggaactgccctcctggaactcccccagcctacaacctaggaggtgcagggactgaggctcaggccaaatcgcaactcagacccagtgaacccaaggcctgaagagaatttggattcatttaccttgttttgtggggactggagagacaagtaaactctcagagtaactgtcccctctgactaccatttctaaggatgccccggaggcccagctagccccagacttcggccccatgcggctcacccgctgccaggctgccctggcggccgccatcaccctcaaccttctggtcctcttctatgtctcgtggctgcagcaccagcctaggaattcccgggcccgggggccccgtcgtgcctctgctgccggcccccgtgtcaccgtcctggtgcgggagttcgaggcatttgacaacgcggtgcccgagctggtagactccttcctgcagcaagacccagcccagcccgtggtggtggcagccgacacgctcccctacccgcccctggccctgccccgcatccccaacgtgcgtctggcgctgctccagcccgccctggaccggccagccgcagcctcgcgcccggagacctacgtggccaccgagtttgtggccctagtacctgatggggcgcgggctgaggcacctggcctgctggagcgcatggtggaggcgctccgcgcaggaagcgcacgtctggtggccgccccggttgccacggccaaccctgccaggtgcctggccctgaacgtcagcctgcgagagtggaccgcccgctatggcgcagcccccgccgcgccccgctgcgacgccctggacggagatgctgtggtgctcctgcgcgcccgcgacctcttcaacctctcggcgcccctggcccggccggtgggcaccagcctctttctgcagaccgcccttcgcggctgggcggtgcagctgctggacttgaccttcgccgcggcgcgccagcccccgctggccacggcccacgcgcgctggaaggctgagcgcgagggacgcgctcggcgggcggcgctgctccgcgcgctgggcatccgcctagtgagctgggaaggcgggcggctggagtggttcggctgcaacaaggagaccacgcgctgcttcggaaccgtggtgggcgacacgcccgcctacctctacgaggagcgctggacgcccccctgctgcctgcgcgcgctgcgcgagaccgcccgctatgtggtgggcgtgctggaggctgcgggcgtgcgctactggctcgagggcggctcactgctgggggccgcccgccacggggacatcatcccatgggactacgacgtggacctgggcatctacttggaggacgtgggcaactgcgagcagctgcggggggcagaggccggctcggtggtggatgagcgcggcttcgtatgggagaaggcggtcgagggcgactttttccgcgtgcagtacagcgaaagcaaccacttgcacgtggacctgtggcccttctacccccgcaatggcgtcatgaccaaggacacgtggctggaccaccggcaggatgtggagtttcccgagcacttcctgcagccgctggtgcccctgccctttgccggcttcgtggcgcaggcgcctaacaactaccgccgcttcctggagctcaagttcgggcccggggtcatcgagaacccccagtaccccaacccggcactgctgagtctgacgggaagcggctgaagccctgataacctcgcctttgtttttcgggggtctgtctggatgtggagaagctctgtgtgagcggtgaggggtggagggatgtcgcggagaggggaagggggaaactgaccaagaaagaaattctaaggagagcatgagagaaggctggcattggcaggaggagagcaccaggacgaggatgggaagcgacctccagatttatcaaatggtcatgcccactgggagccgtggatatgcgtggggacatcctgggtcatctcagtcatggagggagacggggatgtcacgccgtcccgcagggcccagcacagccccagacccgaaaaaagtgttctgcccaagattccgagagccctgcgctctagggcaggggcagagttttggaaacagtgcaggctctggagccagactggcgagattcaaatcctggctctatcgcttcggagccaggtgggcctgggggggcgtcgcagtctctctgtgcctcagttgcttccaggatgcgggacccttggctgcaggggttgcttccgccactagagggcgcgccggtcccgctcctggtggcccactgtggctgcccgggcgacagtacgcccagggcctgtgttccatagccatctactctcttgagcctttggacttctctccaagcccctgtgggaggcggacagcagtgaccacctccccttcttttggactgcgacctccttccctcctgggagagccctgtgacctgcatgctactcttaactgttctattcaagactgaatagaagtatttcagtcttgcagaggaggaaatgctcagagctccgaggtgcggctgtggtcgagaaccgggtgctgggccgggcgcgggggctcacgcctgtaatcccagcactttgggaggccgaggtgggaggatcgcttgagcccaggagtctgagaccagcctcggcaacatgccaagaccccgtctctatttttaaaaaagaaaaagaaccgacttctgaatcgcagctccactcatgactaatacctcattatttcagctgtctgcacctaattccccacttgcacggcagtgtagacaataaccatagctcacactcactgagcacctactgggtaccaggcaccattctcagtgtttcacctggatcaactaatgcgtccctcacctcagccctctgaagtgacagctgctattattttcattacacagatgaaaaagctgaggccagaatcgtgaagtcacttgctcaaggtcaggcagcttaggaaggggcagatcgggggcttgaacccaggtggtcaggctctggagcccacaattgtcttacccactatgcccctctctagtcatggtccccaagaggggcttggagacccacttagcaggtgaaagcaatggcagccttccttatttgattatgcacctaagaataaatggtatttgggcatgtattcccaatatgtgtatatttatttataaatatatacagatactattatctgtatgttagtaataaagcttaaattattccatttta

SEQ ID NO: 303575 - DNA, 3415 bp, Homo sapiens
attgctccaagatggcggcggcggcggcagcgggagcgcagctcagctgggctggaactgccctcctggaactcccccagcctacaacctaggaggtgcagggactgaggctcaggccaaatcgcaactcagacccagtgaacccaaggcctgaagagaatttggattcatttaccttgttttgtggggactggagagacaagtaaactctcagagtaactgtcccctctgactaccatttctaaggatgccccggaggcccagctagccccagacttcggccccatgcggctcacccgctgccaggctgccctggcggccgccatcaccctcaaccttctggtcctcttctatgtctcgtggctgcagcaccagcctaggaattcccgggcccgggggccccgtcgtgcctctgctgccggcccccgtgtcaccgtcctggtgcgggagttcgaggcatttgacaacgcggtgcccgagctggtagactccttcctgcagcaagacccagcccagcccgtggtggtggcagccgacacgctcccctacccgcccctggccctgccccgcatccccaacgtgcgtctggcgctgctccagcccgccctggaccggccagccgcagcctcgcgcccggagacctacgtggccaccgagtttgtggccctagtacctgatggggcgcgggctgaggcacctggcctgctggagcgcatggtggaggcgctccgcgcaggaagcgcacgtctggtggccgccccggttgccacggccaaccctgccaggtgcctggccctgaacgtcagcctgcgagagtggaccgcccgctatggcgcagcccccgccgcgccccgctgcgacgccctggacggagatgctgtggtgctcctgcgcgcccgcgacctcttcaacctctcggcgcccctggcccggccggtgggcaccagcctctttctgcagaccgcccttcgcggctgggcggtgcagctgctggacttgaccttcgccgcggcgcgccagcccccgctggccacggcccacgcgcgctggaaggctgagcgcgagggacgcgctcggcgggcggcgctgctccgcgcgctgggcatccgcctagtgagctgggaaggcgggcggctggagtggttcggctgcaacaaggagaccacgcgctgcttcggaaccgtggtgggcgacacgcccgcctacctctacgaggagcgctggacgcccccctgctgcctgcgcgcgctgcgcgagaccgcccgctatgtggtgggcgtgctggaggctgcgggcgtgcgctactggctcgagggcggctcactgctgggggccgcccgccacggggacatcatcccatgggactacgacgtggacctgggcatctacttggaggacgtgggcaactgcgagcagctgcggggggcagaggccggctcggtggtggatgagcgcggcttcgtatgggagaaggcggtcgagggcgactttttccgcgtgcagtacagcgaaagcaaccacttgcacgtggacctgtggcccttctacccccgcaatggcgtcatgaccaaggacacgtggctggaccaccggcaggatgtggagtttcccgagcacttcctgcagccgctggtgcccctgccctttgccggcttcgtggcgcaggcgcctaacaactaccgccgcttcctggagctcaagttcgggcccggggtcatcgagaacccccagtaccccaacccggcactgctgagtctgacgggaagcggctgaagccctgataacctcgcctttgtttttcgggggtctgtctggatgtggagaagctctgtgtgagcggtgaggggtggagggatgtcgcggagaggggaagggggaaactgaccaagaaagaaattctaaggagagcatgagagaaggctggcattggcaggaggagagcaccaggacgaggatgggaagcgacctccagatttatcaaatggtcatgcccactgggagccgtggatatgcgtggggacatcctgggtcatctcagtcatggagggagacggggatgtcacgccgtcccgcagggcccagcacagccccagacccgaaaaaagtgttctgcccaagattccgagagccctgcgctctagggcaggggcagagttttggaaacagtgcaggctctggagccagactggcgagattcaaatcctggctctatcgcttcggagccaggtgggcctgggggggcgtcgcagtctctctgtgcctcagttgcttccaggatgcgggacccttggctgcaggggttgcttccgccactagagggcgcgccggtcccgctcctggtggcccactgtggctgcccgggcgacagtacgcccagggcctgtgttccatagccatctactctcttgagcctttggacttctctccaagcccctgtgggaggcggacagcagtgaccacctccccttcttttggactgcgacctccttccctcctgggagagccctgtgacctgcatgctactcttaactgttctattcaagactgaatagaagtatttcagtcttgcagaggaggaaatgctcagagctccgaggtgcggctgtggtcgagaaccgggtgctgggccgggcgcgggggctcacgcctgtaatcccagcactttgggaggccgaggtgggaggatcgcttgagcccaggagtctgagaccagcctcggcaacatgccaagaccccgtctctatttttaaaaaagaaaaagaaccgacttctgaatcgcagctccactcatgactaatacctcattatttcagctgtctgcacctaattccccacttgcacggcagtgtagacaataaccatagctcacactcactgagcacctactgggtaccaggcaccattctcagtgtttcacctggatcaactaatgcgtccctcacctcagccctctgaagtgacagctgctattattttcattacacagatgaaaaagctgaggccagaatcgtgaagtcacttgctcaaggtcaggcagcttaggaaggggcagatcgggggcttgaacccaggtggtcaggctctggagcccacaattgtcttacccactatgcccctctctagtcatggtccccaagaggggcttggagacccacttagcaggtgaaagcaatggcagccttccttatttgattatgcacctaagaataaatggtatttgggcatgtattcccaatatgtgtatatttatttataaatatatacagatactattatctgtatgttagtaataaagcttaaattattccattttaaaattatgaatatgaatagggttttttttatgtttcttgcctcatcccaatgacttttgcacacccaggtgtgagcacccagcattcaagaccacgggtta

SEQ ID NO: 303576 - DNA, 3317 bp, Homo sapiens
attgctccaagatggcggcggcggcggcagcgggagcgcagctcagctgggctggaactgccctcctggaactcccccagcctacaacctaggaggtgcagggactgaggctcaggccaaatcgcaactcagacccagtgaacccaaggcctgaagagaatttggattcatttaccttgttttgtggggactggagagacaagtaaactctcagagtaactgtcccctctgactaccatttctaaggatgccccggaggcccagctagccccagacttcggccccatgcggctcacccgctgccaggctgccctggcggccgccatcaccctcaaccttctggtcctcttctatgtctcgtggctgcagcaccagcctaggaattcccgggcccgggggccccgtcgtgcctctgctgccggcccccgtgtcaccgtcctggtgcgggagttcgaggcatttgacaacgcggtgcccgagctggtagactccttcctgcagcaagacccagcccagcccgtggtggtggcagccgacacgctcccctacccgcccctggccctgccccgcatccccaacgtgcgtctggcgctgctccagcccgccctggaccggccagccgcagcctcgcgcccggagacctacgtggccaccgagtttgtggccctagtacctgatggggcgcgggctgaggcacctggcctgctggagcgcatggtggaggcgctccgcgcaggaagcgcacgtctggtggccgccccggttgccacggccaaccctgccaggtgcctggccctgaacgtcagcctgcgagagtggaccgcccgctatggcgcagcccccgccgcgccccgctgcgacgccctggacggagatgctgtggtgctcctgcgcgcccgcgacctcttcaacctctcggcgcccctggcccggccggtgggcaccagcctctttctgcagaccgcccttcgcggctgggcggtgcagctgctggacttgaccttcgccgcggcgcgccagcccccgctggccacggcccacgcgcgctggaaggctgagcgcgagggacgcgctcggcgggcggcgctgctccgcgcgctgggcatccgcctagtgagctgggaaggcgggcggctggagtggttcggctgcaacaaggagaccacgcgctgcttcggaaccgtggtgggcgacacgcccgcctacctctacgaggagcgctggacgcccccctgctgcctgcgcgcgctgcgcgagaccgcccgctatgtggtgggcgtgctggaggctgcgggcgtgcgctactggctcgagggcggctcactgctgggggccgcccgccacggggacatcatcccatgggactacgacgtggacctgggcatctacttggaggacgtgggcaactgcgagcagctgcggggggcagaggccggctcggtggtggatgagcgcggcttcgtatgggagaaggcggtcgagggcgactttttccgcgtgcagtacagcgaaagcaaccacttgcacgtggacctgtggcccttctacccccgcaatggcgtcatgaccaaggacacgtggctggaccaccggcaggatgtggagtttcccgagcacttcctgcagccgctggtgcccctgccctttgccggcttcgtggcgcaggcgcctaacaactaccgccgcttcctggagctcaagttcgggcccggggtcatcgagaacccccagtaccccaacccggcactgctgagtctgacgggaagcggctgaagccctgataacctcgcctttgtttttcgggggtctgtctggatgtggagaagctctgtgtgagcggtgaggggtggagggatgtcgcggagaggggaagggggaaactgaccaagaaagaaattctaaggagagcatgagagaaggctggcattggcaggaggagagcaccaggacgaggatgggaagcgacctccagatttatcaaatggtcatgcccactgggagccgtggatatgcgtggggacatcctgggtcatctcagtcatggagggagacggggatgtcacgccgtcccgcagggcccagcacagccccagacccgaaaaaagtgttctgcccaagattccgagagccctgcgctctagggcaggggcagagttttggaaacagtgcaggctctggagccagactggcgagattcaaatcctggctctatcgcttcggagccaggtgggcctgggggggcgtcgcagtctctctgtgcctcagttgcttccaggatgcgggacccttggctgcaggggttgcttccgccactagagggcgcgccggtcccgctcctggtggcccactgtggctgcccgggcgacagtacgcccagggcctgtgttccatagccatctactctcttgagcctttggacttctctccaagcccctgtgggaggcggacagcagtgaccacctccccttcttttggactgcgacctccttccctcctgggagagccctgtgacctgcatgctactcttaactgttctattcaagactgaatagaagtatttcagtcttgcagaggaggaaatgctcagagctccgaggtgcggctgtggtcgagaaccgggtgctgggccgggcgcgggggctcacgcctgtaatcccagcactttgggaggccgaggtgggaggatcgcttgagcccaggagtctgagaccagcctcggcaacatgccaagaccccgtctctatttttaaaaaagaaaaagaaccgacttctgaatcgcagctccactcatgactaatacctcattatttcagctgtctgcacctaattccccacttgcacggcagtgtagacaataaccatagctcacactcactgagcacctactgggtaccaggcaccattctcagtgtttcacctggatcaactaatgcgtccctcacctcagccctctgaagtgacagctgctattattttcattacacagatgaaaaagctgaggccagaatcgtgaagtcacttgctcaaggtcaggcagcttaggaaggggcagatcgggggcttgaacccaggtggtcaggctctggagcccacaattgtcttacccactatgcccctctctagtcatggtccccaagaggggcttggagacccacttagcaggtgaaagcaatggcagccttccttatttgattatgcaccacgagccggctctttgtgcggctcattgcgtggcgcttggaggaggaagaagacaagaaacgcaaagagccacgcaaagagccgcacgaagggccacgctacgagtccccaaagag

SEQ ID NO: 303577 - DNA, 3607 bp, Homo sapiens
gacacattcatgctagagggatggttataggttgctataataactgacatccctcccattcaccccaccccactcctgagacaccccaggtggtgcccgagattataggacttcaagagaaaggattccctgacctttctcttgccacttttgtggataagatgaaattgtgctctattgtacggaaatggctgatttgggattttctggttctcctcctctcaggagcgcagctcagctgggctggaactgccctcctggaactcccccagcctacaacctaggaggtgcagggactgaggctcaggccaaatcgcaactcagacccagtgaacccaaggcctgaagagaatttggattcatttaccttgttttgtggggactggagagacaagtaaactctcagagtaactgtcccctctgactaccatttctaaggatgccccggaggcccagctagccccagacttcggccccatgcggctcacccgctgccaggctgccctggcggccgccatcaccctcaaccttctggtcctcttctatgtctcgtggctgcagcaccagcctaggaattcccgggcccgggggccccgtcgtgcctctgctgccggcccccgtgtcaccgtcctggtgcgggagttcgaggcatttgacaacgcggtgcccgagctggtagactccttcctgcagcaagacccagcccagcccgtggtggtggcagccgacacgctcccctacccgcccctggccctgccccgcatccccaacgtgcgtctggcgctgctccagcccgccctggaccggccagccgcagcctcgcgcccggagacctacgtggccaccgagtttgtggccctagtacctgatggggcgcgggctgaggcacctggcctgctggagcgcatggtggaggcgctccgcgcaggaagcgcacgtctggtggccgccccggttgccacggccaaccctgccaggtgcctggccctgaacgtcagcctgcgagagtggaccgcccgctatggcgcagcccccgccgcgccccgctgcgacgccctggacggagatgctgtggtgctcctgcgcgcccgcgacctcttcaacctctcggcgcccctggcccggccggtgggcaccagcctctttctgcagaccgcccttcgcggctgggcggtgcagctgctggacttgaccttcgccgcggcgcgccagcccccgctggccacggcccacgcgcgctggaaggctgagcgcgagggacgcgctcggcgggcggcgctgctccgcgcgctgggcatccgcctagtgagctgggaaggcgggcggctggagtggttcggctgcaacaaggagaccacgcgctgcttcggaaccgtggtgggcgacacgcccgcctacctctacgaggagcgctggacgcccccctgctgcctgcgcgcgctgcgcgagaccgcccgctatgtggtgggcgtgctggaggctgcgggcgtgcgctactggctcgagggcggctcactgctgggggccgcccgccacggggacatcatcccatgggactacgacgtggacctgggcatctacttggaggacgtgggcaactgcgagcagctgcggggggcagaggccggctcggtggtggatgagcgcggcttcgtatgggagaaggcggtcgagggcgactttttccgcgtgcagtacagcgaaagcaaccacttgcacgtggacctgtggcccttctacccccgcaatggcgtcatgaccaaggacacgtggctggaccaccggcaggatgtggagtttcccgagcacttcctgcagccgctggtgcccctgccctttgccggcttcgtggcgcaggcgcctaacaactaccgccgcttcctggagctcaagttcgggcccggggtcatcgagaacccccagtaccccaacccggcactgctgagtctgacgggaagcggctgaagccctgataacctcgcctttgtttttcgggggtctgtctggatgtggagaagctctgtgtgagcggtgaggggtggagggatgtcgcggagaggggaagggggaaactgaccaagaaagaaattctaaggagagcatgagagaaggctggcattggcaggaggagagcaccaggacgaggatgggaagcgacctccagatttatcaaatggtcatgcccactgggagccgtggatatgcgtggggacatcctgggtcatctcagtcatggagggagacggggatgtcacgccgtcccgcagggcccagcacagccccagacccgaaaaaagtgttctgcccaagattccgagagccctgcgctctagggcaggggcagagttttggaaacagtgcaggctctggagccagactggcgagattcaaatcctggctctatcgcttcggagccaggtgggcctgggggggcgtcgcagtctctctgtgcctcagttgcttccaggatgcgggacccttggctgcaggggttgcttccgccactagagggcgcgccggtcccgctcctggtggcccactgtggctgcccgggcgacagtacgcccagggcctgtgttccatagccatctactctcttgagcctttggacttctctccaagcccctgtgggaggcggacagcagtgaccacctccccttcttttggactgcgacctccttccctcctgggagagccctgtgacctgcatgctactcttaactgttctattcaagactgaatagaagtatttcagtcttgcagaggaggaaatgctcagagctccgaggtgcggctgtggtcgagaaccgggtgctgggccgggcgcgggggctcacgcctgtaatcccagcactttgggaggccgaggtgggaggatcgcttgagcccaggagtctgagaccagcctcggcaacatgccaagaccccgtctctatttttaaaaaagaaaaagaaccgacttctgaatcgcagctccactcatgactaatacctcattatttcagctgtctgcacctaattccccacttgcacggcagtgtagacaataaccatagctcacactcactgagcacctactgggtaccaggcaccattctcagtgtttcacctggatcaactaatgcgtccctcacctcagccctctgaagtgacagctgctattattttcattacacagatgaaaaagctgaggccagaatcgtgaagtcacttgctcaaggtcaggcagcttaggaaggggcagatcgggggcttgaacccaggtggtcaggctctggagcccacaattgtcttacccactatgcccctctctagtcatggtccccaagaggggcttggagacccacttagcaggtgaaagcaatggcagccttccttatttgattatgcacctaagaataaatggtatttgggcatgtattcccaatatgtgtatatttatttataaatatatacagatactattatctgtatgttagtaataaagcttaaattattccattttaaaattatgaatatgaatagggttttttttatgtttcttgcctcatcccaatgacttttgcacacccaggtgtgagcacccagcattcaagaccacgggtta

SEQ ID NO: 303578 - DNA, 3429 bp, Homo sapiens
tgctatggttacagggcctggaccttcctccggaaggtgagaaacaggagcgcagctcagctgggctggaactgccctcctggaactcccccagcctacaacctaggaggtgcagggactgaggctcaggccaaatcgcaactcagacccagtgaacccaaggcctgaagagaatttggattcatttaccttgttttgtggggactggagagacaagtaaactctcagagtaactgtcccctctgactaccatttctaaggatgccccggaggcccagctagccccagacttcggccccatgcggctcacccgctgccaggctgccctggcggccgccatcaccctcaaccttctggtcctcttctatgtctcgtggctgcagcaccagcctaggaattcccgggcccgggggccccgtcgtgcctctgctgccggcccccgtgtcaccgtcctggtgcgggagttcgaggcatttgacaacgcggtgcccgagctggtagactccttcctgcagcaagacccagcccagcccgtggtggtggcagccgacacgctcccctacccgcccctggccctgccccgcatccccaacgtgcgtctggcgctgctccagcccgccctggaccggccagccgcagcctcgcgcccggagacctacgtggccaccgagtttgtggccctagtacctgatggggcgcgggctgaggcacctggcctgctggagcgcatggtggaggcgctccgcgcaggaagcgcacgtctggtggccgccccggttgccacggccaaccctgccaggtgcctggccctgaacgtcagcctgcgagagtggaccgcccgctatggcgcagcccccgccgcgccccgctgcgacgccctggacggagatgctgtggtgctcctgcgcgcccgcgacctcttcaacctctcggcgcccctggcccggccggtgggcaccagcctctttctgcagaccgcccttcgcggctgggcggtgcagctgctggacttgaccttcgccgcggcgcgccagcccccgctggccacggcccacgcgcgctggaaggctgagcgcgagggacgcgctcggcgggcggcgctgctccgcgcgctgggcatccgcctagtgagctgggaaggcgggcggctggagtggttcggctgcaacaaggagaccacgcgctgcttcggaaccgtggtgggcgacacgcccgcctacctctacgaggagcgctggacgcccccctgctgcctgcgcgcgctgcgcgagaccgcccgctatgtggtgggcgtgctggaggctgcgggcgtgcgctactggctcgagggcggctcactgctgggggccgcccgccacggggacatcatcccatgggactacgacgtggacctgggcatctacttggaggacgtgggcaactgcgagcagctgcggggggcagaggccggctcggtggtggatgagcgcggcttcgtatgggagaaggcggtcgagggcgactttttccgcgtgcagtacagcgaaagcaaccacttgcacgtggacctgtggcccttctacccccgcaatggcgtcatgaccaaggacacgtggctggaccaccggcaggatgtggagtttcccgagcacttcctgcagccgctggtgcccctgccctttgccggcttcgtggcgcaggcgcctaacaactaccgccgcttcctggagctcaagttcgggcccggggtcatcgagaacccccagtaccccaacccggcactgctgagtctgacgggaagcggctgaagccctgataacctcgcctttgtttttcgggggtctgtctggatgtggagaagctctgtgtgagcggtgaggggtggagggatgtcgcggagaggggaagggggaaactgaccaagaaagaaattctaaggagagcatgagagaaggctggcattggcaggaggagagcaccaggacgaggatgggaagcgacctccagatttatcaaatggtcatgcccactgggagccgtggatatgcgtggggacatcctgggtcatctcagtcatggagggagacggggatgtcacgccgtcccgcagggcccagcacagccccagacccgaaaaaagtgttctgcccaagattccgagagccctgcgctctagggcaggggcagagttttggaaacagtgcaggctctggagccagactggcgagattcaaatcctggctctatcgcttcggagccaggtgggcctgggggggcgtcgcagtctctctgtgcctcagttgcttccaggatgcgggacccttggctgcaggggttgcttccgccactagagggcgcgccggtcccgctcctggtggcccactgtggctgcccgggcgacagtacgcccagggcctgtgttccatagccatctactctcttgagcctttggacttctctccaagcccctgtgggaggcggacagcagtgaccacctccccttcttttggactgcgacctccttccctcctgggagagccctgtgacctgcatgctactcttaactgttctattcaagactgaatagaagtatttcagtcttgcagaggaggaaatgctcagagctccgaggtgcggctgtggtcgagaaccgggtgctgggccgggcgcgggggctcacgcctgtaatcccagcactttgggaggccgaggtgggaggatcgcttgagcccaggagtctgagaccagcctcggcaacatgccaagaccccgtctctatttttaaaaaagaaaaagaaccgacttctgaatcgcagctccactcatgactaatacctcattatttcagctgtctgcacctaattccccacttgcacggcagtgtagacaataaccatagctcacactcactgagcacctactgggtaccaggcaccattctcagtgtttcacctggatcaactaatgcgtccctcacctcagccctctgaagtgacagctgctattattttcattacacagatgaaaaagctgaggccagaatcgtgaagtcacttgctcaaggtcaggcagcttaggaaggggcagatcgggggcttgaacccaggtggtcaggctctggagcccacaattgtcttacccactatgcccctctctagtcatggtccccaagaggggcttggagacccacttagcaggtgaaagcaatggcagccttccttatttgattatgcacctaagaataaatggtatttgggcatgtattcccaatatgtgtatatttatttataaatatatacagatactattatctgtatgttagtaataaagcttaaattattccattttaaaattatgaatatgaatagggttttttttatgtttcttgcctcatcccaatgacttttgcacacccaggtgtgagcacccagcattcaagaccacgggtta

SEQ ID NO: 303579 - DNA, 2684 bp, Homo sapiens
attgctccaagatggcggcggcggcggcagcgggagcgcagctcagctgggctggaactgccctcctggaactcccccagcctacaacctaggaggtgcagggactgaggctcaggccaaatcgcaactcagacccagtgaacccaaggcctgaagagaatttggattcatttaccttgttttgtggggactggagagacaagtaaactctcagagtaactgtcccctctgactaccatttctaaggatgccccggaggcccagctagccccagacttcggccccatgcggctcacccgctgccaggctgccctggcggccgccatcaccctcaaccttctggtcctcttctatgtctcgtggctgcagcaccagcctaggaattcccgggcccgggggccccgtcgtgcctctgctgccggcccccgtgtcaccgtcctggtgcgggagttcgaggcatttgacaacgcggtgcccgagctggtagactccttcctgcagcaagacccagcccagcccgtggtggtggcagccgacacgctcccctacccgcccctggccctgccccgcatccccaacgtgcgtctggcgctgctccagcccgccctggaccggccagccgcagcctcgcgcccggagacctacgtggccaccgagtttgtggccctagtacctgatggggcgcgggctgaggcacctggcctgctggagcgcatggtggaggcgctccgcgcaggaagcgcacgtctggtggccgccccggttgccacggccaaccctgccaggtgcctggccctgaacgtcagcctgcgagagtggaccgcccgctatggcgcagcccccgccgcgccccgctgcgacgccctggacggagatgctgtggtgctcctgcgcgcccgcgacctcttcaacctctcggcgcccctggcccggccggtgggcaccagcctctttctgcagaccgcccttcgcggctgggcggtgcagctgctggacttgaccttcgccgcggcgcgccagcccccgctggccacggcccacgcgcgctggaaggctgagcgcgagggacgcgctcggcgggcggcgctgctccgcgcgctgggcatccgcctagtgagctgggaaggcgggcggctggagtggttcggctgcaacaaggagaccacgcgctgcttcggaaccgtggtgggcgacacgcccgcctacctctacgaggagcgctggacgcccccctgctgcctgcgcgcgctgcgcgagaccgcccgctatgtggtgggcgtgctggaggctgcgggcgtgcgctactggctcgagggcggctcactgctgggggccgcccgccacggggacatcatcccatgggactacgacgtggacctgggcatctacttggaggacgtgggcaactgcgagcagctgcggggggcagaggccggctcggtggtggatgagcgcggcttcgtatgggagaaggcggtcgagggcgactttttccgcgtgcagtacagcgaaagcaaccacttgcacgtggacctgtggcccttctacccccgcaatggcgtcatgaccaaggacacgtggctggaccaccggcaggatgtggagtttcccgagcacttcctgcagccgctggtgcccctgccctttgccggcttcgtggcgcaggcgcctaacaactaccgccgcttcctggagctcaagttcgggcccggggtcatcgagaacccccagtaccccaacccggcactgctgagtctgacgggaagcggctgaagccctgataacctcgcctttgtttttcgggggtctgtctggatgtggagaagctctgtgtgagcggtgaggggtggagggatgtcgcggagaggggaagggggaaactgaccaagaaagaaattctaaggagagcatgagagaaggctggcattggcaggaggagagcaccaggacgaggatgggaagcgacctccagatttatcaaatggtcatgcccactgggagccgtggatatgcgtggggacatcctgggtcatctcagtcatggagggagacggggatgtcacgccgtcccgcagggcccagcacagccccagacccgaaaaaagtgttctgcccaagattccgagagccctgcgctctagggcaggggcagagttttggaaacagtgcaggctctggagccagactggcgagattcaaatcctggctctatcgcttcggagccaggtgggcctgggggggcgtcgcagtctctctgtgcctcagttgcttccaggatgcgggacccttggctgcaggggttgcttccgccactagagggcgcgccggtcccgctcctggtggcccactgtggctgcccgggcgacagtacgcccagggcctgtgttccatagccatctactctcttgagcctttggaacccacttagcaggtgaaagcaatggcagccttccttatttgattatgcacctaagaataaatggtatttgggcatgtattcccaatatgtgtatatttatttataaatatatacagatactattatctgtatgttagtaataaagcttaaattattccattttaaaattatgaatatgaatagggttttttttatgtttcttgcctcatcccaatgacttttgcacacccaggtgtgagcacccagcattcaagaccacgggtta

SEQ ID NO: 303580 - DNA, 293 bp, Homo sapiens
gccaaatcgcaactcagacccagtgaacccaaggcctgaagagaatttggattcatttaccttgttttgtggggactggagagacaagtaaactctcagagtaactgtcccctctgactaccatttctaaggcaagccccctgtttctactcttgcgccccctgctggtttcctgccctgtctgtaagttgcatggcttttgtccgtcttttttttgtttgtttgtttgttttgagacagggtctcacccaggctagagtgaagtggagcaatctcggctcactgcaacctcc

SEQ ID NO: 303581 - DNA, 377 bp, Homo sapiens
cagttgctggtacagtgctgcacctggctgagtgaatggtttcttttggagctgataaagctgccttatgaaatcagctgacagggatgaattgtaaaagcaacatcagcttgaccagtataaaattacagtggattgctcatctcagtcctcaaagctttttgaaaaccaacaccatcacagcttgttttggactttgttacactgttattttcagcatgaaaatgtgtgtttttttagggtttctgattcttcaaagaggcacagagccaaattggtagaggaaggatgcaaagtataaatttgtgtaatattactttaacatgcccatattttacttggaaatattaaaagaaagggttctgtaaaatggaaaa

SEQ ID NO: 303582 - DNA, 1744 bp, Homo sapiens
caaaaagtcgtcgagctttgctatcatgcggcacaccttactgaactgtccaaccacatgtttcatggcggcagcggcggcgacggcagtaacagcggcagctacagcggggacgcgagcggggcggtgacggtgtgggaggtggtctcactcttgggaaaactgctgggcaccgtcgtcgcgctgaaggtggttctgtacctgctccgagtgtgcttagcgatggcctggaaatccggcggcgccagccactcggagctaatccacaatctccgcaaaaatggaatcatcaagacagataaagtatttgaagtgatgctggctacagaccgctcccactatgcaaaatgtaacccatacatggattctccacaatcaataggtttccaagcaacaatcagtgctccacacatgcatgcatatgcgctagaacttctatttgatcagttgcatgaaggagctaaagctcttgatgtaggatctggaagtggaatccttactgcatgttttgcacgtatggttggatgtactggaaaagtcataggaattgatcacattaaagagctagtagatgactcagtaaataatgtcaggaaggacgatccaacacttctgtcttcagggagagtacagcttgttgtgggggatggaagaatgggatatgctgaagaagccccttatgatgccattcatgtgggagctgcagcccctgttgtaccccaggcgctaatagatcagttaaagcccggaggaagattgatattgcctgttggtcctgcaggcggaaaccaaatgttggagcagtatgacaagctacaagatggcagcatcaaaatgaagcctctgatggggggtgatatacgtgcctttaacagataaagaaaagcagtggtccaggtggaagtgattttatcttctgctctttcttcttccacacatgcaagggatgaattgtaaaagcaacatcagcttgaccagtataaaattacagtggattgctcatctcagtcctcaaagctttttgaaaaccaacaccatcacagcttgttttggactttgttacactgttattttcagcatgaaaatgtgtgtttttttagggtttctgattcttcaaagaggcacagagccaaattggtagaggaaggatgcaaagtataaatttgtgtaatattactttaacatgcccatattttacttggaaatattaaaagaaagggttctgtaaaatggaaaacttagtttgtgaattgattttgaggagtggtttttcttttcttggacgcttaattctgttctgatattaatttatcagattgcttttgtgcattggataacaccaccattcacaagttaagattcttggtatttggatatctgttagatgctactaagaaaatagagatgagctttctttttaaagcttttgatgtggtgtcatagaatagcatgttgtagatacaatcagctgctttgttaccttaaaactaggcatttgtaaatattaaaccttaagatggcaggtgatgtcctgtaaacactcagctgttcagattggacataactgacttagttcttcccttctctctctctcaaaattataggagacttgtagtttagtgtggttttctgtttctaatttgctgctgataatgtatatgaacttaacatgctgtgtaagctgtgtcctagttcttgaacagtttatgcagtgctgctttgccaaataaagttaaaagtaaaa

SEQ ID NO: 303583 - DNA, 1681 bp, Homo sapiens
ggcgtcacagagcgcatgcgtcgccgcgggggatgccgggagcgcgcagtggcggcagcggcggcgacggcagtaacagcggcagctacagcggggacgcgagcggggcggtgacggtgtgggaggtggtctcactcttgggaaaactgctgggcaccgtcgtcgcgctgaaggtggttctgtacctgctccgagtgtgcttagcgatggcctggaaatccggcggcgccagccactcggagctaatccacaatctccgcaaaaatggaatcatcaagacagataaagtatttgaagtgatgctggctacagaccgctcccactatgcaaaatgtaacccatacatggattctccacaatcaataggtttccaagcaacaatcagtgctccacacatgcatgcatatgcgctagaacttctatttgatcagttgcatgaaggagctaaagctcttgatgtaggatctggaagtggaatccttactgcatgttttgcacgtatggttggatgtactggaaaagtcataggaattgatcacattaaagagctagtagatgactcagtaaataatgtcaggaaggacgatccaacacttctgtcttcagggagagtacagcttgttgtgggggatggaagaatgggatatgctgaagaagccccttatgatgccattcatgtgggagctgcagcccctgttgtaccccaggcgctaatagatcagttaaagcccggaggaagattgatattgcctgttggtcctgcaggcggaaaccaaatgttggagcagtatgacaagctacaagatggcagcatcaaaatgaagcctctgatggggggtgatatacgtgcctttaacagataaagaaaagcagtggtccagggatgaattgtaaaagcaacatcagcttgaccagtataaaattacagtggattgctcatctcagtcctcaaagctttttgaaaaccaacaccatcacagcttgttttggactttgttacactgttattttcagcatgaaaatgtgtgtttttttagggtttctgattcttcaaagaggcacagagccaaattggtagaggaaggatgcaaagtataaatttgtgtaatattactttaacatgcccatattttacttggaaatattaaaagaaagggttctgtaaaatggaaaacttagtttgtgaattgattttgaggagtggtttttcttttcttggacgcttaattctgttctgatattaatttatcagattgcttttgtgcattggataacaccaccattcacaagttaagattcttggtatttggatatctgttagatgctactaagaaaatagagatgagctttctttttaaagcttttgatgtggtgtcatagaatagcatgttgtagatacaatcagctgctttgttaccttaaaactaggcatttgtaaatattaaaccttaagatggcaggtgatgtcctgtaaacactcagctgttcagattggacataactgacttagttcttcccttctctctctctcaaaattataggagacttgtagtttagtgtggttttctgtttctaatttgctgctgataatgtatatgaacttaacatgctgtgtaagctgtgtcctagttcttgaacagtttatgcagtgctgctttgccaaataaagttaaaagtaaaa

SEQ ID NO: 303584 - DNA, 1221 bp, Homo sapiens
ggcgtcacagagcgcatgcgtcgccgcgggggatgccgggagcgcgcagtggcggcagcggcggcgacggcagtaacagcggcagctacagcggggacgcgagcggggcggtgacggtgtgggaggtggtctcactcttgggaaaactgctgggcaccgtcgtcgcgctgaaggtggttctgtacctgctccgagtgtgcttagcgatggcctggaaatccggcggcgccagccactcggagctaatccacaatctccgcaaaaatggaatcatcaagacagataaagtatttgaagtgatgctggctacagaccgctcccactatgcaaaatgtaacccatacatggattctccacaatcaataggtttccaagcaacaatcagtgctccacacatgcatgcatatgcgctagaacttctatttgatcagttgcatgaaggagctaaagctcttgatgtaggatctggaagtggaatccttactgcatgttttgcacgtatggttggatgtactggaaaagtcataggaattgatcacattaaagagctagtagatgactcagtaaataatgtcaggaaggacgatccaacacttctgtcttcagggagagtacagcttgttgtgggggatggaagaatgggatatgctgaagaagccccttatgatgccattcatgtgggagctgcagcccctgttgtaccccaggcgctaatagatcagttaaagcccggaggaagattgatattgcctgttggtcctgcaggcggaaaccaaatgttggagcagtatgacaagctacaagatggcagcatcaaaatgaagcctctgatggggggtgatatacgtgcctttaacagataaagaaaagcagtggtccaggtggaagtgattttatcttctgctctttcttcttccacacatgcaagggatgaattgtaaaagcaacatcagcttgaccagtataaaattacagtggattgctcatctcagtcctcaaagctttttgaaaaccaacaccatcacagcttgttttggactttgttacactgttattttcagcatgaaaatgtgtgtttttttagggtttctgattcttcaaagaggcacagagccaaattggtagaggaaggatgcaaagtataaatttgtgtaatattactttaacatgcccatattttacttggaaatattaaaagaaagggttctgtaaaatggaaaa

SEQ ID NO: 303585 - DNA, 1174 bp, Homo sapiens
ggcgtcacagagcgcatgcgtcgccgcgggggatgccgggagcgcgcagtggcggcagcggcggcgacggcagtaacagcggcagctacagcggggacgcgagcggggcggtgacggtgtgggaggtggtctcactcttgggaaaactgctgggcaccgtcgtcgcgctgaaggtggttctgtacctgctccgagtgtgcttagcgatggcctggaaatccggcggcgccagccactcggagctaatccacaatctccgcaaaaatggaatcatcaagacagataaagtatttgaagtgatgctggctacagaccgctcccactatgcaaaatgtaacccatacatggattctccacaatcaataggtttccaagcaacaatcagtgctccacacatgcatgcatatgcgctagaacttctatttgatcagttgcatgaaggagctaaagctcttgatgtaggatctggaagtggaatccttactgcatgttttgcacgtatggttggatgtactggaaaagtcataggaattgatcacattaaagagctagtagatgactcagtaaataatgtcaggaaggacgatccaacacttctgtcttcagggagagtacagcttgttgtgggggatggaagaatgggatatgctgaagaagccccttatgatgccattcatgtgggagctgcagcccctgttgtaccccaggcgctaatagatcagttaaagcccggaggaagattgatattgcctgttggtcctgcaggcggaaaccaaatgttggagcagtatgacaagctacaagatggcagcatcaaaatgaagcctctgatggggggtgatatacgtgcctttaacagataaagaaaagcagtggtccagggatgaattgtaaaagcaacatcagcttgaccagtataaaattacagtggattgctcatctcagtcctcaaagctttttgaaaaccaacaccatcacagcttgttttggactttgttacactgttattttcagcatgaaaatgtgtgtttttttagggtttctgattcttcaaagaggcacagagccaaattggtagaggaaggatgcaaagtataaatttgtgtaatattactttaacatgcccatattttacttggaaatattaaaagaaagggttctgtaaaatggaaaa

SEQ ID NO: 303586 - DNA, 1931 bp, Homo sapiens
ggcgtcacagagcgcatgcgtcgccgcgggggatgccgggagcgcgcagtggcggcagcggcggcgacggcagtaacagcggcagctacagcggggacgcgagcggggcggtgacggtgtgggaggtggtctcactcttgggaaaactgctgggcaccgtcgtcgcgctgaaggtggttctgtacctgctccgagtgtgcttagcgatggcctggaaatccggcggcgccagccactcggagctaatccacaatctccgcaaaaatggaatcatcaagacagataaagtatttgaagtgatgctggctacagaccgctcccactatgcaaaatgtaacccatacatggattctccacaatcaatagcaggttttgctgaactgctgagccttggcagtgggcgcctttgaggcttagaagtgcctcaggattctgtcagtcggctgccatgctatcttcttttgacgcactataacagtcagcagagaagatcctggggagcttctgaaccccgaaggcacctgctaccaccgctcagtgaaacttgcttcagaggcagaaagaagcaggtttccaagcaacaatcagtgctccacacatgcatgcatatgcgctagaacttctatttgatcagttgcatgaaggagctaaagctcttgatgtaggatctggaagtggaatccttactgcatgttttgcacgtatggttggatgtactggaaaagtcataggaattgatcacattaaagagctagtagatgactcagtaaataatgtcaggaaggacgatccaacacttctgtcttcagggagagtacagcttgttgtgggggatggaagaatgggatatgctgaagaagccccttatgatgccattcatgtgggagctgcagcccctgttgtaccccaggcgctaatagatcagttaaagcccggaggaagattgatattgcctgttggtcctgcaggcggaaaccaaatgttggagcagtatgacaagctacaagatggcagcatcaaaatgaagcctctgatggggggtgatatacgtgcctttaacagataaagaaaagcagtggtccaggtggaagtgattttatcttctgctctttcttcttccacacatgcaagggatgaattgtaaaagcaacatcagcttgaccagtataaaattacagtggattgctcatctcagtcctcaaagctttttgaaaaccaacaccatcacagcttgttttggactttgttacactgttattttcagcatgaaaatgtgtgtttttttagggtttctgattcttcaaagaggcacagagccaaattggtagaggaaggatgcaaagtataaatttgtgtaatattactttaacatgcccatattttacttggaaatattaaaagaaagggttctgtaaaatggaaaacttagtttgtgaattgattttgaggagtggtttttcttttcttggacgcttaattctgttctgatattaatttatcagattgcttttgtgcattggataacaccaccattcacaagttaagattcttggtatttggatatctgttagatgctactaagaaaatagagatgagctttctttttaaagcttttgatgtggtgtcatagaatagcatgttgtagatacaatcagctgctttgttaccttaaaactaggcatttgtaaatattaaaccttaagatggcaggtgatgtcctgtaaacactcagctgttcagattggacataactgacttagttcttcccttctctctctctcaaaattataggagacttgtagtttagtgtggttttctgtttctaatttgctgctgataatgtatatgaacttaacatgctgtgtaagctgtgtcctagttcttgaacagtttatgcagtgctgctttgccaaataaagttaaaagtaaaa

SEQ ID NO: 303587 - DNA, 1639 bp, Homo sapiens
caaaaagtcgtcgagctttgctatcatgcggcacaccttactgaactgtccaaccacatgtttcatggcggcagcggcggcgacggcagtaacagcggcagctacagcggggacgcgagcggggcggtgacggtgtgggaggtggtctcactcttgggaaaactgctgggcaccgtcgtcgcgctgaaggtggttctgtacctgctccgagtgtgcttagcgatggcctggaaatccggcggcgccagccactcggagctaatccacaatctccgcaaaaatggaatcatcaagacagataaagtatttgaagtgatgctggctacagaccgctcccactatgcaaaatgtaacccatacatggattctccacaatcaataggtttccaagcaacaatcagtgctccacacatggttggatgtactggaaaagtcataggaattgatcacattaaagagctagtagatgactcagtaaataatgtcaggaaggacgatccaacacttctgtcttcagggagagtacagcttgttgtgggggatggaagaatgggatatgctgaagaagccccttatgatgccattcatgtgggagctgcagcccctgttgtaccccaggcgctaatagatcagttaaagcccggaggaagattgatattgcctgttggtcctgcaggcggaaaccaaatgttggagcagtatgacaagctacaagatggcagcatcaaaatgaagcctctgatggggggtgatatacgtgcctttaacagataaagaaaagcagtggtccaggtggaagtgattttatcttctgctctttcttcttccacacatgcaagggatgaattgtaaaagcaacatcagcttgaccagtataaaattacagtggattgctcatctcagtcctcaaagctttttgaaaaccaacaccatcacagcttgttttggactttgttacactgttattttcagcatgaaaatgtgtgtttttttagggtttctgattcttcaaagaggcacagagccaaattggtagaggaaggatgcaaagtataaatttgtgtaatattactttaacatgcccatattttacttggaaatattaaaagaaagggttctgtaaaatggaaaacttagtttgtgaattgattttgaggagtggtttttcttttcttggacgcttaattctgttctgatattaatttatcagattgcttttgtgcattggataacaccaccattcacaagttaagattcttggtatttggatatctgttagatgctactaagaaaatagagatgagctttctttttaaagcttttgatgtggtgtcatagaatagcatgttgtagatacaatcagctgctttgttaccttaaaactaggcatttgtaaatattaaaccttaagatggcaggtgatgtcctgtaaacactcagctgttcagattggacataactgacttagttcttcccttctctctctctcaaaattataggagacttgtagtttagtgtggttttctgtttctaatttgctgctgataatgtatatgaacttaacatgctgtgtaagctgtgtcctagttcttgaacagtttatgcagtgctgctttgccaaataaagttaaaagtaaaa

SEQ ID NO: 303588 - DNA, 1607 bp, Homo sapiens
caaaaagtcgtcgagctttgctatcatgcggcacaccttactgaactgtccaaccacatgtttcatggcggcagcggcggcgacggcagtaacagcggcagctacagcggggacgcgagcggggcggtgacggtgtgggaggtggtctcactcttgggaaaactgctgggcaccgtcgtcgcgctgaaggtggttctgtacctgctccgagtgtgcttagcgatggcctggaaatccggcggcgccagccactcggagctaatccacaatctccgcacatgcatatgcgctagaacttctatttgatcagttgcatgaaggagctaaagctcttgatgtaggatctggaagtggaatccttactgcatgttttgcacgtatggttggatgtactggaaaagtcataggaattgatcacattaaagagctagtagatgactcagtaaataatgtcaggaaggacgatccaacacttctgtcttcagggagagtacagcttgttgtgggggatggaagaatgggatatgctgaagaagccccttatgatgccattcatgtgggagctgcagcccctgttgtaccccaggcgctaatagatcagttaaagcccggaggaagattgatattgcctgttggtcctgcaggcggaaaccaaatgttggagcagtatgacaagctacaagatggcagcatcaaaatgaagcctctgatggggggtgatatacgtgcctttaacagataaagaaaagcagtggtccaggtggaagtgattttatcttctgctctttcttcttccacacatgcaagggatgaattgtaaaagcaacatcagcttgaccagtataaaattacagtggattgctcatctcagtcctcaaagctttttgaaaaccaacaccatcacagcttgttttggactttgttacactgttattttcagcatgaaaatgtgtgtttttttagggtttctgattcttcaaagaggcacagagccaaattggtagaggaaggatgcaaagtataaatttgtgtaatattactttaacatgcccatattttacttggaaatattaaaagaaagggttctgtaaaatggaaaacttagtttgtgaattgattttgaggagtggtttttcttttcttggacgcttaattctgttctgatattaatttatcagattgcttttgtgcattggataacaccaccattcacaagttaagattcttggtatttggatatctgttagatgctactaagaaaatagagatgagctttctttttaaagcttttgatgtggtgtcatagaatagcatgttgtagatacaatcagctgctttgttaccttaaaactaggcatttgtaaatattaaaccttaagatggcaggtgatgtcctgtaaacactcagctgttcagattggacataactgacttagttcttcccttctctctctctcaaaattataggagacttgtagtttagtgtggttttctgtttctaatttgctgctgataatgtatatgaacttaacatgctgtgtaagctgtgtcctagttcttgaacagtttatgcagtgctgctttgccaaataaagttaaaagtaaaa

SEQ ID NO: 303589 - DNA, 1674 bp, Homo sapiens
ggcgtcacagagcgcatgcgtcgccgcgggggatgccgggagcgcgcagtggcggcagcggcggcgacggcagtaacagcggcagctacagcggggacgcgagcggggcggtgacggtgtgggaggtggtctcactcttgggaaaactgctgggcaccgtcgtcgcgctgaaggtggttctgtacctgctccgagtgtgcttagcgatggcctggaaatccggcggcgccagccactcggagctaatccacaatctccgcaaaaatggaatcatcaagacagataaagtatttgaagtgatgctggctacagaccgctcccactatgcaaaatgtaacccatacatggattctccacaatcaataggtttccaagcaacaatcagtgctccacacatgcatgcatatgcgctagaacttctatttgatcagttgcatgaaggagctaaagctcttgatgtaggatctggaagtggaatccttactgcatgttttgcacgtatggactcagtaaataatgtcaggaaggacgatccaacacttctgtcttcagggagagtacagcttgttgtgggggatggaagaatgggatatgctgaagaagccccttatgatgccattcatgtgggagctgcagcccctgttgtaccccaggcgctaatagatcagttaaagcccggaggaagattgatattgcctgttggtcctgcaggcggaaaccaaatgttggagcagtatgacaagctacaagatggcagcatcaaaatgaagcctctgatggggggtgatatacgtgcctttaacagataaagaaaagcagtggtccaggtggaagtgattttatcttctgctctttcttcttccacacatgcaagggatgaattgtaaaagcaacatcagcttgaccagtataaaattacagtggattgctcatctcagtcctcaaagctttttgaaaaccaacaccatcacagcttgttttggactttgttacactgttattttcagcatgaaaatgtgtgtttttttagggtttctgattcttcaaagaggcacagagccaaattggtagaggaaggatgcaaagtataaatttgtgtaatattactttaacatgcccatattttacttggaaatattaaaagaaagggttctgtaaaatggaaaacttagtttgtgaattgattttgaggagtggtttttcttttcttggacgcttaattctgttctgatattaatttatcagattgcttttgtgcattggataacaccaccattcacaagttaagattcttggtatttggatatctgttagatgctactaagaaaatagagatgagctttctttttaaagcttttgatgtggtgtcatagaatagcatgttgtagatacaatcagctgctttgttaccttaaaactaggcatttgtaaatattaaaccttaagatggcaggtgatgtcctgtaaacactcagctgttcagattggacataactgacttagttcttcccttctctctctctcaaaattataggagacttgtagtttagtgtggttttctgtttctaatttgctgctgataatgtatatgaacttaacatgctgtgtaagctgtgtcctagttcttgaacagtttatgcagtgctgctttgccaaataaagttaaaagtaaaa

SEQ ID NO: 303590 - DNA, 1713 bp, Homo sapiens
ggcgtcacagagcgcatgcgtcgccgcgggggatgccgggagcgcgcagtggcggcagcggcggcgacggcagtaacagcggcagctacagcggggacgcgagcggggcggtgacggtgtgggaggtggtctcactcttgggaaaactgctgggcaccgtcgtcgcgctgaaggtggttctgtacctgctccgagtgtgcttagcgatggcctggaaatccggcggcgccagccactcggagctaatccacaatctccgcaaaaatggaatcatcaagacagataaagtatttgaagtgatgctggctacagaccgctcccactatgcaaaatgtaacccatacatggattctccacaatcaataggtttccaagcaacaatcagtgctccacacatgcatgcatatgcgctagaacttctatttgatcagttgcatgaaggagctaaagctcttgatgtaggatctggaagtggaatccttactgcatgttttgcacgtatggttggatgtactggaaaagtcataggaattgatcacattaaagagctagtagatgtcaggaaggacgatccaacacttctgtcttcagggagagtacagcttgttgtgggggatggaagaatgggatatgctgaagaagccccttatgatgccattcatgtgggagctgcagcccctgttgtaccccaggcgctaatagatcagttaaagcccggaggaagattgatattgcctgttggtcctgcaggcggaaaccaaatgttggagcagtatgacaagctacaagatggcagcatcaaaatgaagcctctgatggggggtgatatacgtgcctttaacagataaagaaaagcagtggtccaggtggaagtgattttatcttctgctctttcttcttccacacatgcaagggatgaattgtaaaagcaacatcagcttgaccagtataaaattacagtggattgctcatctcagtcctcaaagctttttgaaaaccaacaccatcacagcttgttttggactttgttacactgttattttcagcatgaaaatgtgtgtttttttagggtttctgattcttcaaagaggcacagagccaaattggtagaggaaggatgcaaagtataaatttgtgtaatattactttaacatgcccatattttacttggaaatattaaaagaaagggttctgtaaaatggaaaacttagtttgtgaattgattttgaggagtggtttttcttttcttggacgcttaattctgttctgatattaatttatcagattgcttttgtgcattggataacaccaccattcacaagttaagattcttggtatttggatatctgttagatgctactaagaaaatagagatgagctttctttttaaagcttttgatgtggtgtcatagaatagcatgttgtagatacaatcagctgctttgttaccttaaaactaggcatttgtaaatattaaaccttaagatggcaggtgatgtcctgtaaacactcagctgttcagattggacataactgacttagttcttcccttctctctctctcaaaattataggagacttgtagtttagtgtggttttctgtttctaatttgctgctgataatgtatatgaacttaacatgctgtgtaagctgtgtcctagttcttgaacagtttatgcagtgctgctttgccaaataaagttaaaagtaaaa

SEQ ID NO: 303591 - DNA, 1592 bp, Homo sapiens
caaaaagtcgtcgagctttgctatcatgcggcacaccttactgaactgtccaaccacatgtttcatggcggcagcggcggcgacggcagtaacagcggcagctacagcggggacgcgagcggggcggtgacggtgtgggaggtggtctcactcttgggaaaactgctgggcaccgtcgtcgcgctgaaggtggttctgtacctgctccgagtgtgcttagcgatggcctggaaatccggcggcgccagccactcggagctaatccacaatctccgcaaaaatggaatcatcaagacagataaagtatttgaagtgatgctggctacagaccgctcccactatgcaaaatgtaacccatacatggattctccacaatcaataggtttccaagcaacaatcagtgctccacacatggttggatgtactggaaaagtcataggaattgatcacattaaagagctagtagatgactcagtaaataatgtcaggaaggacgatccaacacttctgtcttcagggagagtacagcttgttgtgggggatggaagaatgggatatgctgaagaagccccttatgatgccattcatgtgggagctgcagcccctgttgtaccccaggcgctaatagatcagttaaagcccggaggaagattgatattgcctgttggtcctgcaggcggaaaccaaatgttggagcagtatgacaagctacaagatggcagcatcaaaatgaagcctctgatggggggtgatatacgtgcctttaacagataaagaaaagcagtggtccagggatgaattgtaaaagcaacatcagcttgaccagtataaaattacagtggattgctcatctcagtcctcaaagctttttgaaaaccaacaccatcacagcttgttttggactttgttacactgttattttcagcatgaaaatgtgtgtttttttagggtttctgattcttcaaagaggcacagagccaaattggtagaggaaggatgcaaagtataaatttgtgtaatattactttaacatgcccatattttacttggaaatattaaaagaaagggttctgtaaaatggaaaacttagtttgtgaattgattttgaggagtggtttttcttttcttggacgcttaattctgttctgatattaatttatcagattgcttttgtgcattggataacaccaccattcacaagttaagattcttggtatttggatatctgttagatgctactaagaaaatagagatgagctttctttttaaagcttttgatgtggtgtcatagaatagcatgttgtagatacaatcagctgctttgttaccttaaaactaggcatttgtaaatattaaaccttaagatggcaggtgatgtcctgtaaacactcagctgttcagattggacataactgacttagttcttcccttctctctctctcaaaattataggagacttgtagtttagtgtggttttctgtttctaatttgctgctgataatgtatatgaacttaacatgctgtgtaagctgtgtcctagttcttgaacagtttatgcagtgctgctttgccaaataaagttaaaagtaaaa

SEQ ID NO: 303592 - DNA, 1340 bp, Homo sapiens
catgaaggagctaaagctcttgatgcaactgatcaaatagaagttctagcgcatatgcatgcatatgcgctagaacttctatttgatcagttgcatgaaggagctaaagctcttgatgtaggatctggaagtggaatccttactgcatgttttgcacgtatggttggatgtactggaaaagtcataggaattgatcacattaaagagctagtagatgactcagtaaataatgtcaggaaggacgatccaacacttctgtcttcagggagagtacagcttgttgtgggggatggaagaatgggatatgctgaagaagccccttatgatgccattcatgtgggagctgcagcccctgttgtaccccaggcgctaatagatcagttaaagcccggaggaagattgatattgcctgttggtcctgcaggcggaaaccaaatgttggagcagtatgacaagctacaagatggcagcatcaaaatgaagcctctgatggggggtgatatacgtgcctttaacagataaagaaaagcagtggtccagggatgaattgtaaaagcaacatcagcttgaccagtataaaattacagtggattgctcatctcagtcctcaaagctttttgaaaaccaacaccatcacagcttgttttggactttgttacactgttattttcagcatgaaaatgtgtgtttttttagggtttctgattcttcaaagaggcacagagccaaattggtagaggaaggatgcaaagtataaatttgtgtaatattactttaacatgcccatattttacttggaaatattaaaagaaagggttctgtaaaatggaaaacttagtttgtgaattgattttgaggagtggtttttcttttcttggacgcttaattctgttctgatattaatttatcagattgcttttgtgcattggataacaccaccattcacaagttaagattcttggtatttggatatctgttagatgctactaagaaaatagagatgagctttctttttaaagcttttgatgtggtgtcatagaatagcatgttgtagatacaatcagctgctttgttaccttaaaactaggcatttgtaaatattaaaccttaagatggcaggtgatgtcctgtaaacactcagctgttcagattggacataactgacttagttcttcccttctctctctctcaaaattataggagacttgtagtttagtgtggttttctgtttctaatttgctgctgataatgtatatgaacttaacatgctgtgtaagctgtgtcctagttcttgaacagtttatgcagtgctgctttgccaaataaagttaaaagtaaaa

SEQ ID NO: 303593 - DNA, 786 bp, Homo sapiens
catatgttgaaccagccttgcatcccagggatgaagcagatttgatcatggtggataagctttttgaaaaccaacaccatcacagcttgttttggactttgttacactgttattttcagcatgaaaatgtgtgtttttttagggtttctgattcttcaaagaggcacagagccaaattggtagaggaaggatgcaaagtataaatttgtgtaatattactttaacatgcccatattttacttggaaatattaaaagaaagggttctgtaaaatggaaaacttagtttgtgaattgattttgaggagtggtttttcttttcttggacgcttaattctgttctgatattaatttatcagattgcttttgtgcattggataacaccaccattcacaagttaagattcttggtatttggatatctgttagatgctactaagaaaatagagatgagctttctttttaaagcttttgatgtggtgtcatagaatagcatgttgtagatacaatcagctgctttgttaccttaaaactaggcatttgtaaatattaaaccttaagatggcaggtgatgtcctgtaaacactcagctgttcagattggacataactgacttagttcttcccttctctctctctcaaaattataggagacttgtagtttagtgtggttttctgtttctaatttgctgctgataatgtatatgaacttaacatgctgtgtaagctgtgtcctagttcttgaacagtttatgcagtgctgctttgccaaataaagttaaaagtaaaa

SEQ ID NO: 303594 - DNA, 758 bp, Homo sapiens
ggcgtcacagagcgcatgcgtcgccgcgggggatgccgggagcgcgcagtggcggcagcggcggcgacggcagtaacagcggcagctacagcggggacgcgagcggggcggtgacggtgtgggaggtggtctcactcttgggaaaactgctgggcaccgtcgtcgcgctgaaggtggttctgtacctgctccgagtgtgcttagcgatggcctggaaatccggcggcgccagccactcggagctaatccacaatctccgcaaaaatggaatcatcaagacagataaagtatttgaagtgatgctggctacagaccgctcccactatgcaaaatgtaacccatacatggattctccacaatcaataggtttccaagcaacaatcagtgctccacacatgcatgcatatgcgctagaacttctatttgatcagttgcatgaaggagctaaagctcttgatgtaggatctggaagtggaatccttactgcatgttttgcacgtatggttggatgtactggaaaagtcataggaattgatcacattaaagagctagtagatgactcagtaaataatgtcaggaaggacgatccaacacttctgtcttcagggagagtacagcttgttggggggatgcaagacgggatatgctgaccccttatgatgccttcaggtgggaactgaagcccggttgtcccagggccaataactgttaagccgggtgaattgccgtggctgaggggacccagttggccgttacgt

SEQ ID NO: 303595 - DNA, 388 bp, Homo sapiens
cgcatttttattgacttaatagttgtgtctaaactattataaagccaaattgggtagtgtgtaactcctactaatgtatttctctcttttttcctcacaggatgaattgtaaaagcaacatcagcttgaccagtataaaattacagtggattgctcatctcagtcctcaaagctttttgaaaaccaacaccatcacagcttgttttggactttgttacactgttattttcagcatgaaaatgtgtgtttttttagggtttctgattcttcaaagaggcacagagccaaattggtagaggaaggatgcaaagtataaatttgtgtaatattactttaacatgcccatattttacttggaaatattaaaagaaagggttctgtaaaatgg

SEQ ID NO: 303596 - DNA, 1728 bp, Homo sapiens
ggcgtcacagagcgcatgcgtcgccgcgggggatgccgggagcgcgcagtggcggcagcggcggcgacggcagtaacagcggcagctacagcggggacgcgagcggggcggtgacggtgtgggaggtggtctcactcttgggaaaactgctgggcaccgtcgtcgcgctgaaggtggttctgtacctgctccgagtgtgcttagcgatggcctggaaatccggcggcgccagccactcggagctaatccacaatctccgcaaaaatggaatcatcaagacagataaagtatttgaagtgatgctggctacagaccgctcccactatgcaaaatgtaacccatacatggattctccacaatcaataggtttccaagcaacaatcagtgctccacacatgcatgcatatgcgctagaacttctatttgatcagttgcatgaaggagctaaagctcttgatgtaggatctggaagtggaatccttactgcatgttttgcacgtatggttggatgtactggaaaagtcataggaattgatcacattaaagagctagtagatgactcagtaaataatgtcaggaaggacgatccaacacttctgtcttcagggagagtacagcttgttgtgggggatggaagaatgggatatgctgaagaagccccttatgatgccattcatgtgggagctgcagcccctgttgtaccccaggcgctaatagatcagttaaagcccggaggaagattgatattgcctgttggtcctgcaggcggaaaccaaatgttggagcagtatgacaagctacaagatggcagcatcaaaatgaagcctctgatggggggtgatatacgtgcctttaacagataaagaaaagcagtggtccaggtggaagtgattttatcttctgctctttcttcttccacacatgcaagggatgaattgtaaaagcaacatcagcttgaccagtataaaattacagtggattgctcatctcagtcctcaaagctttttgaaaaccaacaccatcacagcttgttttggactttgttacactgttattttcagcatgaaaatgtgtgtttttttagggtttctgattcttcaaagaggcacagagccaaattggtagaggaaggatgcaaagtataaatttgtgtaatattactttaacatgcccatattttacttggaaatattaaaagaaagggttctgtaaaatggaaaacttagtttgtgaattgattttgaggagtggtttttcttttcttggacgcttaattctgttctgatattaatttatcagattgcttttgtgcattggataacaccaccattcacaagttaagattcttggtatttggatatctgttagatgctactaagaaaatagagatgagctttctttttaaagcttttgatgtggtgtcatagaatagcatgttgtagatacaatcagctgctttgttaccttaaaactaggcatttgtaaatattaaaccttaagatggcaggtgatgtcctgtaaacactcagctgttcagattggacataactgacttagttcttcccttctctctctctcaaaattataggagacttgtagtttagtgtggttttctgtttctaatttgctgctgataatgtatatgaacttaacatgctgtgtaagctgtgtcctagttcttgaacagtttatgcagtgctgctttgccaaataaagttaaaagtaaaa

SEQ ID NO: 303597 - DNA, 1845 bp, Homo sapiens
ggcgtcacagagcgcatgcgtcgccgcgggggatgccgggagcgcgcagtggcggcagcggcggcgacggcagtaacagcggcagctacagcggggacgcgagcggggcggtgacggtgtgggaggtggtctcactcttgggaaaactgctgggcaccgtcgtcgcgctgaaggtggttctgtacctgctccgagtgtgcttagcgatggcctggaaatccggcggcgccagccactcggagctaatccacaatctccgcaaaaatggaatcatcaagacagataaagtatttgaagtgatgctggctacagaccgctcccactatgcaaaatgtaacccatacatggattctccacaatcaataggtttccaagcaacaatcagtgctccacacatgcatgcatatgcgctagaacttctatttgatcagttgcatgaaggagctaaagctcttgatgtaggatctggaagtggaatccttactgcatgttttgcacgtatggttggatgtactggaaaagtcataggaattgatcacattaaagagctagtagatgactcagtaaataatgtcaggaaggacgatccaacacttctgtcttcagggagagtacagcttgttgtgggggatggaagaatgggatatgctgaagaagccccttatgatgccattcatgtgggagctgcagcccctgttgtaccccaggcgctaatagatcagttaaagcccggaggaagattgatattgcctgttggtcctgcaggcggaaaccaaatgttggagcagtatgacaagctacaagatggcagcatcaaaatgaagcctctgatggggggtgatatacgtgcctttaacagataaagaaaagcagtggtccaggtggaagtgattttatcttctgctctttcttcttccacacatgcaagggatgaattgtaaaagcaacatcagcttgaccagtataaaattacagtggattgctcatctcagtcctcaaagctttttgaaaaccaacaccatcacagcttgttttggactttgttacactgttattttcagcatgaaaatgtgtgtttttttagggtttctgattcttcaaagaggcacagagccaaattggtagaggaaggatgcaaagtataaatttgtgtaatattactttaacatgcccatattttacttggaaatattaaaagaaagggttctgtaaaatggaaaacttagtttgtgaattgattttgaggagtggtttttcttttcttggacgcttaattctgttctgatattaatttatcagattgcttttgtgcattggataacaccaccattcacaagttaagattcttggtatttggatatctgttagatgctactaagaaaatagagatgagctttctttttaaagcttttgatgtggtgtcatagaatagcatgttgtagatacaatcagctgctttgttaccttaaaactaggcatttgtaaatattaaaccttaagatggcaggtgatgtcctgtaaacactcagctgttcagattggacataactgacttagttcttcccttctctctctctcaaaattataggagacttgtagtttagtgtggttttctgtttctaatttgctgctgataatgtatatgaacttaacatgctgtgtaagctgtgtcctagttcttgaacagtttatgcagtgctgctttgccaaataaagttaaaagtaaaaaacataaaattttgttaaataaaatttttttgttgtattataggaacaaaatcttaagggggggcccggaccccaatttgcccttatgggaatcggtttccaattcatttgccgtgc

SEQ ID NO: 303598 - DNA, 1366 bp, Homo sapiens
ggcgtcacagagcgcatgcgtcgccgcgggggatgccgggagcgcgcagtggcggcagcggcggcgacggcagtaacagcggcagctacagcggggacgcgagcggggcggtgacggtgtgggaggtggtctcactcttgggaaaactgctgggcaccgtcgtcgcgctgaaggtggttctgtacctgctccgagtgtgcttagcgatggcctggaaatccggcggcgccagccactcggagctaatccacaatctccgcaaaaatggaatcatcaagacagataaagtatttgaagtgatgctggctacagaccgctcccactatgcaaaatgtaacccatacatggattctccacaatcaataggtttccaagcaacaatcagtgctccacacatgcatgcatatgcgctagaacttctatttgatcagttgcatgaaggagctaaagctcttgatgtaggatctggaagtggaatccttactgcatgttttgcacgtatggttggatgtactggaaaagtcataggaattgatcacattaaagagctagtagatgactcagtaaataatgtcaggaaggacgatccaacacttctgtcttcagggagagtacagcttgttgtgggggatggaagaatgggatatgctgaagaagccccttatgatgccattcatgtgggagctgcagcccctgttgtaccccaggcgctaatagatcagttaaagcccggaggaagattgatattgcctgttggtcctgcaggcggaaaccaaatgttggagcagtatgacaagctacaagatggcagcatcaaaatgaagcctctgatggggggtgatatacgtgcctttaacagataaagaaaagcagtggtccaggtggaagtgattttatcttctgctctttcttcttccacacatgcaaggtgaaagggtgtggattttaagacattagactacaagagctgtttttggttgtcacctttatgctcctccattataacgtcagaaattcattacattaaaaatgtgaaaaatgttgcatggtctgcccttattttggtttaacatatatatctttgggaaagggagggtgagacttggttggcacaaaggctttttttgtttgtttgtttgttttttttttaagaaaaagaacacagaattacatacacaaaattaggtacagggttttgggcggagctctgcaagtgagtggtccttagctcctgcgagagaagatatccagaagttcccacataccctgtagaagaatacggaaagtatcacaagtattgccttggcttgtcaaatatatggcggaattaactctgtataatactatagcctttgcctgatgtaca

SEQ ID NO: 303599 - DNA, 1639 bp, Homo sapiens
caaaaagtcgtcgagctttgctatcatgcggcacaccttactgaactgtccaaccacatgtttcatggcggcagcggcggcgacggcagtaacagcggcagctacagcggggacgcgagcggggcggtgacggtgtgggaggtggtctcactcttgggaaaactgctgggcaccgtcgtcgcgctgaaggtggttctgtacctgctccgagtgtgcttagcgatggcctggaaatccggcggcgccagccactcggagctaatccacaatctccgcagtttccaagcaacaatcagtgctccacacatgcatgcatatgcgctagaacttctatttgatcagttgcatgaaggagctaaagctcttgatgtaggatctggaagtggaatccttactgcatgttttgcacgtatggttggatgtactggaaaagtcataggaattgatcacattaaagagctagtagatgactcagtaaataatgtcaggaaggacgatccaacacttctgtcttcagggagagtacagcttgttgtgggggatggaagaatgggatatgctgaagaagccccttatgatgccattcatgtgggagctgcagcccctgttgtaccccaggcgctaatagatcagttaaagcccggaggaagattgatattgcctgttggtcctgcaggcggaaaccaaatgttggagcagtatgacaagctacaagatggcagcatcaaaatgaagcctctgatggggggtgatatacgtgcctttaacagataaagaaaagcagtggtccaggtggaagtgattttatcttctgctctttcttcttccacacatgcaagggatgaattgtaaaagcaacatcagcttgaccagtataaaattacagtggattgctcatctcagtcctcaaagctttttgaaaaccaacaccatcacagcttgttttggactttgttacactgttattttcagcatgaaaatgtgtgtttttttagggtttctgattcttcaaagaggcacagagccaaattggtagaggaaggatgcaaagtataaatttgtgtaatattactttaacatgcccatattttacttggaaatattaaaagaaagggttctgtaaaatggaaaacttagtttgtgaattgattttgaggagtggtttttcttttcttggacgcttaattctgttctgatattaatttatcagattgcttttgtgcattggataacaccaccattcacaagttaagattcttggtatttggatatctgttagatgctactaagaaaatagagatgagctttctttttaaagcttttgatgtggtgtcatagaatagcatgttgtagatacaatcagctgctttgttaccttaaaactaggcatttgtaaatattaaaccttaagatggcaggtgatgtcctgtaaacactcagctgttcagattggacataactgacttagttcttcccttctctctctctcaaaattataggagacttgtagtttagtgtggttttctgtttctaatttgctgctgataatgtatatgaacttaacatgctgtgtaagctgtgtcctagttcttgaacagtttatgcagtgctgctttgccaaataaagttaaaagtaaaa

SEQ ID NO: 303600 - DNA, 1233 bp, Homo sapiens
gattgcattttatggtgaccacttgaaccctggtatagcagtgtcgcgattgattgcacagcgcgtcagatatgtcggtcaggaaggacgatccaacacttctgtcttcagggagagtacagcttgttgtgggggatggaagaatgggatatgctgaagaagccccttatgatgccattcatgtgggagctgcagcccctgttgtaccccaggcgctaatagatcagttaaagcccggaggaagattgatattgcctgttggtcctgcaggcggaaaccaaatgttggagcagtatgacaagctacaagatggcagcatcaaaatgaagcctctgatggggggtgatatacgtgcctttaacagataaagaaaagcagtggtccaggtggaagtgattttatcttctgctctttcttcttccacacatgcaagggatgaattgtaaaagcaacatcagcttgaccagtataaaattacagtggattgctcatctcagtcctcaaagctttttgaaaaccaacaccatcacagcttgttttggactttgttacactgttattttcagcatgaaaatgtgtgtttttttagggtttctgattcttcaaagaggcacagagccaaattggtagaggaaggatgcaaagtataaatttgtgtaatattactttaacatgcccatattttacttggaaatattaaaagaaagggttctgtaaaatggaaaacttagtttgtgaattgattttgaggagtggtttttcttttcttggacgcttaattctgttctgatattaatttatcagattgcttttgtgcattggataacaccaccattcacaagttaagattcttggtatttggatatctgttagatgctactaagaaaatagagatgagctttctttttaaagcttttgatgtggtgtcatagaatagcatgttgtagatacaatcagctgctttgttaccttaaaactaggcatttgtaaatattaaaccttaagatggcaggtgatgtcctgtaaacactcagctgttcagattggacataactgacttagttcttcccttctctctctctcaaaattataggagacttgtagtttagtgtggttttctgtttctaatttgctgctgataatgtatatgaacttaacatgctgtgtaagctgtgtcctagttcttgaacagtttatgcagtgctgctttgccaaataaagttaaaagtaaaa

SEQ ID NO: 303601 - DNA, 1723 bp, Homo sapiens
ggcgtcacagagcgcatgcgtcgccgcgggggatgccgggagcgcgcagtggcggcagcggcggcgacggcagtaacagcggcagctacagcggggacgcgagcggggcggtgacggtgtgggaggtggtctcactcttgggaaaactgctgggcaccgtcgtcgcgctgaaggtggttctgtacctgctccgagtgtgcttagcgatggcctggaaatccggcggcgccagccactcggagctaatccacaatctccgcaaaaatggaatcatcaagacagataaagtatttgaagtgatgctggctacagaccgctcccactatgcaaaatgtaacccatacatggattctccacaatcaataggtttccaagcaacaatcagtgctccacacatgcatgcatatgcgctagaacttctatttgatcagttgcatgaaggagctaaagctcttgatgtaggatctggaagtggaatccttactgcatgttttgcacgtatggttggatgtactggaaaagtcataggaattgatcacattaaagagctagtagatgactcagtaaataatgtcaggaaggacgatccaacacttctgtcttcagggagagtacagcttgttgtgggggatggaagaatgggatatgctgaagaagccccttatgatgccattcatgtgggagctgcagcccctgttgtaccccaggcgctaatagatcagttaaagcccggaggaagattgatattgcctgttggtcctgcaggcggaaaccaaatgttggagcagtatgacaagctacaagatggccagccatccacacacatgcacagcctcatgcatgcggggttgcatcatcacgtgcactttcacaccagcatcacaagcacacacagccagatggtcccagggcatgcacatgtgtcaacaagcaaacatcacagcattgaacccagttattcaacattaccagctggcatctgcctccactcctcaggatccctcaaagacttattctgcaaaaaaccaaacgacccattcaacaggccattgcatattaggacactttgcttcacaactgcgttatttctccagccatgcaaaccatgctgtcgctacacaaaacagggagatattcatcgacattcgtttcaacacgcagggcccccagacagcccaacgttgcgtcaaccggcaacgggaatgccacacgataatccatctgaggtcgttcactagtccacttcttaaacaattacccccacgtaataacgcacccttggcgaaaaacaacacagacgcaacaaaagcggcgggcacacggaccagacctccaacaagaggcaacgacccatacgaaaggagagacacccaacaggccgtcaacgcgcagagaacccgagagaacaaccgcagacacacaaaaaagggggcccccgcaacaagagagccagaacgaaataacacaaacgccaaccagacaccaggcgcccgacagacctcctcaccaacgaccccaagccagcgccgaccaaccatgcgacaccaccgagggcgcacccaacggcacccgagcaacgcaccaccccacacgagcgacggcgaccaacaactggcccaaacccaaccaccacgacaccagctcagcacgcacccaggatccacaacgcccacagccgaccacacaggacaacacagacagcaagaccgcgccaagacgaccc

SEQ ID NO: 303602 - DNA, 854 bp, Homo sapiens
gtaggcaaataataaaaggcagagacgcagctgcttacatgtcacttgaagctctcacccaaaaacctgtcgccaactattgtttgaaatctcatcatcgcagaggccctccgtttaggcctaacactttctgtcaaaatgaaaatgtctttgagaactgacataaattcaactttcaatagtcattgatgtgtgaaatggatcattcaattcctttcaatatgacaggcttcatcctgggagcaagttttgatggagaagagtaagagagattaataagaatcattattctttacagcccttgacgacagggattgacgaggcccagatagtaaatattttaggctttcggagcctgaagttctctgtcacaagtactcaattctaccattgtaacaaaagcagccatagataatatgtaagtgaatggatgtggctgtgtttcagtaagactttattagactctgagatttgaatgtcatataatttccatgggtcatgaaatatttttcttcttttgcttttttctcaaccgtttgaaaatgtagggccgggtgcagtgcttgcacctgtaatcccaacactttgggatgccaaggcagtaggacaactggaggccaggagtttgagaccagcctgggcaacatagcaagaccctgtttcaacaaaaaaaaattttttttgaaattagcagaatgtagtggccatgccagccacatgcctgccatcccagctcctaggatgaggagaaaggatccttgagctcaggagttcaagcctgcagtgagcttgatggtgccactggactcaatgcctaggtgacagagtgaggcccagtatctcaaaaaaaaaaa

SEQ ID NO: 303603 - DNA, 7697 bp, Homo sapiens
  misc_feature (488)..(488): n is a, c, g, or t
  misc_feature (501)..(501): n is a, c, g, or t
  misc_feature (579)..(579): n is a, c, g, or t
  misc_feature (599)..(599): n is a, c, g, or t
  misc_feature (7638)..(7638): n is a, c, g, or t
  misc_feature (7665)..(7665): n is a, c, g, or t
  misc_feature (7686)..(7686): n is a, c, g, or t
  misc_feature (7696)..(7696): n is a, c, g, or t
gaattccgaaagcggagagtcacagcggggccaggccctggggagcggagcctccaccgcccccctcattcccaggcaagggcttggggggaatgagccgggagagccgggtcccgagcctacagagccgggagcagctgagccgccggcgcctcggccgccgccgcctcctcctcctcctccgccgccgccagcccggagcctgagccggcggggcgggggggagaggagcgagcgcagcgcagcagcggagccccgcgaggcccgcccgggcgggtggggagggcagcccgggggactgggccccggggcggggtgggagggggggagaagacgaagacagggccgggtctctccgcggacgagacagcggggatcatggccgcgcaggtcgcccccgccgccgccagcagcctgggcaacccgccgccgccgccgccctcggagctgaagaaagccgagcagcagcagcgggaggaggcgggggncgaggcggcggcngcggcagcggccgagcgcggggaaatgaaggcagccgccgggcaggaaagcgagggccccgccgtggggccgccgcanccgctgggaaaggagctgcnggacggggccgagagcaatgggggtggcggcggcggcggagccggcagcggcggcgggcccggcgcggagccggacctgaagaactcgaacgggaacgcgggccctaggcccgccctgaacaataacctcacggagccgcccggcggcggcggtggcggcagcagcgatggggtgggggcgcctcctcactcagccgcggccgccttgccgcccccagcctacggcttcgggcaaccctacggccggagcccgtctgccgtcgccgccgccgcggccgccgtcttccaccaacaacatggcggacaacaaagccctggcctggcagcgctgcagagcggcggcggcgggggcctggagccctacgcggggccccagcagaactctcacgaccacggcttccccaaccaccagtacaactcctactaccccaaccgcagcgcctaccccccgcccgccccggcctacgcgctgagctccccgagaggtggcactccgggctccggcgcggcggcggctgccggctccaagccgcctccctcctccagcgcctccgcctcctcgtcgtcttcgtccttcgctcagcagcgcttcggggccatggggggaggcggcccctccgcggccggcgggggaactccccagcccaccgccacccccaccctcaaccaactgctcacgtcgcccagctcggcccggggctaccagggctaccccgggggcgactacagtggcgggccccaggacgggggcgccggcaagggcccggcggacatggcctcgcagtgttggggggctgcggcggcggcagctgcggcggcggccgcctcgggaggggcccaacaaaggagccaccacgcgcccatgagccccgggagcagcggcggcggggggcagccgctcgcccggacccctcagccatccagtccaatggatcagatgggcaagatgagacctcagccatatggcgggactaacccatactcgcagcaacagggacctccgtcaggaccgcagcaaggacatgggtacccagggcagccatacgggtcccagaccccgcagcggtacccgatgaccatgcagggccgggcgcagagtgccatgggcggcctctcttatacacagcagattcctccttatggacaacaaggccccagcgggtatggtcaacagggccagactccatattacaaccagcaaagtcctcaccctcagcagcagcagccaccctactcccagcaaccaccgtcccagacccctcatgcccaaccttcgtatcagcagcagccacagtctcaaccaccacagctccagtcctctcagcctccatactcccagcagccatcccagcctccacatcagcagtccccggctccatacccctcccagcagtcgacgacacagcagcacccccagagccagcccccctactcacagccacaggctcagtctccttaccagcagcagcaacctcagcagccagcaccctcgacgctctcccagcaggctgcgtatcctcagccccagtctcagcagtcccagcaaactgcctattcccagcagcgcttccctccaccgcaggagctatctcaagattcatttgggtctcaggcatcctcagccccctcaatgacctccagtaagggagggcaagaagatatgaacctgagccttcagtcaagaccctccagcttgcctgatctatctggttcaatagatgacctccccatggggacagaaggagctctgagtcctggagtgagcacatcagggatttccagcagccaaggagagcagagtaatccagctcagtctcctttctctcctcatacctcccctcacctgcctggcatccgaggcccttccccgtcccctgttggctctcccgccagtgttgctcagtctcgctcaggaccactctcgcctgctgcagtgccaggcaaccagatgccacctcggccacccagtggccagtcggacagcatcatgcatccttccatgaaccaatcaagcattgcccaagatcgaggttatatgcagaggaacccccagatgccccagtacagttccccccagcccggctcagccttatctccgcgtcagccttccggaggacagatacacacaggcatgggctcctaccagcagaactccatggggagctatggtccccaggggggtcagtatggcccacaaggtggctaccccaggcagccaaactataatgccttgcccaatgccaactaccccagtgcaggcatggctggaggcataaaccccatgggtgccggaggtcaaatgcatggacagcctggcatcccaccttatggcacactccctccagggaggatgagtcacgcctccatgggcaaccggccttatggccctaacatggccaatatgccacctcaggttgggtcagggatgtgtccccaccagggggcatgaaccggaaaacccaagaaactgctgtcgccatgcatgttgctgccaactctatccaaaacaggccgccaggctaccccaatatgaatcaagggggcatgatgggaactggacctccttatggacaagggattaatagtatggctggcatgatcaaccctcagggacccccatattccatgggtggaaccatggccaacaattctgcagggatggcagccagcccagagatgatgggccttggggatgtaaagttaactccagccaccaaaatgaacaacaaggcagatgggacacccaagacagaatccaaatccaagaaatccagttcttctactacaaccaatgagaagatcaccaagttgtatgagctgggtggtgagcctgagaggaagatgtgggtggaccgttatctggccttcactgaggagaaggccatgggcatgacaaatctgcctgctgtgggtaggaaacctctggacctctatcgcctctatgtgtctgtgaaggagattggtggattgactcaggtcaacaagaacaaaaaatggcgggaacttgcaaccaacctcaatgtgggcacatcaagcagtgctgccagctccttgaaaaagcagtatatccagtgtctctatgcctttgaatgcaagattgaacggggagaagaccctcccccagacatctttgcagctgctgattccaagaagtcccagcccaagatccagcctccctctcctgcgggatcaggatctatgcaggggccccagactccccagtcaaccagcagttccatggcagaaggaggagacttaaagccaccaactccagcatccacaccacacagtcagatccccccattgccaggcatgagcaggagcaattcagttgggatccaggatgcctttaatgatggaagtgactccacattccagaagcggaattccatgactccaaaccctgggtatcagcccagtatgaatacctctgacatgatggggcgcatgtcctatgagccaaataaggatccttatggcagcatgaggaaagctccagggagtgatcccttcatgtcctcagggcagggccccaacggcgggatgggtgacccctacagtcgtgctgccggccctgggctaggaaatgtggcgatgggaccacgacagcactatccctatggaggtccttatgacagagtgaggacggagcctggaatagggcctgagggaaacatgagcactggggccccacagccgaatctcatgccttccaacccagactcggggatgtattctcctagccgctaccccccgcagcagcagcagcagcagcagcaacgacatgattcctatggcaatcagttctccacccaaggcaccccttctggcagccccttccccagccagcagactacaatgtatcaacagcaacagcagaattacaagcggccaatggatggcacatatggccctcctgccaagcggcacgaaggggagatgtacagcgtgccatacagcactgggcaggggcagcctcagcagcagcagttgcccccagcccagccccagcctgccagccagcaacaagctgcccagccttcccctcagcaagatgtatacaaccagtatggcaatgcctatcctgccactgccacagctgctactgagcgccgaccagcaggcggcccccagaaccaatttccattccagtttggccgagaccgtgtctctgcaccccctggcaccaatgcccagcaaaacatgccaccacaaatgatgggcggccccatacaggcatcagctgaggttgctcagcaaggcaccatgtggcaggggcgtaatgacatgacctataattatgccaacaggcagagcacgggctctgccccccagggccccgcctatcatggcgtgaaccgaacagatgaaatgctgcacacagatcagagggccaaccacgaaggctcgtggccttcccatggcacacgccagcccccatatggtccctctgcccctgtgccccccatgacaaggccccctccatctaactaccagcccccaccaagcatgcagaatcacattcctcaggtatccagccctgctcccctgccccggccaatggagaaccgcacctctcctagcaagtctccattcctgcactctgggatgaaaatgcagaaggcaggtcccccagtacctgcctcgcacatagcacctgcccctgtgcagccccccatgattcggcgggatatcaccttcccacctggctctgttgaagccacacagcctgtgttgaagcagaggaggcggctcacaatgaaagacattggaaccccggaggcatggcgggtaatgatgtccctcaagtctggtctcctggcagagagcacatgggcattagataccatcaacatcctgctgtatgatgacaacagcatcatgaccttcaacctcagtcagctcccagggttgctagagctccttgtagaatatttccgacgatgcctgattgagatctttggcattttaaaggagtatgaggtgggtgacccaggacagagaacgctactggatcctgggaggttcagcaaggtgtctagtccagctcccatggagggtggggaagaagaagaagaacttctaggtcctaaactagaagaggaagaagaagaggaagtagttgaaaatgatgaggagatagccttttcaggcaaggacaagccagcttcagagaatagtgaggagaagctgatcagtaagtttgacaagcttccagtaaagatcgtacagaagaatgatccatttgtggtggactgctcagataagcttgggcgtgtgcaggagtttgacagtggcctgctgcactggcggattggtgggggggacaccactgagcatatccagacccacttcgagagcaagacagagctgctgccttcccggcctcacgcaccctgcccaccagcccctcggaagcatgtgacaacagcagagggtacaccagggacaacagaccaggaggggcccccacctgatggacctccagaaaaacggatcacagccactatggatgacatgttgtctactcggtctagcaccttgaccgaggatggagctaagagttcagaggccatcaaggagagcagcaagtttccatttggcattagcccagcacagagccaccggaacatcaagatcctagaggacgaaccccacagtaaggatgagaccccactgtgtacccttctggactggcaggattctcttgccaagcgctgcgtctgtgtgtccaataccattcgaagcctgtcatttgtgccaggcaatgactttgagatgtccaaacacccagggctgctgctcatcctgggcaagctgatcctgctgcaccacaagcacccagaacggaagcaggcaccactaacttatgaaaaggaggaggaacaggaccaaggggtgagctgcaacaaagtggagtggtggtgggactgcttggagatgctccgggaaaacaccttggttacactcgccaacatctcggggcagttggacctatctccataccccgagagcatttgcctgcctgtcctggacggactcctacactgggcagtttgcccttcagctgaagcccaggaccccttttccaccctgggccccaatgccgtcctttccccgcagagactggtcttggaaaccctcagcaaactcagcatccaggacaacaatgtggacctgattctggccacaccccccttcagccgcctggagaagttgtatagcactatggtgcgcttcctcagtgaccgaaagaacccggtgtgccgggagatggctgtggtactgctggccaacctggctcagggggacagcctggcagctcgtgccattgcagtgcagaagggcagtatcggcaacctcctgggcttcctagaggacagccttgccgccacacagttccagcagagccaggccagcctcctccacatgcagaacccaccctttgagccaactagtgtggacatgatgcggcgggctgcccgcgcgctgcttgccttggccaaggtggacgagaaccactcagagtttactctgtacgaatcacggctgttggacatctcggtatcaccgttgatgaactcattggtttcacaagtcatttgtgatgtactgtttttgattggccagtcatgacagccgtgggacacctcccccccccgtgtgtgtgtgcgtgtgtggagaacttagaaactgactgttgccctttatttatgcaaaaccacctcagaatccagtttaccctgtgctgtccagcttctcccttgggaaaaagtctctcctgtttctctctcctccttccacctcccctccctccatcacctcacgcctttctgttccttgtcctcaccttactcccctcaggaccctaccccaccctctttgaaaagacaaagctctgcctacatagaagactttttttattttaaccaaagttactgttgtttacagtgagtttggggaaaaaaaataaaataaaaatggctttcccagtccttgcatcaacgggatgccacatttcataactgtttggggaaancccgccagccgggggaacccactattncaaaaccgccccccaccgcgngaagccccanc

SEQ ID NO: 303604 - DNA, 5791 bp, Homo sapiens
  misc_feature (488)..(488): n is a, c, g, or t
  misc_feature (501)..(501): n is a, c, g, or t
  misc_feature (579)..(579): n is a, c, g, or t
  misc_feature (599)..(599): n is a, c, g, or t
  misc_feature (5491)..(5491): n is a, c, g, or t
  misc_feature (5493)..(5493): n is a, c, g, or t
  misc_feature (5495)..(5495): n is a, c, g, or t
  misc_feature (5497)..(5498): n is a, c, g, or t
  misc_feature (5510)..(5511): n is a, c, g, or t
  misc_feature (5515)..(5515): n is a, c, g, or t
  misc_feature (5523)..(5523): n is a, c, g, or t
  misc_feature (5528)..(5530): n is a, c, g, or t
  misc_feature (5532)..(5532): n is a, c, g, or t
  misc_feature (5539)..(5539): n is a, c, g, or t
  misc_feature (5551)..(5551): n is a, c, g, or t
  misc_feature (5553)..(5553): n is a, c, g, or t
  misc_feature (5557)..(5557): n is a, c, g, or t
  misc_feature (5565)..(5565): n is a, c, g, or t
  misc_feature (5572)..(5572): n is a, c, g, or t
  misc_feature (5582)..(5583): n is a, c, g, or t
  misc_feature (5587)..(5587): n is a, c, g, or t
  misc_feature (5590)..(5590): n is a, c, g, or t
  misc_feature (5593)..(5594): n is a, c, g, or t
  misc_feature (5608)..(5608): n is a, c, g, or t
  misc_feature (5615)..(5615): n is a, c, g, or t
  misc_feature (5627)..(5627): n is a, c, g, or t
  misc_feature (5633)..(5634): n is a, c, g, or t
  misc_feature (5639)..(5639): n is a, c, g, or t
  misc_feature (5649)..(5649): n is a, c, g, or t
  misc_feature (5662)..(5662): n is a, c, g, or t
  misc_feature (5687)..(5687): n is a, c, g, or t
  misc_feature (5690)..(5691): n is a, c, g, or t
  misc_feature (5695)..(5695): n is a, c, g, or t
  misc_feature (5702)..(5702): n is a, c, g, or t
  misc_feature (5705)..(5705): n is a, c, g, or t
  misc_feature (5707)..(5707): n is a, c, g, or t
  misc_feature (5710)..(5710): n is a, c, g, or t
  misc_feature (5712)..(5712): n is a, c, g, or t
  misc_feature (5732)..(5732): n is a, c, g, or t
  misc_feature (5735)..(5735): n is a, c, g, or t
  misc_feature (5740)..(5740): n is a, c, g, or t
  misc_feature (5767)..(5768): n is a, c, g, or t
  misc_feature (5774)..(5774): n is a, c, g, or t
  misc_feature (5778)..(5779): n is a, c, g, or t
  misc_feature (5783)..(5784): n is a, c, g, or t
  misc_feature (5788)..(5789): n is a, c, g, or t
gaattccgaaagcggagagtcacagcggggccaggccctggggagcggagcctccaccgcccccctcattcccaggcaagggcttggggggaatgagccgggagagccgggtcccgagcctacagagccgggagcagctgagccgccggcgcctcggccgccgccgcctcctcctcctcctccgccgccgccagcccggagcctgagccggcggggcgggggggagaggagcgagcgcagcgcagcagcggagccccgcgaggcccgcccgggcgggtggggagggcagcccgggggactgggccccggggcggggtgggagggggggagaagacgaagacagggccgggtctctccgcggacgagacagcggggatcatggccgcgcaggtcgcccccgccgccgccagcagcctgggcaacccgccgccgccgccgccctcggagctgaagaaagccgagcagcagcagcgggaggaggcgggggncgaggcggcggcngcggcagcggccgagcgcggggaaatgaaggcagccgccgggcaggaaagcgagggccccgccgtggggccgccgcanccgctgggaaaggagctgcnggacggggccgagagcaatgggggtggcggcggcggcggagccggcagcggcggcgggcccggcgcggagccggacctgaagaactcgaacgggaacgcgggccctaggcccgccctgaacaataacctcacggagccgcccggcggcggcggtggcggcagcagcgatggggtgggggcgcctcctcactcagccgcggccgccttgccgcccccagcctacggcttcgggcaaccctacggccggagcccgtctgccgtcgccgccgccgcggccgccgtcttccaccaacaacatggcggacaacaaagccctggcctggcagcgctgcagagcggcggcggcgggggcctggagccctacgcggggccccagcagaactctcacgaccacggcttccccaaccaccagtacaactcctactaccccaaccgcagcgcctaccccccgcccgccccggcctacgcgctgagctccccgagaggtggcactccgggctccggcgcggcggcggctgccggctccaagccgcctccctcctccagcgcctccgcctcctcgtcgtcttcgtccttcgctcagcagcgcttcggggccatggggggaggcggcccctccgcggccggcgggggaactccccagcccaccgccacccccaccctcaaccaactgctcacgtcgcccagctcggcccggggctaccagggctaccccgggggcgactacagtggcgggccccaggacgggggcgccggcaagggcccggcggacatggcctcgcagtgttggggggctgcggcggcggcagctgcggcggcggccgcctcgggaggggcccaacaaaggagccaccacgcgcccatgagccccgggagcagcggcggcggggggcagccgctcgcccggacccctcagccatccagtccaatggatcagatgggcaagatgagacctcagccatatggcgggactaacccatactcgcagcaacagggacctccgtcaggaccgcagcaaggacatgggtacccagggcagccatacgggtcccagaccccgcagcggtacccgatgaccatgcagggccgggcgcagagtgccatgggcggcctctcttatacacagcagattcctccttatggacaacaaggccccagcgggtatggtcaacagggccagactccatattacaaccagcaaagtcctcaccctcagcagcagcagccaccctactcccagcaaccaccgtcccagacccctcatgcccaaccttcgtatcagcagcagccacagtctcaaccaccacagctccagtcctctcagcctccatactcccagcagccatcccagcctccacatcagcagtccccggctccatacccctcccagcagtcgacgacacagcagcacccccagagccagcccccctactcacagccacaggctcagtctccttaccagcagcagcaacctcagcagccagcaccctcgacgctctcccagcaggctgcgtatcctcagccccagtctcagcagtcccagcaaactgcctattcccagcagcgcttccctccaccgcaggagctatctcaagattcatttgggtctcaggcatcctcagccccctcaatgacctccagtaagggagggcaagaagatatgaacctgagccttcagtcaagaccctccagcttgcctgatctatctggttcaatagatgacctccccatggggacagaaggagctctgagtcctggagtgagcacatcagggatttccagcagccaaggagagcagagtaatccagctcagtctcctttctctcctcatacctcccctcacctgcctggcatccgaggcccttccccgtcccctgttggctctcccgccagtgttgctcagtctcgctcaggaccactctcgcctgctgcagtgccaggcaaccagatgccacctcggccacccagtggccagtcggacagcatcatgcatccttccatgaaccaatcaagcattgcccaagatcgaggttatatgcagaggaacccccagatgccccagtacagttccccccagcccggctcagccttatctccgcgtcagccttccggaggacagatacacacaggcatgggctcctaccagcagaactccatggggagctatggtccccaggggggtcagtatggcccacaaggtggctaccccaggcagccaaactataatgccttgcccaatgccaactaccccagtgcaggcatggctggaggcataaaccccatgggtgccggaggtcaaatgcatggacagcctggcatcccaccttatggcacactccctccagggaggatgagtcacgcctccatgggcaaccggccttatggccctaacatggccaatatgccacctcaggttgggtcagggatgtgtccccaccagggggcatgaaccggaaaacccaagaaactgctgtcgccatgcatgttgctgccaactctatccaaaacaggccgccaggctaccccaatatgaatcaagggggcatgatgggaactggacctccttatggacaagggattaatagtatggctggcatgatcaaccctcagggacccccatattccatgggtggaaccatggccaacaattctgcagggatggcagccagcccagagatgatgggccttggggatgtaaagttaactccagccaccaaaatgaacaacaaggcagatgggacacccaagacagaatccaaatccaagaaatccagttcttctactacaaccaatgagaagatcaccaagttgtatgagctgggtggtgagcctgagaggaagatgtgggtggaccgttatctggccttcactgaggagaaggccatgggcatgacaaatctgcctgctgtgggtaggaaacctctggacctctatcgcctctatgtgtctgtgaaggagattggtggattgactcaggtcaacaagaacaaaaaatggcgggaacttgcaaccaacctcaatgtgggcacatcaagcagtgctgccagctccttgaaaaagcagtatatccagtgtctctatgcctttgaatgcaagattgaacggggagaagaccctcccccagacatctttgcagctgctgattccaagaagtcccagcccaagatccagcctccctctcctgcgggatcaggatctatgcaggggccccagactccccagtcaaccagcagttccatggcagaaggaggagacttaaagccaccaactccagcatccacaccacacagtcagatccccccattgccaggcatgagcaggagcaattcagttgggatccaggatgcctttaatgatggaagtgactccacattccagaagcggaattccatgactccaaaccctgggtatcagcccagtatgaatacctctgacatgatggggcgcatgtcctatgagccaaataaggatccttatggcagcatgaggaaagctccagggagtgatcccttcatgtcctcagggcagggccccaacggcgggatgggtgacccctacagtcgtgctgccggccctgggctaggaaatgtggcgatgggaccacgacagcactatccctatggaggtccttatgacagagtgaggacggagcctggaatagggcctgagggaaacatgagcactggggccccacagccgaatctcatgccttccaacccagactcggggatgtattctcctagccgctaccccccgcagcagcagcagcagcagcagcaacgacatgattcctatggcaatcagttctccacccaaggcaccccttctggcagccccttccccagccagcagactacaatgtatcaacagcaacagcagaattacaagcggccaatggatggcacatatggccctcctgccaagcggcacgaaggggagatgtacagcgtgccatacagcactgggcaggggcagcctcagcagcagcagttgcccccagcccagccccagcctgccagccagcaacaagctgcccagccttcccctcagcaagatgtatacaaccagtatggcaatgcctatcctgccactgccacagctgctactgagcgccgaccagcaggcggcccccagaaccaatttccattccagtttggccgagaccgtgtctctgcaccccctggcaccaatgcccagcaaaacatgccaccacaaatgatgggcggccccatacaggcatcagctgaggttgctcagcaaggcaccatgtggcaggggcgtaatgacatgacctataattatgccaacaggcagagcacgggctctgccccccagggccccgcctatcatggcgtgaaccgaacagatgaaatgctgcacacagatcagagggccaaccacgaaggctcgtggccttcccatggcacacgccagcccccatatggtccctctgcccctgtgccccccatgacaaggccccctccatctaactaccagcccccaccaaaacacatgtactacaatgtgtgtattcatagcggcactatttcatagttgacaaattctggaagcaacccaaattctcattcatagtagaatggataaatgtaaatatccacccacacaatgcactactcaacagtatagatgagtatcattaacataatggtgcttgaaagaaaccagatgtaaaataatacatatgactctgtcatataatagacaaaacatggcaaaataaatctgttaagccaagctagtgatggccatgttgggagagcttctgggtgagggtctgttaatcttggttacattgggtgtgcaatttgtgaaattcattgtgctgtacgctgacagtagattttatgtatcttatacttttagagttaaanantntnntttttttttttnngacngagtctcnctgtnnncnaggctgnagtgcagtggcncnatcncagctcantgcaacntccgcctccnnggtncangcnnttctcctgcctcancctcccnagtagctgggantacagnngcccnccaccacgcncggctaatttttntatttttagtagagacggggtttcnccnngttngccaggntgntntcnanctcctgacctcgtgatccanccncctcngcctcccaaagtgctgggattacaggnntgagcnaccnngccnngccnnac

SEQ ID NO: 303605 - DNA, 2106 bp, Homo sapiens
  misc_feature (488)..(488): n is a, c, g, or t
  misc_feature (501)..(501): n is a, c, g, or t
  misc_feature (579)..(579): n is a, c, g, or t
  misc_feature (599)..(599): n is a, c, g, or t
gaattccgaaagcggagagtcacagcggggccaggccctggggagcggagcctccaccgcccccctcattcccaggcaagggcttggggggaatgagccgggagagccgggtcccgagcctacagagccgggagcagctgagccgccggcgcctcggccgccgccgcctcctcctcctcctccgccgccgccagcccggagcctgagccggcggggcgggggggagaggagcgagcgcagcgcagcagcggagccccgcgaggcccgcccgggcgggtggggagggcagcccgggggactgggccccggggcggggtgggagggggggagaagacgaagacagggccgggtctctccgcggacgagacagcggggatcatggccgcgcaggtcgcccccgccgccgccagcagcctgggcaacccgccgccgccgccgccctcggagctgaagaaagccgagcagcagcagcgggaggaggcgggggncgaggcggcggcngcggcagcggccgagcgcggggaaatgaaggcagccgccgggcaggaaagcgagggccccgccgtggggccgccgcanccgctgggaaaggagctgcnggacggggccgagagcaatgggggtggcggcggcggcggagccggcagcggcggcgggcccggcgcggagccggacctgaagaactcgaacgggaacgcgggccctaggcccgccctgaacaataacctcacggagccgcccggcggcggcggtggcggcagcagcgatggggtgggggcgcctcctcactcagccgcggccgccttgccgcccccagcctacggcttcgggcaaccctacggccggagcccgtctgccgtcgccgccgccgcggccgccgtcttccaccaacaacatggcggacaacaaagccctggcctggcagcgctgcagagcggcggcggcgggggcctggagccctacgcggggccccagcagaactctcacgaccacggcttccccaaccaccagtacaactcctactaccccaaccgcagcgcctaccccccgcccgccccggcctacgcgctgagctccccgagaggtggcactccgggctccggcgcggcggcggctgccggctccaagccgcctccctcctccagcgcctccgcctcctcgtcgtcttcgtccttcgctcagcagcgcttcggggccatggggggaggcggcccctccgcggccggcgggggaactccccagcccaccgccacccccaccctcaaccaactgctcacgtcgcccagctcggcccggggctaccagggctaccccgggggcgactacagtggcgggccccaggacgggggcgccggcaagggcccggcggacatggcctcgcagtgttggggggctgcggcggcggcagctgcggcggcggccgcctcgggaggggcccaacaaaggagccaccacgcgcccatgagccccgggagcagcggcggcggggggcagccgctcgcccggacccctcaggtacacagctgagtggggagggggctggggcgagcgtggtcctgggggtgggtggcggctgcggtgagcgggccacagccttgggctcccctcagtcccgggcccccactgctggggagctgccattgtctggctcttctctcttaaaatggctgcctgtctgccttcctctccttccctccttcagcctttgtgttgggtttttccagaggtgtctgctcctctttttcctctcccctggtcccttcgaactccaggggtcttgatgggggtgcggggcagagtgtgcggggaagggcctggccgggggtgagggggtgagggggcgctgggggctcaggttaggagtgtaggcagtggtaggagcccaggagttgaatgaacgtttctttgctcacctgccgctcctctccgtcccccggccttcctctgggccgccccccatctgtgctttcaaagagggcccctagagctcgaggggacctcgaggggagggcaggggactgcttgggagctgctagaggccggctgcggttcacctagggcagcccggtccatctcctgtcttaggctccgccggcccagtggcct

SEQ ID NO: 303606 - DNA, 452 bp, Homo sapiens
  misc_feature (430)..(432): n is a, c, g, or t
ggattccaggaaggagcaagcagcagttcgtggtgaagataggaaaagagtccaggagccagtgcgatttggtgaaggaagctgatcagtaagtttgacaagcttccagtaaagatcgtacagaagaatgatccatttgtggtggactgctcagataagcttgggcgtgtgcaggagtttgacagtggcctgctgcactggcggattggtgggggggacaccactgagcatatccagacccacttcgagagcaagacagcagacaggattccaggaaccagtgtttgatgaagctaggactgaggagcaagcgagcaagcgagcaagcccacgtcaggcctggcctcatctcagaccctgcttaggatgggggatgtggccaggggtgctcctgtgctcaccctctcttggtgcatttttttggaagaannnaattgcctctctcttaaaaa

SEQ ID NO: 303607 - DNA, 8595 bp, Homo sapiens
  misc_feature (488)..(488): n is a, c, g, or t
  misc_feature (501)..(501): n is a, c, g, or t
  misc_feature (579)..(579): n is a, c, g, or t
  misc_feature (599)..(599): n is a, c, g, or t
gaattccgaaagcggagagtcacagcggggccaggccctggggagcggagcctccaccgcccccctcattcccaggcaagggcttggggggaatgagccgggagagccgggtcccgagcctacagagccgggagcagctgagccgccggcgcctcggccgccgccgcctcctcctcctcctccgccgccgccagcccggagcctgagccggcggggcgggggggagaggagcgagcgcagcgcagcagcggagccccgcgaggcccgcccgggcgggtggggagggcagcccgggggactgggccccggggcggggtgggagggggggagaagacgaagacagggccgggtctctccgcggacgagacagcggggatcatggccgcgcaggtcgcccccgccgccgccagcagcctgggcaacccgccgccgccgccgccctcggagctgaagaaagccgagcagcagcagcgggaggaggcgggggncgaggcggcggcngcggcagcggccgagcgcggggaaatgaaggcagccgccgggcaggaaagcgagggccccgccgtggggccgccgcanccgctgggaaaggagctgcnggacggggccgagagcaatgggggtggcggcggcggcggagccggcagcggcggcgggcccggcgcggagccggacctgaagaactcgaacgggaacgcgggccctaggcccgccctgaacaataacctcacggagccgcccggcggcggcggtggcggcagcagcgatggggtgggggcgcctcctcactcagccgcggccgccttgccgcccccagcctacggcttcgggcaaccctacggccggagcccgtctgccgtcgccgccgccgcggccgccgtcttccaccaacaacatggcggacaacaaagccctggcctggcagcgctgcagagcggcggcggcgggggcctggagccctacgcggggccccagcagaactctcacgaccacggcttccccaaccaccagtacaactcctactaccccaaccgcagcgcctaccccccgcccgccccggcctacgcgctgagctccccgagaggtggcactccgggctccggcgcggcggcggctgccggctccaagccgcctccctcctccagcgcctccgcctcctcgtcgtcttcgtccttcgctcagcagcgcttcggggccatggggggaggcggcccctccgcggccggcgggggaactccccagcccaccgccacccccaccctcaaccaactgctcacgtcgcccagctcggcccggggctaccagggctaccccgggggcgactacagtggcgggccccaggacgggggcgccggcaagggcccggcggacatggcctcgcagtgttggggggctgcggcggcggcagctgcggcggcggccgcctcgggaggggcccaacaaaggagccaccacgcgcccatgagccccgggagcagcggcggcggggggcagccgctcgcccggacccctcagccatccagtccaatggatcagatgggcaagatgagacctcagccatatggcgggactaacccatactcgcagcaacagggacctccgtcaggaccgcagcaaggacatgggtacccagggcagccatacgggtcccagaccccgcagcggtacccgatgaccatgcagggccgggcgcagagtgccatgggcggcctctcttatacacagcagattcctccttatggacaacaaggccccagcgggtatggtcaacagggccagactccatattacaaccagcaaagtcctcaccctcagcagcagcagccaccctactcccagcaaccaccgtcccagacccctcatgcccaaccttcgtatcagcagcagccacagtctcaaccaccacagctccagtcctctcagcctccatactcccagcagccatcccagcctccacatcagcagtccccggctccatacccctcccagcagtcgacgacacagcagcacccccagagccagcccccctactcacagccacaggctcagtctccttaccagcagcagcaacctcagcagccagcaccctcgacgctctcccagcaggctgcgtatcctcagccccagtctcagcagtcccagcaaactgcctattcccagcagcgcttccctccaccgcaggagctatctcaagattcatttgggtctcaggcatcctcagccccctcaatgacctccagtaagggagggcaagaagatatgaacctgagccttcagtcaagaccctccagcttgcctgatctatctggttcaatagatgacctccccatggggacagaaggagctctgagtcctggagtgagcacatcagggatttccagcagccaaggagagcagagtaatccagctcagtctcctttctctcctcatacctcccctcacctgcctggcatccgaggcccttccccgtcccctgttggctctcccgccagtgttgctcagtctcgctcaggaccactctcgcctgctgcagtgccaggcaaccagatgccacctcggccacccagtggccagtcggacagcatcatgcatccttccatgaaccaatcaagcattgcccaagatcgaggttatatgcagaggaacccccagatgccccagtacagttccccccagcccggctcagccttatctccgcgtcagccttccggaggacagatacacacaggcatgggctcctaccagcagaactccatggggagctatggtccccaggggggtcagtatggcccacaaggtggctaccccaggcagccaaactataatgccttgcccaatgccaactaccccagtgcaggcatggctggaggcataaaccccatgggtgccggaggtcaaatgcatggacagcctggcatcccaccttatggcacactccctccagggaggatgagtcacgcctccatgggcaaccggccttatggccctaacatggccaatatgccacctcaggttgggtcagggatgtgtccccaccagggggcatgaaccggaaaacccaagaaactgctgtcgccatgcatgttgctgccaactctatccaaaacaggccgccaggctaccccaatatgaatcaagggggcatgatgggaactggacctccttatggacaagggattaatagtatggctggcatgatcaaccctcagggacccccatattccatgggtggaaccatggccaacaattctgcagggatggcagccagcccagagatgatgggccttggggatgtaaagttaactccagccaccaaaatgaacaacaaggcagatgggacacccaagacagaatccaaatccaagaaatccagttcttctactacaaccaatgagaagatcaccaagttgtatgagctgggtggtgagcctgagaggaagatgtgggtggaccgttatctggccttcactgaggagaaggccatgggcatgacaaatctgcctgctgtgggtaggaaacctctggacctctatcgcctctatgtgtctgtgaaggagattggtggattgactcaggtcaacaagaacaaaaaatggcgggaacttgcaaccaacctcaatgtgggcacatcaagcagtgctgccagctccttgaaaaagcagtatatccagtgtctctatgcctttgaatgcaagattgaacggggagaagaccctcccccagacatctttgcagctgctgattccaagaagtcccagcccaagatccagcctccctctcctgcgggatcaggatctatgcaggggccccagactccccagtcaaccagcagttccatggcagaaggaggagacttaaagccaccaactccagcatccacaccacacagtcagatccccccattgccaggcatgagcaggagcaattcagttgggatccaggatgcctttaatgatggaagtgactccacattccagaagcggaattccatgactccaaaccctgggtatcagcccagtatgaatacctctgacatgatggggcgcatgtcctatgagccaaataaggatccttatggcagcatgaggaaagctccagggagtgatcccttcatgtcctcagggcagggccccaacggcgggatgggtgacccctacagtcgtgctgccggccctgggctaggaaatgtggcgatgggaccacgacagcactatccctatggaggtccttatgacagagtgaggacggagcctggaatagggcctgagggaaacatgagcactggggccccacagccgaatctcatgccttccaacccagactcggggatgtattctcctagccgctaccccccgcagcagcagcagcagcagcagcaacgacatgattcctatggcaatcagttctccacccaaggcaccccttctggcagccccttccccagccagcagactacaatgtatcaacagcaacagcagaattacaagcggccaatggatggcacatatggccctcctgccaagcggcacgaaggggagatgtacagcgtgccatacagcactgggcaggggcagcctcagcagcagcagttgcccccagcccagccccagcctgccagccagcaacaagctgcccagccttcccctcagcaagatgtatacaaccagtatggcaatgcctatcctgccactgccacagctgctactgagcgccgaccagcaggcggcccccagaaccaatttccattccagtttggccgagaccgtgtctctgcaccccctggcaccaatgcccagcaaaacatgccaccacaaatgatgggcggccccatacaggcatcagctgaggttgctcagcaaggcaccatgtggcaggggcgtaatgacatgacctataattatgccaacaggcagagcacgggctctgccccccagggccccgcctatcatggcgtgaaccgaacagatgaaatgctgcacacagatcagagggccaaccacgaaggctcgtggccttcccatggcacacgccagcccccatatggtccctctgcccctgtgccccccatgacaaggccccctccatctaactaccagcccccaccaagcatgcagaatcacattcctcaggtatccagccctgctcccctgccccggccaatggagaaccgcacctctcctagcaagtctccattcctgcactctgggatgaaaatgcagaaggcaggtcccccagtacctgcctcgcacatagcacctgcccctgtgcagccccccatgattcggcgggatatcaccttcccacctggctctgttgaagccacacagcctgtgttgaagcagaggaggcggctcacaatgaaagacattggaaccccggaggcatggcgggtaatgatgtccctcaagtctggtctcctggcagagagcacatgggcattagataccatcaacatcctgctgtatgatgacaacagcatcatgaccttcaacctcagtcagctcccagggttgctagagctccttgtagaatatttccgacgatgcctgattgagatctttggcattttaaaggagtatgaggtgggtgacccaggacagagaacgctactggatcctgggaggttcagcaaggtgtctagtccagctcccatggagggtggggaagaagaagaagaacttctaggtcctaaactagaagaggaagaagaagaggaagtagttgaaaatgatgaggagatagccttttcaggcaaggacaagccagcttcagagaatagtgaggagaagctgatcagtaagtttgacaagcttccagtaaagatcgtacagaagaatgatccatttgtggtggactgctcagataagcttgggcgtgtgcaggagtttgacagtggcctgctgcactggcggattggtgggggggacaccactgagcatatccagacccacttcgagagcaagacagagctgctgccttcccggcctcacgcaccctgcccaccagcccctcggaagcatgtgacaacagcagagggtacaccagggacaacagaccaggaggggcccccacctgatggacctccagaaaaacggatcacagccactatggatgacatgttgtctactcggtctagcaccttgaccgaggatggagctaagagttcagaggccatcaaggagagcagcaagtttccatttggcattagcccagcacagagccaccggaacatcaagatcctagaggacgaaccccacagtaaggatgagaccccactgtgtacccttctggactggcaggattctcttgccaagcgctgcgtctgtgtgtccaataccattcgaagcctgtcatttgtgccaggcaatgactttgagatgtccaaacacccagggctgctgctcatcctgggcaagctgatcctgctgcaccacaagcacccagaacggaagcaggcaccactaacttatgaaaaggaggaggaacaggaccaaggggtgagctgcaacaaagtggagtggtggtgggactgcttggagatgctccgggaaaacaccttggttacactcgccaacatctcggggcagttggacctatctccataccccgagagcatttgcctgcctgtcctggacggactcctacactgggcagtttgcccttcagctgaagcccaggaccccttttccaccctgggccccaatgccgtcctttccccgcagagactggtcttggaaaccctcagcaaactcagcatccaggacaacaatgtggacctgattctggccacaccccccttcagccgcctggagaagttgtatagcactatggtgcgcttcctcagtgaccgaaagaacccggtgtgccgggagatggctgtggtactgctggccaacctggctcagggggacagcctggcagctcgtgccattgcagtgcagaagggcagtatcggcaacctcctgggcttcctagaggacagccttgccgccacacagttccagcagagccaggccagcctcctccacatgcagaacccaccctttgagccaactagtgtggacatgatgcggcgggctgcccgcgcgctgcttgccttggccaaggtggacgagaaccactcagagtttactctgtacgaatcacggctgttggacatctcggtatcaccgttgatgaactcattggtttcacaagtcatttgtgatgtactgtttttgattggccagtcatgacagccgtgggacacctcccccccccgtgtgtgtgtgcgtgtgtggagaacttagaaactgactgttgccctttatttatgcaaaaccacctcagaatccagtttaccctgtgctgtccagcttctcccttgggaaaaagtctctcctgtttctctctcctccttccacctcccctccctccatcacctcacgcctttctgttccttgtcctcaccttactcccctcaggaccctaccccaccctctttgaaaagacaaagctctgcctacatagaagactttttttattttaaccaaagttactgttgtttacagtgagtttggggaaaaaaaataaaataaaaatggctttcccagtccttgcatcaacgggatgccacatttcataactgtttttaatggtaaaaaaaaaaaaaaaaaatacaaaaaaaaattctgaaggacaaaaaaggtgactgctgaactgtgtgtggtttattgttgtacattcacaatcttgcaggagccaagaagttcgcagttgtgaacagaccctgttcactggagaggcctgtgcagtagagtgtagaccctttcatgtactgtactgtacacctgatactgtaaacatactgtaataataatgtctcacatggaaacagaaaacgctgggtcagcagcaagctgtagtttttaaaaatgtttttagttaaacgttgaggagaaaaaaaaaaaaggcttttcccccaaagtatcatgtgtgaacctacaacaccctgacctctttctctcctccttgattgtatgaataaccctgagatcacctcttagaactggttttaacctttagctgcagcggctacgctgccacgtgtgtatatatatgacgttgtacattgcacatacccttggatccccacagtttggtcctcctcccagctacccctttatagtatgacgagttaacaagttggtgacctgcacaaagcgagacacagctatttaatctcttgccagatatcgcccctcttggtgcgatgctgtacaggtctctgtaaaaagtccttgctgtctcagcagccaatcaacttatagtttatttttttctgggtttttgttttgttttgttttctttctaatcgaggtgtgaaaaagttctaggttcagttgaagttctgatgaagaaacacaattgagattttttcagtgataaaatctgcatatttgtatttcaacaatgtagctaaaacttgatgtaaattcctcctttttttccttttttggcttaatgaatatcatttattcagtatgaaatctttatactatatgttccacgtgttaagaataaatgtacattaaatcttggtaaaaaaaaagtgaa

SEQ ID NO: 303608 - DNA, 7356 bp, Homo sapiens
tggatctcaagcagtaccacagttacaaagtagtttttagcttagcttacaaggtgttttcacaaataggtggtattttcatttttcaaatgacaaaattagggttctgaggcgggtcagttgacttaaaggttactaggttggtctcattgctctttcaaagtaactgtatttctttatagcatacagactaaaaaaacctgtgtacctgggttatatattcggtggccagaggccatcaaagctcaggttaatgaaatgctctttattttgtagccatccagtccaatggatcagatgggcaagatgagacctcagccatatggcgggactaacccatactcgcagcaacagggacctccgtcaggaccgcagcaaggacatgggtacccagggcagccatacgggtcccagaccccgcagcggtacccgatgaccatgcagggccgggcgcagagtgccatgggcggcctctcttatacacagcagattcctccttatggacaacaaggccccagcgggtatggtcaacagggccagactccatattacaaccagcaaagtcctcaccctcagcagcagcagccaccctactcccagcaaccaccgtcccagacccctcatgcccaaccttcgtatcagcagcagccacagtctcaaccaccacagctccagtcctctcagcctccatactcccagcagccatcccagcctccacatcagcagtccccggctccatacccctcccagcagtcgacgacacagcagcacccccagagccagcccccctactcacagccacaggctcagtctccttaccagcagcagcaacctcagcagccagcaccctcgacgctctcccagcaggctgcgtatcctcagccccagtctcagcagtcccagcaaactgcctattcccagcagcgcttccctccaccgcaggagctatctcaagattcatttgggtctcaggcatcctcagccccctcaatgacctccagtaagggagggcaagaagatatgaacctgagccttcagtcaagaccctccagcttgcctgatctatctggttcaatagatgacctccccatggggacagaaggagctctgagtcctggagtgagcacatcagggatttccagcagccaaggagagcagagtaatccagctcagtctcctttctctcctcatacctcccctcacctgcctggcatccgaggcccttccccgtcccctgttggctctcccgccagtgttgctcagtctcgctcaggaccactctcgcctgctgcagtgccaggcaaccagatgccacctcggccacccagtggccagtcggacagcatcatgcatccttccatgaaccaatcaagcattgcccaagatcgaggttatatgcagaggaacccccagatgccccagtacagttccccccagcccggctcagccttatctccgcgtcagccttccggaggacagatacacacaggcatgggctcctaccagcagaactccatggggagctatggtccccaggggggtcagtatggcccacaaggtggctaccccaggcagccaaactataatgccttgcccaatgccaactaccccagtgcaggcatggctggaggcataaaccccatgggtgccggaggtcaaatgcatggacagcctggcatcccaccttatggcacactccctccagggaggatgagtcacgcctccatgggcaaccggccttatggccctaacatggccaatatgccacctcaggttgggtcagggatgtgtccccaccagggggcatgaaccggaaaacccaagaaactgctgtcgccatgcatgttgctgccaactctatccaaaacaggccgccaggctaccccaatatgaatcaagggggcatgatgggaactggacctccttatggacaagggattaatagtatggctggcatgatcaaccctcagggacccccatattccatgggtggaaccatggccaacaattctgcagggatggcagccagcccagagatgatgggccttggggatgtaaagttaactccagccaccaaaatgaacaacaaggcagatgggacacccaagacagaatccaaatccaagaaatccagttcttctactacaaccaatgagaagatcaccaagttgtatgagctgggtggtgagcctgagaggaagatgtgggtggaccgttatctggccttcactgaggagaaggccatgggcatgacaaatctgcctgctgtgggtaggaaacctctggacctctatcgcctctatgtgtctgtgaaggagattggtggattgactcaggtcaacaagaacaaaaaatggcgggaacttgcaaccaacctcaatgtgggcacatcaagcagtgctgccagctccttgaaaaagcagtatatccagtgtctctatgcctttgaatgcaagattgaacggggagaagaccctcccccagacatctttgcagctgctgattccaagaagtcccagcccaagatccagcctccctctcctgcgggatcaggatctatgcaggggccccagactccccagtcaaccagcagttccatggcagaaggaggagacttaaagccaccaactccagcatccacaccacacagtcagatccccccattgccaggcatgagcaggagcaattcagttgggatccaggatgcctttaatgatggaagtgactccacattccagaagcggaattccatgactccaaaccctgggtatcagcccagtatgaatacctctgacatgatggggcgcatgtcctatgagccaaataaggatccttatggcagcatgaggaaagctccagggagtgatcccttcatgtcctcagggcagggccccaacggcgggatgggtgacccctacagtcgtgctgccggccctgggctaggaaatgtggcgatgggaccacgacagcactatccctatggaggtccttatgacagagtgaggacggagcctggaatagggcctgagggaaacatgagcactggggccccacagccgaatctcatgccttccaacccagactcggggatgtattctcctagccgctaccccccgcagcagcagcagcagcagcagcaacgacatgattcctatggcaatcagttctccacccaaggcaccccttctggcagccccttccccagccagcagactacaatgtatcaacagcaacagcagaattacaagcggccaatggatggcacatatggccctcctgccaagcggcacgaaggggagatgtacagcgtgccatacagcactgggcaggggcagcctcagcagcagcagttgcccccagcccagccccagcctgccagccagcaacaagctgcccagccttcccctcagcaagatgtatacaaccagtatggcaatgcctatcctgccactgccacagctgctactgagcgccgaccagcaggcggcccccagaaccaatttccattccagtttggccgagaccgtgtctctgcaccccctggcaccaatgcccagcaaaacatgccaccacaaatgatgggcggccccatacaggcatcagctgaggttgctcagcaaggcaccatgtggcaggggcgtaatgacatgacctataattatgccaacaggcagagcacgggctctgccccccagggccccgcctatcatggcgtgaaccgaacagatgaaatgctgcacacagatcagagggccaaccacgaaggctcgtggccttcccatggcacacgccagcccccatatggtccctctgcccctgtgccccccatgacaaggccccctccatctaactaccagcccccaccaagcatgcagaatcacattcctcaggtatccagccctgctcccctgccccggccaatggagaaccgcacctctcctagcaagtctccattcctgcactctgggatgaaaatgcagaaggcaggtcccccagtacctgcctcgcacatagcacctgcccctgtgcagccccccatgattcggcgggatatcaccttcccacctggctctgttgaagccacacagcctgtgttgaagcagaggaggcggctcacaatgaaagacattggaaccccggaggcatggcgggtaatgatgtccctcaagtctggtctcctggcagagagcacatgggcattagataccatcaacatcctgctgtatgatgacaacagcatcatgaccttcaacctcagtcagctcccagggttgctagagctccttgtagaatatttccgacgatgcctgattgagatctttggcattttaaaggagtatgaggtgggtgacccaggacagagaacgctactggatcctgggaggttcagcaaggtgtctagtccagctcccatggagggtggggaagaagaagaagaacttctaggtcctaaactagaagaggaagaagaagaggaagtagttgaaaatgatgaggagatagccttttcaggcaaggacaagccagcttcagagaatagtgaggagaagctgatcagtaagtttgacaagcttccagtaaagatcgtacagaagaatgatccatttgtggtggactgctcagataagcttgggcgtgtgcaggagtttgacagtggcctgctgcactggcggattggtgggggggacaccactgagcatatccagacccacttcgagagcaagacagagctgctgccttcccggcctcacgcaccctgcccaccagcccctcggaagcatgtgacaacagcagagggtacaccagggacaacagaccaggaggggcccccacctgatggacctccagaaaaacggatcacagccactatggatgacatgttgtctactcggtctagcaccttgaccgaggatggagctaagagttcagaggccatcaaggagagcagcaagtttccatttggcattagcccagcacagagccaccggaacatcaagatcctagaggacgaaccccacagtaaggatgagaccccactgtgtacccttctggactggcaggattctcttgccaagcgctgcgtctgtgtgtccaataccattcgaagcctgtcatttgtgccaggcaatgactttgagatgtccaaacacccagggctgctgctcatcctgggcaagctgatcctgctgcaccacaagcacccagaacggaagcaggcaccactaacttatgaaaaggaggaggaacaggaccaaggggtgagctgcaacaaagtggagtggtggtgggactgcttggagatgctccgggaaaacaccttggttacactcgccaacatctcggggcagttggacctatctccataccccgagagcatttgcctgcctgtcctggacggactcctacactgggcagtttgcccttcagctgaagcccaggaccccttttccaccctgggccccaatgccgtcctttccccgcagagactggtcttggaaaccctcagcaaactcagcatccaggacaacaatgtggacctgattctggccacaccccccttcagccgcctggagaagttgtatagcactatggtgcgcttcctcagtgaccgaaagaacccggtgtgccgggagatggctgtggtactgctggccaacctggctcagggggacagcctggcagctcgtgccattgcagtgcagaagggcagtatcggcaacctcctgggcttcctagaggacagccttgccgccacacagttccagcagagccaggccagcctcctccacatgcagaacccaccctttgagccaactagtgtggacatgatgcggcgggctgcccgcgcgctgcttgccttggccaaggtggacgagaaccactcagagtttactctgtacgaatcacggctgttggacatctcggtatcaccgttgatgaactcattggtttcacaagtcatttgtgatgtactgtttttgattggccagtcatgacagccgtgggacacctcccccccccgtgtgtgtgtgcgtgtgtggagaacttagaaactgactgttgccctttatttatgcaaaaccacctcagaatccagtttaccctgtgctgtccagcttctcccttgggaaaaagtctctcctgtttctctctcctccttccacctcccctccctccatcacctcacgcctttctgttccttgtcctcaccttactcccctcaggaccctaccccaccctctttgaaaagacaaagctctgcctacatagaagactttttttattttaaccaaagttactgttgtttacagtgagtttggggaaaaaaaataaaataaaaatggctttcccagtccttgcatcaacgggatgccacatttcataactgtttttaatggtaaaaaaaaaaaaaaaaaatacaaaaaaaaattctgaaggacaaaaaaggtgactgctgaactgtgtgtggtttattgttgtacattcacaatcttgcaggagccaagaagttcgcagttgtgaacagaccctgttcactggagaggcctgtgcagtagagtgtagaccctttcatgtactgtactgtacacctgatactgtaaacatactgtaataataatgtctcacatggaaacagaaaacgctgggtcagcagcaagctgtagtttttaaaaatgtttttagttaaacgttgaggagaaaaaaaaaaaaggcttttcccccaaagtatcatgtgtgaacctacaacaccctgacctctttctctcctccttgattgtatgaataaccctgagatcacctcttagaactggttttaacctttagctgcagcggctacgctgccacgtgtgtatatatatgacgttgtacattgcacatacccttggatccccacagtttggtcctcctcccagctacccctttatagtatgacgagttaacaagttggtgacctgcacaaagcgagacacagctatttaatctcttgccagatatcgcccctcttggtgcgatgctgtacaggtctctgtaaaaagtccttgctgtctcagcagccaatcaacttatagtttatttttttctgggtttttgttttgttttgttttctttctaatcgaggtgtgaaaaagttctaggttcagttgaagttctgatgaagaaacacaattgagattttttcagtgataaaatctgcatatttgtatttcaacaatgtagctaaaacttgatgtaaattcctcctttttttccttttttggcttaatgaatatcatttattcagtatgaaatctttatactatatgttccacgtgttaagaataaatgtacattaaatcttggtaaaaaaaaagtgaa

SEQ ID NO: 303609 - DNA, 8729 bp, Homo sapiens
  misc_feature (488)..(488): n is a, c, g, or t
  misc_feature (501)..(501): n is a, c, g, or t
  misc_feature (579)..(579): n is a, c, g, or t
  misc_feature (599)..(599): n is a, c, g, or t
  misc_feature (8678)..(8678): n is a, c, g, or t
  misc_feature (8715)..(8715): n is a, c, g, or t
gaattccgaaagcggagagtcacagcggggccaggccctggggagcggagcctccaccgcccccctcattcccaggcaagggcttggggggaatgagccgggagagccgggtcccgagcctacagagccgggagcagctgagccgccggcgcctcggccgccgccgcctcctcctcctcctccgccgccgccagcccggagcctgagccggcggggcgggggggagaggagcgagcgcagcgcagcagcggagccccgcgaggcccgcccgggcgggtggggagggcagcccgggggactgggccccggggcggggtgggagggggggagaagacgaagacagggccgggtctctccgcggacgagacagcggggatcatggccgcgcaggtcgcccccgccgccgccagcagcctgggcaacccgccgccgccgccgccctcggagctgaagaaagccgagcagcagcagcgggaggaggcgggggncgaggcggcggcngcggcagcggccgagcgcggggaaatgaaggcagccgccgggcaggaaagcgagggccccgccgtggggccgccgcanccgctgggaaaggagctgcnggacggggccgagagcaatgggggtggcggcggcggcggagccggcagcggcggcgggcccggcgcggagccggacctgaagaactcgaacgggaacgcgggccctaggcccgccctgaacaataacctcacggagccgcccggcggcggcggtggcggcagcagcgatggggtgggggcgcctcctcactcagccgcggccgccttgccgcccccagcctacggcttcgggcaaccctacggccggagcccgtctgccgtcgccgccgccgcggccgccgtcttccaccaacaacatggcggacaacaaagccctggcctggcagcgctgcagagcggcggcggcgggggcctggagccctacgcggggccccagcagaactctcacgaccacggcttccccaaccaccagtacaactcctactaccccaaccgcagcgcctaccccccgcccgccccggcctacgcgctgagctccccgagaggtggcactccgggctccggcgcggcggcggctgccggctccaagccgcctccctcctccagcgcctccgcctcctcgtcgtcttcgtccttcgctcagcagcgcttcggggccatggggggaggcggcccctccgcggccggcgggggaactccccagcccaccgccacccccaccctcaaccaactgctcacgtcgcccagctcggcccggggctaccagggctaccccgggggcgactacagtggcgggccccaggacgggggcgccggcaagggcccggcggacatggcctcgcagtgttggggggctgcggcggcggcagctgcggcggcggccgcctcgggaggggcccaacaaaggagccaccacgcgcccatgagccccgggagcagcggcggcggggggcagccgctcgcccggacccctcagccatccagtccaatggatcagatgggcaagatgagacctcagccatatggcgggactaacccatactcgcagcaacagggacctccgtcaggaccgcagcaaggacatgggtacccagggcagccatacgggtcccagaccccgcagcggtacccgatgaccatgcagggccgggcgcagagtgccatgggcggcctctcttatacacagcagattcctccttatggacaacaaggccccagcgggtatggtcaacagggccagactccatattacaaccagcaaagtcctcaccctcagcagcagcagccaccctactcccagcaaccaccgtcccagacccctcatgcccaaccttcgtatcagcagcagccacagtctcaaccaccacagctccagtcctctcagcctccatactcccagcagccatcccagcctccacatcagcagtccccggctccatacccctcccagcagtcgacgacacagcagcacccccagagccagcccccctactcacagccacaggctcagtctccttaccagcagcagcaacctcagcagccagcaccctcgacgctctcccagcaggctgcgtatcctcagccccagtctcagcagtcccagcaaactgcctattcccagcagcgcttccctccaccgcaggagctatctcaagattcatttgggtctcaggcatcctcagccccctcaatgacctccagtaagggagggcaagaagatatgaacctgagccttcagtcaagaccctccagcttgcctgatctatctggttcaatagatgacctccccatggggacagaaggagctctgagtcctggagtgagcacatcagggatttccagcagccaaggagagcagagtaatccagctcagtctcctttctctcctcatacctcccctcacctgcctggcatccgaggcccttccccgtcccctgttggctctcccgccagtgttgctcagtctcgctcaggaccactctcgcctgctgcagtgccaggcaaccagatgccacctcggccacccagtggccagtcggacagcatcatgcatccttccatgaaccaatcaagcattgcccaagatcgaggttatatgcagaggaacccccagatgccccagtacagttccccccagcccggctcagccttatctccgcgtcagccttccggaggacagatacacacaggcatgggctcctaccagcagaactccatggggagctatggtccccaggggggtcagtatggcccacaaggtggctaccccaggcagccaaactataatgccttgcccaatgccaactaccccagtgcaggcatggctggaggcataaaccccatgggtgccggaggtcaaatgcatggacagcctggcatcccaccttatggcacactccctccagggaggatgagtcacgcctccatgggcaaccggccttatggccctaacatggccaatatgccacctcaggttgggtcagggatgtgtccccaccagggggcatgaaccggaaaacccaagaaactgctgtcgccatgcatgttgctgccaactctatccaaaacaggccgccaggctaccccaatatgaatcaagggggcatgatgggaactggacctccttatggacaagggattaatagtatggctggcatgatcaaccctcagggacccccatattccatgggtggaaccatggccaacaattctgcagggatggcagccagcccagagatgatgggccttggggatgtaaagttaactccagccaccaaaatgaacaacaaggcagatgggacacccaagacagaatccaaatccaagaaatccagttcttctactacaaccaatgagaagatcaccaagttgtatgagctgggtggtgagcctgagaggaagatgtgggtggaccgttatctggccttcactgaggagaaggccatgggcatgacaaatctgcctgctgtgggtaggaaacctctggacctctatcgcctctatgtgtctgtgaaggagattggtggattgactcaggtcaacaagaacaaaaaatggcgggaacttgcaaccaacctcaatgtgggcacatcaagcagtgctgccagctccttgaaaaagcagtatatccagtgtctctatgcctttgaatgcaagattgaacggggagaagaccctcccccagacatctttgcagctgctgattccaagaagtcccagcccaagatccagcctccctctcctgcgggatcaggatctatgcaggggccccagactccccagtcaaccagcagttccatggcagaaggaggagacttaaagccaccaactccagcatccacaccacacagtcagatccccccattgccaggcatgagcaggagcaattcagttgggatccaggatgcctttaatgatggaagtgactccacattccagaagcggaattccatgactccaaaccctgggtatcagcccagtatgaatacctctgacatgatggggcgcatgtcctatgagccaaataaggatccttatggcagcatgaggaaagctccagggagtgatcccttcatgtcctcagggcagggccccaacggcgggatgggtgacccctacagtcgtgctgccggccctgggctaggaaatgtggcgatgggaccacgacagcactatccctatggaggtccttatgacagagtgaggacggagcctggaatagggcctgagggaaacatgagcactggggccccacagccgaatctcatgccttccaacccagactcggggatgtattctcctagccgctaccccccgcagcagcagcagcagcagcagcaacgacatgattcctatggcaatcagttctccacccaaggcaccccttctggcagccccttccccagccagcagactacaatgtatcaacagcaacagcagaattacaagcggccaatggatggcacatatggccctcctgccaagcggcacgaaggggagatgtacagcgtgccatacagcactgggcaggggcagcctcagcagcagcagttgcccccagcccagccccagcctgccagccagcaacaagctgcccagccttcccctcagcaagatgtatacaaccagtatggcaatgcctatcctgccactgccacagctgctactgagcgccgaccagcaggcggcccccagaaccaatttccattccagtttggccgagaccgtgtctctgcaccccctggcaccaatgcccagcaaaacatgccaccacaaatgatgggcggccccatacaggcatcagctgaggttgctcagcaaggcaccatgtggcaggggcgtaatgacatgacctataattatgccaacaggcagagcacgggctctgccccccagggccccgcctatcatggcgtgaaccgaacagatgaaatgctgcacacagatcagagggccaaccacgaaggctcgtggccttcccatggcacacgccagcccccatatggtccctctgcccctgtgccccccatgacaaggccccctccatctaactaccagcccccaccaagcatgcagaatcacattcctcaggtatccagccctgctcccctgccccggccaatggagaaccgcacctctcctagcaagtctccattcctgcactctgggatgaaaatgcagaaggcaggtcccccagtacctgcctcgcacatagcacctgcccctgtgcagccccccatgattcggcgggatatcaccttcccacctggctctgttgaagccacacagcctgtgttgaagcagaggaggcggctcacaatgaaagacattggaaccccggaggcatggcgggtaatgatgtccctcaagtctggtctcctggcagagagcacatgggcattagataccatcaacatcctgctgtatgatgacaacagcatcatgaccttcaacctcagtcagctcccagggttgctagagctccttgtagaatatttccgacgatgcctgattgagatctttggcattttaaaggagtatgaggtgggtgacccaggacagagaacgctactggatcctgggaggttcagcaaggtgtctagtccagctcccatggagggtggggaagaagaagaagaacttctaggtcctaaactagaagaggaagaagaagaggaagtagttgaaaatgatgaggagatagccttttcaggcaaggacaagccagcttcagagaatagtgaggagaagctgatcagtaagtttgacaagcttccagtaaagatcgtacagaagaatgatccatttgtggtggactgctcagataagcttgggcgtgtgcaggagtttgacagtggcctgctgcactggcggattggtgggggggacaccactgagcatatccagacccacttcgagagcaagacagagctgctgccttcccggcctcacgcaccctgcccaccagcccctcggaagcatgtgacaacagcagagggtacaccagggacaacagaccaggaggggcccccacctgatggacctccagaaaaacggatcacagccactatggatgacatgttgtctactcggtctagcaccttgaccgaggatggagctaagagttcagaggccatcaaggagagcagcaagtttccatttggcattagcccagcacagagccaccggaacatcaagatcctagaggacgaaccccacagtaaggatgagaccccactgtgtacccttctggactggcaggattctcttgccaagcgctgcgtctgtgtgtccaataccattcgaagcctgtcatttgtgccaggcaatgactttgagatgtccaaacacccagggctgctgctcatcctgggcaagctgatcctgctgcaccacaagcacccagaacggaagcaggcaccactaacttatgaaaaggaggaggaacaggaccaaggggtgagctgcaacaaagtggagtggtggtgggactgcttggagatgctccgggaaaacaccttggttacactcgccaacatctcggggcagttggacctatctccataccccgagagcatttgcctgcctgtcctggacggactcctacactgggcagtttgcccttcagctgaagcccaggaccccttttccaccctgggccccaatgccgtcctttccccgcagagactggtcttggaaaccctcagcaaactcagcatccaggacaacaatgtggacctgattctggccacaccccccttcagccgcctggagaagttgtatagcactatggtgcgcttcctcagtgaccgaaagaacccggtgtgccgggagatggctgtggtactgctggccaacctggctcagggggacagcctggcagctcgtgccattgcagtgcagaagggcagtatcggcaacctcctgggcttcctagaggacagccttgccgccacacagttccagcagagccaggccagcctcctccacatgcagaacccaccctttgagccaactagtgtggacatgatgcggcgggctgcccgcgcgctgcttgccttggccaaggtggacgagaaccactcagagtttactctgtacgaatcacggctgttggacatctcggtatcaccgttgatgaactcattggtttcacaagtcatttgtgatgtactgtttttgattggccagtcatgacagccgtgggacacctcccccccccgtgtgtgtgtgcgtgtgtggagaacttagaaactgactgttgccctttatttatgcaaaaccacctcagaatccagtttaccctgtgctgtccagcttctcccttgggaaaaagtctctcctgtttctctctcctccttccacctcccctccctccatcacctcacgcctttctgttccttgtcctcaccttactcccctcaggaccctaccccaccctctttgaaaagacaaagctctgcctacatagaagactttttttattttaaccaaagttactgttgtttacagtgagtttggggaaaaaaaataaaataaaaatggctttcccagtccttgcatcaacgggatgccacatttcataactgtttttaatggtaaaaaaaaaaaaaaaaaatacaaaaaaaaattctgaaggacaaaaaaggtgactgctgaactgtgtgtggtttattgttgtacattcacaatcttgcaggagccaagaagttcgcagttgtgaacagaccctgttcactggagaggcctgtgcagtagagtgtagaccctttcatgtactgtactgtacacctgatactgtaaacatactgtaataataatgtctcacatggaaacagaaaacgctgggtcagcagcaagctgtagtttttaaaaatgtttttagttaaacgttgaggagaaaaaaaaaaaaggcttttcccccaaagtatcatgtgtgaacctacaacaccctgacctctttctctcctccttgattgtatgaataaccctgagatcacctcttagaactggttttaacctttagctgcagcggctacgctgccacgtgtgtatatatatgacgttgtacattgcacatacccttggatccccacagtttggtcctcctcccagctacccctttatagtatgacgagttaacaagttggtgacctgcacaaagcgagacacagctatttaatctcttgccagatatcgcccctcttggtgcgatgctgtacaggtctctgtaaaaagtccttgctgtctcagcagccaatcaacttatagtttatttttttctgggtttttgttttgttttgttttctttctaatcgaggtgtgaaaaagttctaggttcagttgaagttctgatgaagaaacacaattgagattttttcagtgataaaatctgcatatttgtatttcaacaatgtagctaaaacttgatgtaaattcctcctttttttccttttttggcttaatgaatatcatttattcagtatgaaatctttatactatatgttccacgtgttaagaataaatgtacattaaatgggtggaggcaggaggatcacctgaggtcaggaatttgagaacagcctgggccaacacagtaaaactccatcttccaccaaaaaattacaaaatttggcccangggcatgggtggggcaccatgccctgtaaaatccccngcttacttcagggg

SEQ ID NO: 303610 - DNA, 8525 bp, Homo sapiens
  misc_feature (488)..(488): n is a, c, g, or t
  misc_feature (501)..(501): n is a, c, g, or t
  misc_feature (579)..(579): n is a, c, g, or t
  misc_feature (599)..(599): n is a, c, g, or t
gaattccgaaagcggagagtcacagcggggccaggccctggggagcggagcctccaccgcccccctcattcccaggcaagggcttggggggaatgagccgggagagccgggtcccgagcctacagagccgggagcagctgagccgccggcgcctcggccgccgccgcctcctcctcctcctccgccgccgccagcccggagcctgagccggcggggcgggggggagaggagcgagcgcagcgcagcagcggagccccgcgaggcccgcccgggcgggtggggagggcagcccgggggactgggccccggggcggggtgggagggggggagaagacgaagacagggccgggtctctccgcggacgagacagcggggatcatggccgcgcaggtcgcccccgccgccgccagcagcctgggcaacccgccgccgccgccgccctcggagctgaagaaagccgagcagcagcagcgggaggaggcgggggncgaggcggcggcngcggcagcggccgagcgcggggaaatgaaggcagccgccgggcaggaaagcgagggccccgccgtggggccgccgcanccgctgggaaaggagctgcnggacggggccgagagcaatgggggtggcggcggcggcggagccggcagcggcggcgggcccggcgcggagccggacctgaagaactcgaacgggaacgcgggccctaggcccgccctgaacaataacctcacggagccgcccggcggcggcggtggcggcagcagcgatggggtgggggcgcctcctcactcagccgcggccgccttgccgcccccagcctacggcttcgggcaaccctacggccggagcccgtctgccgtcgccgccgccgcggccgccgtcttccaccaacaacatggcggacaacaaagccctggcctggcagcgctgcagagcggcggcggcgggggcctggagccctacgcggggccccagcagaactctcacgaccacggcttccccaaccaccagtacaactcctactaccccaaccgcagcgcctaccccccgcccgccccggcctacgcgctgagctccccgagaggtggcactccgggctccggcgcggcggcggctgccggctccaagccgcctccctcctccagcgcctccgcctcctcgtcgtcttcgtccttcgctcagcagcgcttcggggccatggggggaggcggcccctccgcggccggcgggggaactccccagcccaccgccacccccaccctcaaccaactgctcacgtcgcccagctcggcccggggctaccagggctaccccgggggcgactacagtggcgggccccaggacgggggcgccggcaagggcccggcggacatggcctcgcagtgttggggggctgcggcggcggcagctgcggcggcggccgcctcgggaggggcccaacaaaggagccaccacgcgcccatgagccccgggagcagcggcggcggggggcagccgctcgcccggacccctcagccatccagtccaatggatcagatgggcaagatgagacctcagccatatggcgggactaacccatactcgcagcaacagggacctccgtcaggaccgcagcaaggacatgggtacccagggcagccatacgggtcccagaccccgcagcggtacccgatgaccatgcagggccgggcgcagagtgccatgggcggcctctcttatacacagcagattcctccttatggacaacaaggccccagcgggtatggtcaacagggccagactccatattacaaccagcaaagtcctcaccctcagcagcagcagccaccctactcccagcaaccaccgtcccagacccctcatgcccaaccttcgtatcagcagcagccacagtctcaaccaccacagctccagtcctctcagcctccatactcccagcagccatcccagcctccacatcagcagtccccggctccatacccctcccagcagtcgacgacacagcagcacccccagagccagcccccctactcacagccacaggctcagtctccttaccagcagcagcaacctcagcagccagcaccctcgacgctctcccagcaggctgcgtatcctcagccccagtctcagcagtcccagcaaactgcctattcccagcagcgcttccctccaccgcaggagctatctcaagattcatttgggtctcaggcatcctcagccccctcaatgacctccagtaagggagggcaagaagatatgaacctgagccttcagtcaagaccctccagcttgcctgatctatctggttcaatagatgacctccccatggggacagaaggagctctgagtcctggagtgagcacatcagggatttccagcagccaaggagagcagagtaatccagctcagtctcctttctctcctcatacctcccctcacctgcctggcatccgaggcccttccccgtcccctgttggctctcccgccagtgttgctcagtctcgctcaggaccactctcgcctgctgcagtgccaggcaaccagatgccacctcggccacccagtggccagtcggacagcatcatgcatccttccatgaaccaatcaagcattgcccaagatcgaggttatatgcagaggaacccccagatgccccagtacagttccccccagcccggctcagccttatctccgcgtcagccttccggaggacagatacacacaggcatgggctcctaccagcagaactccatggggagctatggtccccaggggggtcagtatggcccacaaggtggctaccccaggcagccaaactataatgccttgcccaatgccaactaccccagtgcaggcatggctggaggcataaaccccatgggtgccggaggtcaaatgcatggacagcctggcatcccaccttatggcacactccctccagggaggatgagtcacgcctccatgggcaaccggccttatggccctaacatggccaatatgccacctcaggttgggtcagggatgtgtccccaccagggggcatgaaccggaaaacccaagaaactgctgtcgccatgcatgttgctgccaactctatccaaaacaggccgccaggctaccccaatatgaatcaagggggcatgatgggaactggacctccttatggacaagggattaatagtatggctggcatgatcaaccctcagggacccccatattccatgggtggaaccatggccaacaattctgcagggatggcagccagcccagagatgatgggccttggggatgtaaagttaactccagccaccaaaatgaacaacaaggcagatgggacacccaagacagaatccaaatccaagaaatccagttcttctactacaaccaatgagaagatcaccaagttgtatgagctgggtggtgagcctgagaggaagatgtgggtggaccgttatctggccttcactgaggagaaggccatgggcatgacaaatctgcctgctgtgggtaggaaacctctggacctctatcgcctctatgtgtctgtgaaggagattggtggattgactcaggtcaacaagaacaaaaaatggcgggaacttgcaaccaacctcaatgtgggcacatcaagcagtgctgccagctccttgaaaaagcagtatatccagtgtctctatgcctttgaatgcaagattgaacggggagaagaccctcccccagacatctttgcagctgctgattccaagaagtcccagcccaagatccagcctccctctcctgcgggatcaggatctatgcaggggccccagactccccagtcaaccagcagttccatggcagaaggaggagacttaaagccaccaactccagcatccacaccacacagtcagatccccccattgccaggcatgagcaggagcaattcagttgggatccaggatgcctttaatgatggaagtgactccacattccagaagcggaattccatgactccaaaccctgggtatcagcccagtatgaatacctctgacatgatggggcgcatgtcctatgagccaaataaggatccttatggcagcatgaggaaagctccagggagtgatcccttcatgtcctcagggcagggccccaacggcgggatgggtgacccctacagtcgtgctgccggccctgggctaggaaatgtggcgatgggaccacgacagcactatccctatggaggtccttatgacagagtgaggacggagcctggaatagggcctgagggaaacatgagcactggggccccacagccgaatctcatgccttccaacccagactcggggatgtattctcctagccgctaccccccgcagcagcagcagcagcagcagcaacgacatgattcctatggcaatcagttctccacccaaggcaccccttctggcagccccttccccagccagcagactacaatgtatcaacagcaacagcagaattacaagcggccaatggatggcacatatggccctcctgccaagcggcacgaaggggagatgtacagcgtgccatacagcactgggcaggggcagcctcagcagcagcagttgcccccagcccagccccagcctgccagccagcaacaagctgcccagccttcccctcagcaagatgtatacaaccagtatggcaatgcctatcctgccactgccacagctgctactgagcgccgaccagcaggcggcccccagaaccaatttccattccagtttggccgagaccgtgtctctgcaccccctggcaccaatgcccagcaaaacatgccaccacaaatgatgggcggccccatacaggcatcagctgaggttgctcagcaaggcaccatgtggcaggggcgtaatgacatgacctataattatgccaacaggcagagcacgggctctgccccccagggccccgcctatcatggcgtgaaccgaacagatgaaatgctgcacacagatcagagggccaaccacgaaggctcgtggccttcccatggcacacgccagcccccatatggtccctctgcccctgtgccccccatgacaaggccccctccatctaactaccagcccccaccaagcatgcagaatcacattcctcaggtatccagccctgctcccctgccccggccaatggagaaccgcacctctcctagcaagtctccattcctgcactctgggatgaaaatgcagaaggcaggtcccccagtacctgcctcgcacatagcacctgcccctgtgcagccccccatgattcggcgggatatcaccttcccacctggctctgttgaagccacacagcctgtgttgaagcagaggaggcggctcacaatgaaagacattggaaccccggaggcatggcgggtaatgatgtccctcaagtctggtctcctggcagagagcacatgggcattagataccatcaacatcctgctgtatgatgacaacagcatcatgaccttcaacctcagtcagctcccagggttgctagagctccttgtagaatatttccgacgatgcctgattgagatctttggcattttaaaggagtatgaggtgggtgacccaggacagagaacgctactggatcctgggaggttcagcaaggtgtctagtccagctcccatggagggtggggaagaagaagaagaacttctaggtcctaaactagaagaggaagaagaagaggaagtagttgaaaatgatgaggagatagccttttcaggcaaggacaagccagcttcagagaatagtgaggagaagctgatcagtaagtttgacaagcttccagtaaagatcgtacagaagaatgatccatttgtggtggactgctcagataagcttgggcgtgtgcaggagtttgacagtggcctgctgcactggcggattggtgggggggacaccactgagcatatccagacccacttcgagagcaagacagagctgctgccttcccggcctcacgcaccctgcccaccagcccctcggaagcatgtgacaacagcagagggtacaccagggacaacagaccaggaggggcccccacctgatggacctccagaaaaacggatcacagccactatggatgacatgttgtctactcggtctagcaccttgaccgaggatggagctaagagttcagaggccatcaaggagagcagcaagtttccatttggcattagcccagcacagagccaccggaacatcaagatcctagaggacgaaccccacagtaaggatgagaccccactgtgtacccttctggactggcaggattctcttgccaagcgctgcgtctgtgtgtccaataccattcgaagcctgtcatttgtgccaggcaatgactttgagatgtccaaacacccagggctgctgctcatcctgggcaagctgatcctgctgcaccacaagcacccagaacggaagcaggcaccactaacttatgaaaaggaggaggaacaggaccaaggggtgagctgcaacaaagtggagtggtggtgggactgcttggagatgctccgggaaaacaccttggttacactcgccaacatctcggggcagttggacctatctccataccccgagagcatttgcctgcctgtcctggacggactcctacactgggcagtttgcccttcagctgaagcccaggaccccttttccaccctgggccccaatgccgtcctttccccgcagagactggtcttggaaaccctcagcaaactcagcatccaggacaacaatgtggacctgattctggccacaccccccttcagccgcctggagaagttgtatagcactatggtgcgcttcctcagtgaccgaaagaacccggtgtgccgggagatggctgtggtactgctggccaacctggctcagggggacagcctggcagctcgtgccattgcagtgcagaagggcagtatcggcaacctcctgggcttcctagaggacagccttgccgccacacagttccagcagagccaggccagcctcctccacatgcagaacccaccctttgagccaactagtgtggacatgatgcggcgggctgcccgcgcgctgcttgccttggccaaggtggacgagaaccactcagagtttactctgtacgaatcacggctgttggacatctcggtatcaccgttgatgaactcattggtttcacaagtcatttgtgatgtactgtttttgattggccagtcatgacagccgtgggacacctcccccccccgtgtgtgtgtgcgtgtgtggagaacttagaaactgactgttgccctttatttatgcaaaaccacctcagaatccagtttaccctgtgctgtccagcttctcccttgggaaaaagtctctcctgtttctctctcctccttccacctcccctccctccatcacctcacgcctttctgttccttgtcctcaccttactcccctcaggaccctaccccaccctctttgaaaagacaaagctctgcctacatagaagactttttttattttaaccaaagttactgttgtttacagtgagtttggggaaaaaaaataaaataaaaatggctttcccagtccttgcatcaacgggatgccacatttcataactgtttttaatggtaaaaaaaaaaaaaaaaaatacaaaaaaaaattctgaaggacaaaaaaggtgactgctgaactgtgtgtggtttattgttgtacattcacaatcttgcaggagccaagaagttcgcagttgtgaacagaccctgttcactggagaggcctgtgcagtagagtgtagaccctttcatgtactgtactgtacacctgatactgtaaacatactgtaataataatgtctcacatggaaacagaaaacgctgggtcagcagcaagctgtagtttttaaaaatgtttttagttaaacgttgaggagaaaaaaaaaaaaggcttttcccccaaagtatcatgtgtgaacctacaacaccctgacctctttctctcctccttgattgtatgaataaccctgagatcacctcttagaactggttttaacctttagctgcagcggctacgctgccacgtgtgtatatattatgacgagttaacaagttggtgacctgcacaaagcgagacacagctatttaatctcttgccagatatcgcccctcttggtgcgatgctgtacaggtctctgtaaaaagtccttgctgtctcagcagccaatcaacttatagtttatttttttctgggtttttgttttgttttgttttctttctaatcgaggtgtgaaaaagttctaggttcagttgaagttctgatgaagaaacacaattgagattttttcagtgataaaatctgcatatttgtatttcaacaatgtagctaaaacttgatgtaaattcctcctttttttccttttttggcttaatgaatatcatttattcagtatgaaatctttatactatatgttccacgtgttaagaataaatgtacattaaatcttggtaaaaaaaaagtgaa

SEQ ID NO: 303611 - DNA, 6541 bp, Homo sapiens
tcagtgtcctggttggtcttgaagatgatcgggtcatctgtgttgagcgagtagttagcctggtcatttttgagcttgcagaagagggaggaggagtgaatcagcctcaacagtccatctgacccatcttaagatgggcaagatgagacctcagccatatggcgggactaacccatactcgcagcaacagggacctccgtcaggaccgcagcaaggacatgggtacccagggcagccatacgggtcccagaccccgcagcggtacccgatgaccatgcagggccgggcgcagagtgccatgggcggcctctcttatacacagcagattcctccttatggacaacaaggccccagcgggtatggtcaacagggccagactccatattacaaccagcaaagtcctcaccctcagcagcagcagccaccctactcccagcaaccaccgtcccagacccctcatgcccaaccttcgtatcagcagcagccacagtctcaaccaccacagctccagtcctctcagcctccatactcccagcagccatcccagcctccacatcagcagtccccggctccatacccctcccagcagtcgacgacacagcagcacccccagagccagcccccctactcacagccacaggctcagtctccttaccagcagcagcaacctcagcagccagcaccctcgacgctctcccagcaggctgcgtatcctcagccccagtctcagcagtcccagcaaactgcctattcccagcagcgcttccctccaccgcaggagctatctcaagattcatttgggtctcaggcatcctcagccccctcaatgacctccagtaagggagggcaagaagatatgaacctgagccttcagtcaagaccctccagcttgcctgatctatctggttcaatagatgacctccccatggggacagaaggagctctgagtcctggagtgagcacatcagggatttccagcagccaaggagagcagagtaatccagctcagtctcctttctctcctcatacctcccctcacctgcctggcatccgaggcccttccccgtcccctgttggctctcccgccagtgttgctcagtctcgctcaggaccactctcgcctgctgcagtgccaggcaaccagatgccacctcggccacccagtggccagtcggacagcatcatgcatccttccatgaaccaatcaagcattgcccaagatcgaggttatatgcagaggaacccccagatgccccagtacagttccccccagcccggctcagccttatctccgcgtcagccttccggaggacagatacacacaggcatgggctcctaccagcagaactccatggggagctatggtccccaggggggtcagtatggcccacaaggtggctaccccaggcagccaaactataatgccttgcccaatgccaactaccccagtgcaggcatggctggaggcataaaccccatgggtgccggaggtcaaatgcatggacagcctggcatcccaccttatggcacactccctccagggaggatgagtcacgcctccatgggcaaccggccttatggccctaacatggccaatatgccacctcaggttgggtcagggatgtgtccccaccagggggcatgaaccggaaaacccaagaaactgctgtcgccatgcatgttgctgccaactctatccaaaacaggccgccaggctaccccaatatgaatcaagggggcatgatgggaactggacctccttatggacaagggattaatagtatggctggcatgatcaaccctcagggacccccatattccatgggtggaaccatggccaacaattctgcagggatggcagccagcccagagatgatgggccttggggatgtaaagttaactccagccaccaaaatgaacaacaaggcagatgggacacccaagacagaatccaaatccaagaaatccagttcttctactacaaccaatgagaagatcaccaagttgtatgagctgggtggtgagcctgagaggaagatgtgggtggaccgttatctggccttcactgaggagaaggccatgggcatgacaaatctgcctgctgtgggtaggaaacctctggacctctatcgcctctatgtgtctgtgaaggagattggtggattgactcaggtcaacaagaacaaaaaatggcgggaacttgcaaccaacctcaatgtgggcacatcaagcagtgctgccagctccttgaaaaagcagtatatccagtgtctctatgcctttgaatgcaagattgaacggggagaagaccctcccccagacatctttgcagctgctgattccaagaagtcccagcccaagatccagcctccctctcctgcgggatcaggatctatgcaggggccccagactccccagtcaaccagcagttccatggcagaaggaggagacttaaagccaccaactccagcatccacaccacacagtcagatccccccattgccaggcatgagcaggagcaattcagttgggatccaggatgcctttaatgatggaagtgactccacattccagaagcggaattccatgactccaaaccctgggtatcagcccagtatgaatacctctgacatgatggggcgcatgtcctatgagccaaataaggatccttatggcagcatgaggaaagctccagggagtgatcccttcatgtcctcagggcagggccccaacggcgggatgggtgacccctacagtcgtgctgccggccctgggctaggaaatgtggcgatgggaccacgacagcactatccctatggaggtccttatgacagagtgaggacggagcctggaatagggcctgagggaaacatgagcactggggccccacagccgaatctcatgccttccaacccagactcggggatgtattctcctagccgctaccccccgcagcagcagcagcagcagcagcaacgacatgattcctatggcaatcagttctccacccaaggcaccccttctggcagccccttccccagccagcagactacaatgtatcaacagcaacagcaggtatccagccctgctcccctgccccggccaatggagaaccgcacctctcctagcaagtctccattcctgcactctgggatgaaaatgcagaaggcaggtcccccagtacctgcctcgcacatagcacctgcccctgtgcagccccccatgattcggcgggatatcaccttcccacctggctctgttgaagccacacagcctgtgttgaagcagaggaggcggctcacaatgaaagacattggaaccccggaggcatggcgggtaatgatgtccctcaagtctggtctcctggcagagagcacatgggcattagataccatcaacatcctgctgtatgatgacaacagcatcatgaccttcaacctcagtcagctcccagggttgctagagctccttgtagaatatttccgacgatgcctgattgagatctttggcattttaaaggagtatgaggtgggtgacccaggacagagaacgctactggatcctgggaggttcagcaaggtgtctagtccagctcccatggagggtggggaagaagaagaagaacttctaggtcctaaactagaagaggaagaagaagaggaagtagttgaaaatgatgaggagatagccttttcaggcaaggacaagccagcttcagagaatagtgaggagaagctgatcagtaagtttgacaagcttccagtaaagatcgtacagaagaatgatccatttgtggtggactgctcagataagcttgggcgtgtgcaggagtttgacagtggcctgctgcactggcggattggtgggggggacaccactgagcatatccagacccacttcgagagcaagacagagctgctgccttcccggcctcacgcaccctgcccaccagcccctcggaagcatgtgacaacagcagagggtacaccagggacaacagaccaggaggggcccccacctgatggacctccagaaaaacggatcacagccactatggatgacatgttgtctactcggtctagcaccttgaccgaggatggagctaagagttcagaggccatcaaggagagcagcaagtttccatttggcattagcccagcacagagccaccggaacatcaagatcctagaggacgaaccccacagtaaggatgagaccccactgtgtacccttctggactggcaggattctcttgccaagcgctgcgtctgtgtgtccaataccattcgaagcctgtcatttgtgccaggcaatgactttgagatgtccaaacacccagggctgctgctcatcctgggcaagctgatcctgctgcaccacaagcacccagaacggaagcaggcaccactaacttatgaaaaggaggaggaacaggaccaaggggtgagctgcaacaaagtggagtggtggtgggactgcttggagatgctccgggaaaacaccttggttacactcgccaacatctcggggcagttggacctatctccataccccgagagcatttgcctgcctgtcctggacggactcctacactgggcagtttgcccttcagctgaagcccaggaccccttttccaccctgggccccaatgccgtcctttccccgcagagactggtcttggaaaccctcagcaaactcagcatccaggacaacaatgtggacctgattctggccacaccccccttcagccgcctggagaagttgtatagcactatggtgcgcttcctcagtgaccgaaagaacccggtgtgccgggagatggctgtggtactgctggccaacctggctcagggggacagcctggcagctcgtgccattgcagtgcagaagggcagtatcggcaacctcctgggcttcctagaggacagccttgccgccacacagttccagcagagccaggccagcctcctccacatgcagaacccaccctttgagccaactagtgtggacatgatgcggcgggctgcccgcgcgctgcttgccttggccaaggtggacgagaaccactcagagtttactctgtacgaatcacggctgttggacatctcggtatcaccgttgatgaactcattggtttcacaagtcatttgtgatgtactgtttttgattggccagtcatgacagccgtgggacacctcccccccccgtgtgtgtgtgcgtgtgtggagaacttagaaactgactgttgccctttatttatgcaaaaccacctcagaatccagtttaccctgtgctgtccagcttctcccttgggaaaaagtctctcctgtttctctctcctccttccacctcccctccctccatcacctcacgcctttctgttccttgtcctcaccttactcccctcaggaccctaccccaccctctttgaaaagacaaagctctgcctacatagaagactttttttattttaaccaaagttactgttgtttacagtgagtttggggaaaaaaaataaaataaaaatggctttcccagtccttgcatcaacgggatgccacatttcataactgtttttaatggtaaaaaaaaaaaaaaaaaatacaaaaaaaaattctgaaggacaaaaaaggtgactgctgaactgtgtgtggtttattgttgtacattcacaatcttgcaggagccaagaagttcgcagttgtgaacagaccctgttcactggagaggcctgtgcagtagagtgtagaccctttcatgtactgtactgtacacctgatactgtaaacatactgtaataataatgtctcacatggaaacagaaaacgctgggtcagcagcaagctgtagtttttaaaaatgtttttagttaaacgttgaggagaaaaaaaaaaaaggcttttcccccaaagtatcatgtgtgaacctacaacaccctgacctctttctctcctccttgattgtatgaataaccctgagatcacctcttagaactggttttaacctttagctgcagcggctacgctgccacgtgtgtatatatatgacgttgtacattgcacatacccttggatccccacagtttggtcctcctcccagctacccctttatagtatgacgagttaacaagttggtgacctgcacaaagcgagacacagctatttaatctcttgccagatatcgcccctcttggtgcgatgctgtacaggtctctgtaaaaagtccttgctgtctcagcagccaatcaacttatagtttatttttttctgggtttttgttttgttttgttttctttctaatcgaggtgtgaaaaagttctaggttcagttgaagttctgatgaagaaacacaattgagattttttcagtgataaaatctgcatatttgtatttcaacaatgtagctaaaacttgatgtaaattcctcctttttttccttttttggcttaatgaatatcatttattcagtatgaaatctttatactatatgttccacgtgttaagaataaatgtacattaaatcttggtaaaaaaaaagtgaa

SEQ ID NO: 303612 - DNA, 7703 bp, Homo sapiens
  misc_feature (488)..(488): n is a, c, g, or t
  misc_feature (501)..(501): n is a, c, g, or t
  misc_feature (579)..(579): n is a, c, g, or t
  misc_feature (599)..(599): n is a, c, g, or t
gaattccgaaagcggagagtcacagcggggccaggccctggggagcggagcctccaccgcccccctcattcccaggcaagggcttggggggaatgagccgggagagccgggtcccgagcctacagagccgggagcagctgagccgccggcgcctcggccgccgccgcctcctcctcctcctccgccgccgccagcccggagcctgagccggcggggcgggggggagaggagcgagcgcagcgcagcagcggagccccgcgaggcccgcccgggcgggtggggagggcagcccgggggactgggccccggggcggggtgggagggggggagaagacgaagacagggccgggtctctccgcggacgagacagcggggatcatggccgcgcaggtcgcccccgccgccgccagcagcctgggcaacccgccgccgccgccgccctcggagctgaagaaagccgagcagcagcagcgggaggaggcgggggncgaggcggcggcngcggcagcggccgagcgcggggaaatgaaggcagccgccgggcaggaaagcgagggccccgccgtggggccgccgcanccgctgggaaaggagctgcnggacggggccgagagcaatgggggtggcggcggcggcggagccggcagcggcggcgggcccggcgcggagccggacctgaagaactcgaacgggaacgcgggccctaggcccgccctgaacaataacctcacggagccgcccggcggcggcggtggcggcagcagcgatggggtgggggcgcctcctcactcagccgcggccgccttgccgcccccagcctacggcttcgggcaaccctacggccggagcccgtctgccgtcgccgccgccgcggccgccgtcttccaccaacaacatggcggacaacaaagccctggcctggcagcgctgcagagcggcggcggcgggggcctggagccctacgcggggccccagcagaactctcacgaccacggcttccccaaccaccagtacaactcctactaccccaaccgcagcgcctaccccccgcccgccccggcctacgcgctgagctccccgagaggtggcactccgggctccggcgcggcggcggctgccggctccaagccgcctccctcctccagcgcctccgcctcctcgtcgtcttcgtccttcgctcagcagcgcttcggggccatggggggaggcggcccctccgcggccggcgggggaactccccagcccaccgccacccccaccctcaaccaactgctcacgtcgcccagctcggcccggggctaccagggctaccccgggggcgactacagtggcgggccccaggacgggggcgccggcaagggcccggcggacatggcctcgcagtgttggggggctgcggcggcggcagctgcggcggcggccgcctcgggaggggcccaacaaaggagccaccacgcgcccatgagccccgggagcagcggcggcggggggcagccgctcgcccggacccctcagccatccagtccaatggatcagatgggcaagatgagacctcagccatatggcgggactaacccatactcgcagcaacagggacctccgtcaggaccgcagcaaggacatgggtacccagggcagccatacgggtcccagaccccgcagcggtacccgatgaccatgcagggccgggcgcagagtgccatgggcggcctctcttatacacagcagattcctccttatggacaacaaggccccagcgggtatggtcaacagggccagactccatattacaaccagcaaagtcctcaccctcagcagcagcagccaccctactcccagcaaccaccgtcccagacccctcatgcccaaccttcgtatcagcagcagccacagtctcaaccaccacagctccagtcctctcagcctccatactcccagcagccatcccagcctccacatcagcagtccccggctccatacccctcccagcagtcgacgacacagcagcacccccagagccagcccccctactcacagccacaggctcagtctccttaccagcagcagcaacctcagcagccagcaccctcgacgctctcccagcaggctgcgtatcctcagccccagtctcagcagtcccagcaaactgcctattcccagcagcgcttccctccaccgcaggagctatctcaagattcatttgggtctcaggcatcctcagccccctcaatgacctccagtaagggagggcaagaagatatgaacctgagccttcagtcaagaccctccagcttgcctgatctatctggttcaatagatgacctccccatggggacagaaggagctctgagtcctggagtgagcacatcagggatttccagcagccaaggagagcagagtaatccagctcagtctcctttctctcctcatacctcccctcacctgcctggcatccgaggcccttccccgtcccctgttggctctcccgccagtgttgctcagtctcgctcaggaccactctcgcctgctgcagtgccaggcaaccagatgccacctcggccacccagtggccagtcggacagcatcatgcatccttccatgaaccaatcaagcattgcccaagatcgaggttatatgcagaggaacccccagatgccccagtacagttccccccagcccggctcagccttatctccgcgtcagccttccggaggacagatacacacaggcatgggctcctaccagcagaactccatggggagctatggtccccaggggggtcagtatggcccacaaggtggctaccccaggcagccaaactataatgccttgcccaatgccaactaccccagtgcaggcatggctggaggcataaaccccatgggtgccggaggtcaaatgcatggacagcctggcatcccaccttatggcacactccctccagggaggatgagtcacgcctccatgggcaaccggccttatggccctaacatggccaatatgccacctcaggttgggtcagggatgtgtccccaccagggggcatgaaccggaaaacccaagaaactgctgtcgccatgcatgttgctgccaactctatccaaaacaggccgccaggctaccccaatatgaatcaagggggcatgatgggaactggacctccttatggacaagggattaatagtatggctggcatgatcaaccctcagggacccccatattccatgggtggaaccatggccaacaattctgcagggatggcagccagcccagagatgatgggccttggggatgtaaagttaactccagccaccaaaatgaacaacaaggcagatgggacacccaagacagaatccaaatccaagaaatccagttcttctactacaaccaatgagaagatcaccaagttgtatgagctgggtggtgagcctgagaggaagatgtgggtggaccgttatctggccttcactgaggagaaggccatgggcatgacaaatctgcctgctgtgggtaggaaacctctggacctctatcgcctctatgtgtctgtgaaggagattggtggattgactcaggtcaacaagaacaaaaaatggcgggaacttgcaaccaacctcaatgtgggcacatcaagcagtgctgccagctccttgaaaaagcagtatatccagtgtctctatgcctttgaatgcaagattgaacggggagaagaccctcccccagacatctttgcagctgctgattccaagaagtcccagcccaagatccagcctccctctcctgcgggatcaggatctatgcaggggccccagactccccagtcaaccagcagttccatggcagaaggaggagacttaaagccaccaactccagcatccacaccacacagtcagatccccccattgccaggcatgagcaggagcaattcagttgggatccaggatgcctttaatgatggaagtgactccacattccagaagcggaattccatgactccaaaccctgggtatcagcccagtatgaatacctctgacatgatggggcgcatgtcctatgagccaaataaggatccttatggcagcatgaggaaagctccagggagtgatcccttcatgtcctcagggcagggccccaacggcgggatgggtgacccctacagtcgtgctgccggccctgggctaggaaatgtggcgatgggaccacgacagcactatccctatggaggtccttatgacagagtgaggacggagcctggaatagggcctgagggaaacatgagcactggggccccacagccgaatctcatgccttccaacccagactcggggatgtattctcctagccgctaccccccgcagcagcagcagcagcagcagcaacgacatgattcctatggcaatcagttctccacccaaggcaccccttctggcagccccttccccagccagcagactacaatgtatcaacagcaacagcaggaaccccggaggcatggcgggtaatgatgtccctcaagtctggtctcctggcagagagcacatgggcattagataccatcaacatcctgctgtatgatgacaacagcatcatgaccttcaacctcagtcagctcccagggttgctagagctccttgtagaatatttccgacgatgcctgattgagatctttggcattttaaaggagtatgaggtgggtgacccaggacagagaacgctactggatcctgggaggttcagcaaggtgtctagtccagctcccatggagggtggggaagaagaagaagaacttctaggtcctaaactagaagaggaagaagaagaggaagtagttgaaaatgatgaggagatagccttttcaggcaaggacaagccagcttcagagaatagtgaggagaagctgatcagtaagtttgacaagcttccagtaaagatcgtacagaagaatgatccatttgtggtggactgctcagataagcttgggcgtgtgcaggagtttgacagtggcctgctgcactggcggattggtgggggggacaccactgagcatatccagacccacttcgagagcaagacagagctgctgccttcccggcctcacgcaccctgcccaccagcccctcggaagcatgtgacaacagcagagggtacaccagggacaacagaccaggaggggcccccacctgatggacctccagaaaaacggatcacagccactatggatgacatgttgtctactcggtctagcaccttgaccgaggatggagctaagagttcagaggccatcaaggagagcagcaagtttccatttggcattagcccagcacagagccaccggaacatcaagatcctagaggacgaaccccacagtaaggatgagaccccactgtgtacccttctggactggcaggattctcttgccaagcgctgcgtctgtgtgtccaataccattcgaagcctgtcatttgtgccaggcaatgactttgagatgtccaaacacccagggctgctgctcatcctgggcaagctgatcctgctgcaccacaagcacccagaacggaagcaggcaccactaacttatgaaaaggaggaggaacaggaccaaggggtgagctgcaacaaagtggagtggtggtgggactgcttggagatgctccgggaaaacaccttggttacactcgccaacatctcggggcagttggacctatctccataccccgagagcatttgcctgcctgtcctggacggactcctacactgggcagtttgcccttcagctgaagcccaggaccccttttccaccctgggccccaatgccgtcctttccccgcagagactggtcttggaaaccctcagcaaactcagcatccaggacaacaatgtggacctgattctggccacaccccccttcagccgcctggagaagttgtatagcactatggtgcgcttcctcagtgaccgaaagaacccggtgtgccgggagatggctgtggtactgctggccaacctggctcagggggacagcctggcagctcgtgccattgcagtgcagaagggcagtatcggcaacctcctgggcttcctagaggacagccttgccgccacacagttccagcagagccaggccagcctcctccacatgcagaacccaccctttgagccaactagtgtggacatgatgcggcgggctgcccgcgcgctgcttgccttggccaaggtggacgagaaccactcagagtttactctgtacgaatcacggctgttggacatctcggtatcaccgttgatgaactcattggtttcacaagtcatttgtgatgtactgtttttgattggccagtcatgacagccgtgggacacctcccccccccgtgtgtgtgtgcgtgtgtggagaacttagaaactgactgttgccctttatttatgcaaaaccacctcagaatccagtttaccctgtgctgtccagcttctcccttgggaaaaagtctctcctgtttctctctcctccttccacctcccctccctccatcacctcacgcctttctgttccttgtcctcaccttactcccctcaggaccctaccccaccctctttgaaaagacaaagctctgcctacatagaagactttttttattttaaccaaagttactgttgtttacagtgagtttggggaaaaaaaataaaataaaaatggctttcccagtccttgcatcaacgggatgccacatttcataactgtttttaatggtaaaaaaaaaaaaaaaaaatacaaaaaaaaattctgaaggacaaaaaaggtgactgctgaactgtgtgtggtttattgttgtacattcacaatcttgcaggagccaagaagttcgcagttgtgaacagaccctgttcactggagaggcctgtgcagtagagtgtagaccctttcatgtactgtactgtacacctgatactgtaaacatactgtaataataatgtctcacatggaaacagaaaacgctgggtcagcagcaagctgtagtttttaaaaatgtttttagttaaacgttgaggagaaaaaaaaaaaaggcttttcccccaaagtatcatgtgtgaacctacaacaccctgacctctttctctcctccttgattgtatgaataaccctgagatcacctcttagaactggttttaacctttagctgcagcggctacgctgccacgtgtgtatatatatgacgttgtacattgcacatacccttggatccccacagtttggtcctcctcccagctacccctttatagtatgacgagttaacaagttggtgacctgcacaaagcgagacacagctatttaatctcttgccagatatcgcccctcttggtgcgatgctgtacaggtctctgtaaaaagtccttgctgtctcagcagccaatcaacttatagtttatttttttctgggtttttgttttgttttgttttctttctaatcgaggtgtgaaaaagttctaggttcagttgaagttctgatgaagaaacacaattgagattttttcagtgataaaatctgcatatttgtatttcaacaatgtagctaaaacttgatgtaaattcctcctttttttccttttttggcttaatgaatatcatttattcagtatgaaatctttatactatatgttccacgtgttaagaataaatgtacattaaatcttggtaaaaaaaaagtgaa

SEQ ID NO: 303613 - DNA, 8192 bp, Homo sapiens
  misc_feature (488)..(488): n is a, c, g, or t
  misc_feature (501)..(501): n is a, c, g, or t
  misc_feature (579)..(579): n is a, c, g, or t
  misc_feature (599)..(599): n is a, c, g, or t
gaattccgaaagcggagagtcacagcggggccaggccctggggagcggagcctccaccgcccccctcattcccaggcaagggcttggggggaatgagccgggagagccgggtcccgagcctacagagccgggagcagctgagccgccggcgcctcggccgccgccgcctcctcctcctcctccgccgccgccagcccggagcctgagccggcggggcgggggggagaggagcgagcgcagcgcagcagcggagccccgcgaggcccgcccgggcgggtggggagggcagcccgggggactgggccccggggcggggtgggagggggggagaagacgaagacagggccgggtctctccgcggacgagacagcggggatcatggccgcgcaggtcgcccccgccgccgccagcagcctgggcaacccgccgccgccgccgccctcggagctgaagaaagccgagcagcagcagcgggaggaggcgggggncgaggcggcggcngcggcagcggccgagcgcggggaaatgaaggcagccgccgggcaggaaagcgagggccccgccgtggggccgccgcanccgctgggaaaggagctgcnggacggggccgagagcaatgggggtggcggcggcggcggagccggcagcggcggcgggcccggcgcggagccggacctgaagaactcgaacgggaacgcgggccctaggcccgccctgaacaataacctcacggagccgcccggcggcggcggtggcggcagcagcgatggggtgggggcgcctcctcactcagccgcggccgccttgccgcccccagcctacggcttcgggcaaccctacggccggagcccgtctgccgtcgccgccgccgcggccgccgtcttccaccaacaacatggcggacaacaaagccctggcctggcagcgctgcagagcggcggcggcgggggcctggagccctacgcggggccccagcagaactctcacgaccacggcttccccaaccaccagtacaactcctactaccccaaccgcagcgcctaccccccgcccgccccggcctacgcgctgagctccccgagaggtggcactccgggctccggcgcggcggcggctgccggctccaagccgcctccctcctccagcgcctccgcctcctcgtcgtcttcgtccttcgctcagcagcgcttcggggccatggggggaggcggcccctccgcggccggcgggggaactccccagcccaccgccacccccaccctcaaccaactgctcacgtcgcccagctcggcccggggctaccagggctaccccgggggcgactacagtggcgggccccaggacgggggcgccggcaagggcccggcggacatggcctcgcagtgttggggggctgcggcggcggcagctgcggcggcggccgcctcgggaggggcccaacaaaggagccaccacgcgcccatgagccccgggagcagcggcggcggggggcagccgctcgcccggacccctcagccatccagtccaatggatcagatgggcaagatgagacctcagccatatggcgggactaacccatactcgcagcaacagggacctccgtcaggaccgcagcaaggacatgggtacccagggcagccatacgggtcccagaccccgcagcggtacccgatgaccatgcagggccgggcgcagagtgccatgggcggcctctcttatacacagcagattcctccttatggacaacaaggccccagcgggtatggtcaacagggccagactccatattacaaccagcaaagtcctcaccctcagcagcagcagccaccctactcccagcaaccaccgtcccagacccctcatgcccaaccttcgtatcagcagcagccacagtctcaaccaccacagctccagtcctctcagcctccatactcccagcagccatcccagcctccacatcagcagtccccggctccatacccctcccagcagtcgacgacacagcagcacccccagagccagcccccctactcacagccacaggctcagtctccttaccagcagcagcaacctcagcagccagcaccctcgacgctctcccagcaggctgcgtatcctcagccccagtctcagcagtcccagcaaactgcctattcccagcagcgcttccctccaccgcaggagctatctcaagattcatttgggtctcaggcatcctcagccccctcaatgacctccagtaagggagggcaagaagatatgaacctgagccttcagtcaagaccctccagcttgcctgatctatctggttcaatagatgacctccccatggggacagaaggagctctgagtcctggagtgagcacatcagggatttccagcagccaaggagagcagagtaatccagctcagtctcctttctctcctcatacctcccctcacctgcctggcatccgaggcccttccccgtcccctgttggctctcccgccagtgttgctcagtctcgctcaggaccactctcgcctgctgcagtgccaggcaaccagatgccacctcggccacccagtggccagtcggacagcatcatgcatccttccatgaaccaatcaagcattgcccaagatcgaggttatatgcagaggaacccccagatgccccagtacagttccccccagcccggctcagccttatctccgcgtcagccttccggaggacagatacacacaggcatgggctcctaccagcagaactccatggggagctatggtccccaggggggtcagtatggcccacaaggtggctaccccaggcagccaaactataatgccttgcccaatgccaactaccccagtgcaggcatggctggaggcataaaccccatgggtgccggaggtcaaatgcatggacagcctggcatcccaccttatggcacactccctccagggaggatgagtcacgcctccatgggcaaccggccttatggccctaacatggccaatatgccacctcaggttgggtcagggatgtgtccccaccagggggcatgaaccggaaaacccaagaaactgctgtcgccatgcatgttgctgccaactctatccaaaacaggccgccaggctaccccaatatgaatcaagggggcatgatgggaactggacctccttatggacaagggattaatagtatggctggcatgatcaaccctcagggacccccatattccatgggtggaaccatggccaacaattctgcagggatggcagccagcccagagatgatgggccttggggatgtaaagttaactccagccaccaaaatgaacaacaaggcagatgggacacccaagacagaatccaaatccaagaaatccagttcttctactacaaccaatgagaagatcaccaagttgtatgagctgggtggtgagcctgagaggaagatgtgggtggaccgttatctggccttcactgaggagaaggccatgggcatgacaaatctgcctgctgtgggtaggaaacctctggacctctatcgcctctatgtgtctgtgaaggagattggtggattgactcaggtcaacaagaacaaaaaatggcgggaacttgcaaccaacctcaatgtgggcacatcaagcagtgctgccagctccttgaaaaagcagtatatccagtgtctctatgcctttgaatgcaagattgaacggggagaagaccctcccccagacatctttgcagctgctgattccaagaagtcccagcccaagatccagcctccctctcctgcgggatcaggatctatgcaggggccccagactccccagtcaaccagcagttccatggcagaaggaggagacttaaagccaccaactccagcatccacaccacacagtcagatccccccattgccaggcatgagcaggagcaattcagttgggatccaggatgcctttaatgatggaagtgactccacattccagaagcggaattccatgactccaaaccctgggtatcagcccagtatgaatacctctgacatgatggggcgcatgtcctatgagccaaataaggatccttatggcagcatgaggaaagctccagggagtgatcccttcatgtcctcagggcagggccccaacggcgggatgggtgacccctacagtcgtgctgccggccctgggctaggaaatgtggcgatgggaccacgacagcactatccctatggaggtccttatgacagagtgaggacggagcctggaatagggcctgagggaaacatgagcactggggccccacagccgaatctcatgccttccaacccagactcggggatgtattctcctagccgctaccccccgcagcagcagcagcagcagcagcaacgacatgattcctatggcaatcagttctccacccaaggcaccccttctggcagccccttccccagccagcagactacaatgtatcaacagcaacagcagaattacaagcggccaatggatggcacatatggccctcctgccaagcggcacgaaggggagatgtacagcgtgccatacagcactgggcaggggcagcctcagcagcagcagttgcccccagcccagccccagcctgccagccagcaacaagctgcccagccttcccctcagcaagatgtatacaaccagtatggcaatgcctatcctgccactgccacagctgctactgagcgccgaccagcaggcggcccccagaaccaatttccattccagtttggccgagaccgtgtctctgcaccccctggcaccaatgcccagcaaaacatgccaccacaaatgatgggcggccccatacaggcatcagctgaggttgctcagcaaggcaccatgtggcaggggcgtaatgacatgacctataattatgccaacaggcagagcacgggctctgccccccagggccccgcctatcatggcgtgaaccgaacagatgaaatgctgcacacagatcagagggccaaccacgaaggctcgtggccttcccatggcacacgccagcccccatatggtccctctgcccctgtgccccccatgacaaggccccctccatctaactaccagcccccaccaagcatgcagaatcacattcctcaggtatccagccctgctcccctgccccggccaatggagaaccgcacctctcctagcaagtctccattcctgcactctgggatgaaaatgcagaaggcaggtcccccagtacctgcctcgcacatagcacctgcccctgtgcagccccccatgattcggcgggatatcaccttcccacctggctctgttgaagccacacagcctgtgttgaagcagaggaggcggctcacaatgaaagacattggaaccccggaggcatggcgggtaatgatgtccctcaagtctggtctcctggcagagagcacatgggcattagataccatcaacatcctgctgtatgatgacaacagcatcatgaccttcaacctcagtcagctcccagggttgctagagctccttgtagaatatttccgacgatgcctgattgagatctttggcattttaaaggagtatgaggtgggtgacccaggacagagaacgctactggatcctgggaggttcagcaaggtgtctagtccagctcccatggagggtggggaagaagaagaagaacttctaggtcctaaactagaagaggaagaagaagaggaagtagttgaaaatgatgaggagatagccttttcaggcaaggacaagccagcttcagagaatagtgaggagaagctgatcagtaagtttgacaagcttccagtaaagatcgtacagaagaatgatccatttgtggtggactgctcagataagcttgggcgtgtgcaggagtttgacagtggcctgctgcactggcggattggtgggggggacaccactgagcatatccagacccacttcgagagcaagacagagctgctgccttcccggcctcacgcaccctgcccaccagcccctcggaagcatgtgacaacagcagagggtacaccagggacaacagaccaggaggggcccccacctgatggacctccagaaaaacggatcacagccactatggatgacatgttgtctactcggtctagcaccttgaccgaggatggagctaagagttcagaggccatcaaggagagcagcaagtttccatttggcattagcccagcacagagccaccggaacatcaagatcctagaggacgaaccccacagtaaggatgagaccccactgtgtacccttctggactggcaggattctcttgccaagcgctgcgtctgtgtgtccaataccattcgaagcctgtcatttgtgccaggcaatgactttgagatgtccaaacacccagggctgctgctcatcctgggcaagctgatcctgctgcaccacaagcacccagaacggaagcaggcaccactaacttatgaaaaggaggaggaacaggaccaaggggtgagctgcaacaaagtggagtggtggtgggactgcttggagatgctccgggaaaacaccttggttacactcgccaacatctcggggcagttggacctatctccataccccgagagcatttgcctgcctgtcctggacggactcctacactgggcagtttgcccttcagctgaagcccaggaccccttttccaccctgggccccaatgccgtcctttccccgcagagactggtcttggaaaccctcagcaaactcagcatccaggacaacaatgtggacctgattctggccacaccccccttcagccgcctggagaagttgtatagcactatggtgcgcttcctcagtgaccgaaagaacccggtgtgccgggagatggctgtggtactgctggccaacctggctcagggggacagcctggcagctcgtgccattgcagtgcagaagggcagtatcggcaacctcctgggcttcctagaggacagccttgccgccacacagttccagcagagccaggccagcctcctccacatgcagaacccaccctttgagccaactagtgtggacatgatgcggcgggctgcccgcgcgctgcttgccttggccaaggtggacgagaaccactcagagtttactctgtacgaatcacggctgttggacatctcggtatcaccgttgatgaactcattggtttcacaagtcatttgtgatgtactgtttttgattggccagtcatgacagccgtgggacacctcccccccccgtgtgtgtgtgcgtgtgtggagaacttagaaactgactgttgccctttatttatgcaaaaccacctcagaatccagtttaccctgtgctgtccagcttctcccttgggaaaaagtctctcctgtttctctctcctccttccacctcccctccctccatcacctcacgcctttctgttccttgtcctcaccttactcccctcaggaccctaccccaccctctttgaaaagacaaagctctgcctacatagaagactttttttattttaaccaaagttactgttgtttacagtgagtttggggaaaaaaaataaaataaaaatggctttcccagtccttgcatcaacgggatgccacatttcataactgtttttaatggtaaaaaaaaaaaaaaaaaatacaaaaaaaaattctgaaggacaaaaaaggtgactgctgaactgtgtgtggtttattgttgtacattcacaatcttgcaggagccaagaagttcgcagttgtgaacagaccctgttcactggagaggcctgtgcagtagagtgtagaccctttcatgtactgtactgtacacctgatactgtaaacatactgtaataataatgtctctgtaaaaagtccttgctgtctcagcagccaatcaacttatagtttatttttttctgggtttttgttttgttttgttttctttctaatcgaggtgtgaaaaagttctaggttcagttgaagttctgatgaagaaacacaattgagattttttcagtgataaaatctgcatatttgtatttcaacaatgtagctaaaacttgatgtaaattcctcctttttttccttttttggcttaatgaatatcatttattcagtatgaaatctttatactatatgttccacgtgttaagaataaatgtacattaaatcttggtaaaaaaaaagtgaa

SEQ ID NO: 303614 - DNA, 7793 bp, Homo sapiens
  misc_feature (488)..(488): n is a, c, g, or t
  misc_feature (501)..(501): n is a, c, g, or t
  misc_feature (579)..(579): n is a, c, g, or t
  misc_feature (599)..(599): n is a, c, g, or t
gaattccgaaagcggagagtcacagcggggccaggccctggggagcggagcctccaccgcccccctcattcccaggcaagggcttggggggaatgagccgggagagccgggtcccgagcctacagagccgggagcagctgagccgccggcgcctcggccgccgccgcctcctcctcctcctccgccgccgccagcccggagcctgagccggcggggcgggggggagaggagcgagcgcagcgcagcagcggagccccgcgaggcccgcccgggcgggtggggagggcagcccgggggactgggccccggggcggggtgggagggggggagaagacgaagacagggccgggtctctccgcggacgagacagcggggatcatggccgcgcaggtcgcccccgccgccgccagcagcctgggcaacccgccgccgccgccgccctcggagctgaagaaagccgagcagcagcagcgggaggaggcgggggncgaggcggcggcngcggcagcggccgagcgcggggaaatgaaggcagccgccgggcaggaaagcgagggccccgccgtggggccgccgcanccgctgggaaaggagctgcnggacggggccgagagcaatgggggtggcggcggcggcggagccggcagcggcggcgggcccggcgcggagccggacctgaagaactcgaacgggaacgcgggccctaggcccgccctgaacaataacctcacggagccgcccggcggcggcggtggcggcagcagcgatggggtgggggcgcctcctcactcagccgcggccgccttgccgcccccagcctacggcttcgggcaaccctacggccggagcccgtctgccgtcgccgccgccgcggccgccgtcttccaccaacaacatggcggacaacaaagccctggcctggcagcgctgcagagcggcggcggcgggggcctggagccctacgcggggccccagcagaactctcacgaccacggcttccccaaccaccagtacaactcctactaccccaaccgcagcgcctaccccccgcccgccccggcctacgcgctgagctccccgagaggtggcactccgggctccggcgcggcggcggctgccggctccaagccgcctccctcctccagcgcctccgcctcctcgtcgtcttcgtccttcgctcagcagcgcttcggggccatggggggaggcggcccctccgcggccggcgggggaactccccagcccaccgccacccccaccctcaaccaactgctcacgtcgcccagctcggcccggggctaccagggctaccccgggggcgactacagtggcgggccccaggacgggggcgccggcaagggcccggcggacatggcctcgcagtgttggggggctgcggcggcggcagctgcggcggcggccgcctcgggaggggcccaacaaaggagccaccacgcgcccatgagccccgggagcagcggcggcggggggcagccgctcgcccggacccctcagccatccagtccaatggatcagatgggcaagatgagacctcagccatatggcgggactaacccatactcgcagcaacagggacctccgtcaggaccgcagcaaggacatgggtacccagggcagccatacgggtcccagaccccgcagcggtacccgatgaccatgcagggccgggcgcagagtgccatgggcggcctctcttatacacagcagattcctccttatggacaacaaggccccagcgggtatggtcaacagggccagactccatattacaaccagcaaagtcctcaccctcagcagcagcagccaccctactcccagcaaccaccgtcccagacccctcatgcccaaccttcgtatcagcagcagccacagtctcaaccaccacagctccagtcctctcagcctccatactcccagcagccatcccagcctccacatcagcagtccccggctccatacccctcccagcagtcgacgacacagcagcacccccagagccagcccccctactcacagccacaggctcagtctccttaccagcagcagcaacctcagcagccagcaccctcgacgctctcccagcaggctgcgtatcctcagccccagtctcagcagtcccagcaaactgcctattcccagcagcgcttccctccaccgcaggagctatctcaagattcatttgggtctcaggcatcctcagccccctcaatgacctccagtaagggagggcaagaagatatgaacctgagccttcagtcaagaccctccagcttgcctgatctatctggttcaatagatgacctccccatggggacagaaggagctctgagtcctggagtgagcacatcagggatttccagcagccaaggagagcagagtaatccagctcagtctcctttctctcctcatacctcccctcacctgcctggcatccgaggcccttccccgtcccctgttggctctcccgccagtgttgctcagtctcgctcaggaccactctcgcctgctgcagtgccaggcaaccagatgccacctcggccacccagtggccagtcggacagcatcatgcatccttccatgaaccaatcaagcattgcccaagatcgaggttatatgcagaggaacccccagatgccccagtacagttccccccagcccggctcagccttatctccgcgtcagccttccggaggacagatacacacaggcatgggctcctaccagcagaactccatggggagctatggtccccaggggggtcagtatggcccacaaggtggctaccccaggcagccaaactataatgccttgcccaatgccaactaccccagtgcaggcatggctggaggcataaaccccatgggtgccggaggtcaaatgcatggacagcctggcatcccaccttatggcacactccctccagggaggatgagtcacgcctccatgggcaaccggccttatggccctaacatggccaatatgccacctcaggttgggtcagggatgtgtccccaccagggggcatgaaccggaaaacccaagaaactgctgtcgccatgcatgttgctgccaactctatccaaaacaggccgccaggctaccccaatatgaatcaagggggcatgatgggaactggacctccttatggacaagggattaatagtatggctggcatgatcaaccctcagggacccccatattccatgggtggaaccatggccaacaattctgcaggtaagtgctagtcattctcactagggatttcttcaagagtcacatcacagctaaacttactggacttgagaatttttttctcttttacagggatggcagccagcccagagatgatgggccttggggatgtaaagttaactccagccaccaaaatgaacaacaaggcagatgggacacccaagacagaatccaaatccaagaaatccagttcttctactacaaccaatgagaagatcaccaagttgtatgagctgggtggtgagcctgagaggaagatgtgggtggaccgttatctggccttcactgaggagaaggccatgggcatgacaaatctgcctgctgtgggtaggaaacctctggacctctatcgcctctatgtgtctgtgaaggagattggtggattgactcaggtcaacaagaacaaaaaatggcgggaacttgcaaccaacctcaatgtgggcacatcaagcagtgctgccagctccttgaaaaagcagtatatccagtgtctctatgcctttgaatgcaagattgaacggggagaagaccctcccccagacatctttgcagctgctgattccaagaagtcccagcccaagatccagcctccctctcctgcgggatcaggatctatgcaggggccccagactccccagtcaaccagcagttccatggcagaaggaggagacttaaagccaccaactccagcatccacaccacacagtcagatccccccattgccaggcatgagcaggagcaattcagttgggatccaggatgcctttaatgatggaagtgactccacattccagaagcggaattccatgactccaaaccctgggtatcagcccagtatgaatacctctgacatgatggggcgcatgtcctatgagccaaataaggatccttatggcagcatgaggaaagctccagggagtgatcccttcatgtcctcagggcagggccccaacggcgggatgggtgacccctacagtcgtgctgccggccctgggctaggaaatgtggcgatgggaccacgacagcactatccctatggaggtccttatgacagagtgaggacggagcctggaatagggcctgagggaaacatgagcactggggccccacagccgaatctcatgccttccaacccagactcggggatgtattctcctagccgctaccccccgcagcagcagcagcagcagcagcaacgacatgattcctatggcaatcagttctccacccaaggcaccccttctggcagccccttccccagccagcagactacaatgtatcaacagcaacagcaggaaccccggaggcatggcgggtaatgatgtccctcaagtctggtctcctggcagagagcacatgggcattagataccatcaacatcctgctgtatgatgacaacagcatcatgaccttcaacctcagtcagctcccagggttgctagagctccttgtagaatatttccgacgatgcctgattgagatctttggcattttaaaggagtatgaggtgggtgacccaggacagagaacgctactggatcctgggaggttcagcaaggtgtctagtccagctcccatggagggtggggaagaagaagaagaacttctaggtcctaaactagaagaggaagaagaagaggaagtagttgaaaatgatgaggagatagccttttcaggcaaggacaagccagcttcagagaatagtgaggagaagctgatcagtaagtttgacaagcttccagtaaagatcgtacagaagaatgatccatttgtggtggactgctcagataagcttgggcgtgtgcaggagtttgacagtggcctgctgcactggcggattggtgggggggacaccactgagcatatccagacccacttcgagagcaagacagagctgctgccttcccggcctcacgcaccctgcccaccagcccctcggaagcatgtgacaacagcagagggtacaccagggacaacagaccaggaggggcccccacctgatggacctccagaaaaacggatcacagccactatggatgacatgttgtctactcggtctagcaccttgaccgaggatggagctaagagttcagaggccatcaaggagagcagcaagtttccatttggcattagcccagcacagagccaccggaacatcaagatcctagaggacgaaccccacagtaaggatgagaccccactgtgtacccttctggactggcaggattctcttgccaagcgctgcgtctgtgtgtccaataccattcgaagcctgtcatttgtgccaggcaatgactttgagatgtccaaacacccagggctgctgctcatcctgggcaagctgatcctgctgcaccacaagcacccagaacggaagcaggcaccactaacttatgaaaaggaggaggaacaggaccaaggggtgagctgcaacaaagtggagtggtggtgggactgcttggagatgctccgggaaaacaccttggttacactcgccaacatctcggggcagttggacctatctccataccccgagagcatttgcctgcctgtcctggacggactcctacactgggcagtttgcccttcagctgaagcccaggaccccttttccaccctgggccccaatgccgtcctttccccgcagagactggtcttggaaaccctcagcaaactcagcatccaggacaacaatgtggacctgattctggccacaccccccttcagccgcctggagaagttgtatagcactatggtgcgcttcctcagtgaccgaaagaacccggtgtgccgggagatggctgtggtactgctggccaacctggctcagggggacagcctggcagctcgtgccattgcagtgcagaagggcagtatcggcaacctcctgggcttcctagaggacagccttgccgccacacagttccagcagagccaggccagcctcctccacatgcagaacccaccctttgagccaactagtgtggacatgatgcggcgggctgcccgcgcgctgcttgccttggccaaggtggacgagaaccactcagagtttactctgtacgaatcacggctgttggacatctcggtatcaccgttgatgaactcattggtttcacaagtcatttgtgatgtactgtttttgattggccagtcatgacagccgtgggacacctcccccccccgtgtgtgtgtgcgtgtgtggagaacttagaaactgactgttgccctttatttatgcaaaaccacctcagaatccagtttaccctgtgctgtccagcttctcccttgggaaaaagtctctcctgtttctctctcctccttccacctcccctccctccatcacctcacgcctttctgttccttgtcctcaccttactcccctcaggaccctaccccaccctctttgaaaagacaaagctctgcctacatagaagactttttttattttaaccaaagttactgttgtttacagtgagtttggggaaaaaaaataaaataaaaatggctttcccagtccttgcatcaacgggatgccacatttcataactgtttttaatggtaaaaaaaaaaaaaaaaaatacaaaaaaaaattctgaaggacaaaaaaggtgactgctgaactgtgtgtggtttattgttgtacattcacaatcttgcaggagccaagaagttcgcagttgtgaacagaccctgttcactggagaggcctgtgcagtagagtgtagaccctttcatgtactgtactgtacacctgatactgtaaacatactgtaataataatgtctcacatggaaacagaaaacgctgggtcagcagcaagctgtagtttttaaaaatgtttttagttaaacgttgaggagaaaaaaaaaaaaggcttttcccccaaagtatcatgtgtgaacctacaacaccctgacctctttctctcctccttgattgtatgaataaccctgagatcacctcttagaactggttttaacctttagctgcagcggctacgctgccacgtgtgtatatatatgacgttgtacattgcacatacccttggatccccacagtttggtcctcctcccagctacccctttatagtatgacgagttaacaagttggtgacctgcacaaagcgagacacagctatttaatctcttgccagatatcgcccctcttggtgcgatgctgtacaggtctctgtaaaaagtccttgctgtctcagcagccaatcaacttatagtttatttttttctgggtttttgttttgttttgttttctttctaatcgaggtgtgaaaaagttctaggttcagttgaagttctgatgaagaaacacaattgagattttttcagtgataaaatctgcatatttgtatttcaacaatgtagctaaaacttgatgtaaattcctcctttttttccttttttggcttaatgaatatcatttattcagtatgaaatctttatactatatgttccacgtgttaagaataaatgtacattaaatcttggtaaaaaaaaagtgaa

SEQ ID NO: 303615 - DNA, 7897 bp, Homo sapiens
  misc_feature (488)..(488): n is a, c, g, or t
  misc_feature (501)..(501): n is a, c, g, or t
  misc_feature (579)..(579): n is a, c, g, or t
  misc_feature (599)..(599): n is a, c, g, or t
gaattccgaaagcggagagtcacagcggggccaggccctggggagcggagcctccaccgcccccctcattcccaggcaagggcttggggggaatgagccgggagagccgggtcccgagcctacagagccgggagcagctgagccgccggcgcctcggccgccgccgcctcctcctcctcctccgccgccgccagcccggagcctgagccggcggggcgggggggagaggagcgagcgcagcgcagcagcggagccccgcgaggcccgcccgggcgggtggggagggcagcccgggggactgggccccggggcggggtgggagggggggagaagacgaagacagggccgggtctctccgcggacgagacagcggggatcatggccgcgcaggtcgcccccgccgccgccagcagcctgggcaacccgccgccgccgccgccctcggagctgaagaaagccgagcagcagcagcgggaggaggcgggggncgaggcggcggcngcggcagcggccgagcgcggggaaatgaaggcagccgccgggcaggaaagcgagggccccgccgtggggccgccgcanccgctgggaaaggagctgcnggacggggccgagagcaatgggggtggcggcggcggcggagccggcagcggcggcgggcccggcgcggagccggacctgaagaactcgaacgggaacgcgggccctaggcccgccctgaacaataacctcacggagccgcccggcggcggcggtggcggcagcagcgatggggtgggggcgcctcctcactcagccgcggccgccttgccgcccccagcctacggcttcgggcaaccctacggccggagcccgtctgccgtcgccgccgccgcggccgccgtcttccaccaacaacatggcggacaacaaagccctggcctggcagcgctgcagagcggcggcggcgggggcctggagccctacgcggggccccagcagaactctcacgaccacggcttccccaaccaccagtacaactcctactaccccaaccgcagcgcctaccccccgcccgccccggcctacgcgctgagctccccgagaggtggcactccgggctccggcgcggcggcggctgccggctccaagccgcctccctcctccagcgcctccgcctcctcgtcgtcttcgtccttcgctcagcagcgcttcggggccatggggggaggcggcccctccgcggccggcgggggaactccccagcccaccgccacccccaccctcaaccaactgctcacgtcgcccagctcggcccggggctaccagggctaccccgggggcgactacagtggcgggccccaggacgggggcgccggcaagggcccggcggacatggcctcgcagtgttggggggctgcggcggcggcagctgcggcggcggccgcctcgggaggggcccaacaaaggagccaccacgcgcccatgagccccgggagcagcggcggcggggggcagccgctcgcccggacccctcagccatccagtccaatggatcagatgggcaagatgagacctcagccatatggcgggactaacccatactcgcagcaacagggacctccgtcaggaccgcagcaaggacatgggtacccagggcagccatacgggtcccagaccccgcagcggtacccgatgaccatgcagggccgggcgcagagtgccatgggcggcctctcttatacacagcagattcctccttatggacaacaaggccccagcgggtatggtcaacagggccagactccatattacaaccagcaaagtcctcaccctcagcagcagcagccaccctactcccagcaaccaccgtcccagacccctcatgcccaaccttcgtatcagcagcagccacagtctcaaccaccacagctccagtcctctcagcctccatactcccagcagccatcccagcctccacatcagcagtccccggctccatacccctcccagcagtcgacgacacagcagcacccccagagccagcccccctactcacagccacaggctcagtctccttaccagcagcagcaacctcagcagccagcaccctcgacgctctcccagcaggctgcgtatcctcagccccagtctcagcagtcccagcaaactgcctattcccagcagcgcttccctccaccgcaggagctatctcaagattcatttgggtctcaggcatcctcagccccctcaatgacctccagtaagggagggcaagaagatatgaacctgagccttcagtcaagaccctccagcttgcctgatctatctggttcaatagatgacctccccatggggacagaaggagctctgagtcctggagtgagcacatcagggatttccagcagccaaggagagcagagtaatccagctcagtctcctttctctcctcatacctcccctcacctgcctggcatccgaggcccttccccgtcccctgttggctctcccgccagtgttgctcagtctcgctcaggaccactctcgcctgctgcagtgccaggcaaccagatgccacctcggccacccagtggccagtcggacagcatcatgcatccttccatgaaccaatcaagcattgcccaagatcgaggttatatgcagaggaacccccagatgccccagtacagttccccccagcccggctcagccttatctccgcgtcagccttccggaggacagatacacacaggcatgggctcctaccagcagaactccatggggagctatggtccccaggggggtcagtatggcccacaaggtggctaccccaggcagccaaactataatgccttgcccaatgccaactaccccagtgcaggcatggctggaggcataaaccccatgggtgccggaggtcaaatgcatggacagcctggcatcccaccttatggcacactccctccagggaggatgagtcacgcctccatgggcaaccggccttatggccctaacatggccaatatgccacctcaggttgggtcagggatgtgtccccaccagggggcatgaaccggaaaacccaagaaactgctgtcgccatgcatgttgctgccaactctatccaaaacaggccgccaggctaccccaatatgaatcaagggggcatgatgggaactggacctccttatggacaagggattaatagtatggctggcatgatcaaccctcagggacccccatattccatgggtggaaccatggccaacaattctgcagggatggcagccagcccagagatgatgggccttggggatgtaaagttaactccagccaccaaaatgaacaacaaggcagatgggacacccaagacagaatccaaatccaagaaatccagttcttctactacaaccaatgagaagatcaccaagttgtatgagctgggtggtgagcctgagaggaagatgtgggtggaccgttatctggccttcactgaggagaaggccatgggcatgacaaatctgcctgctgtgggtaggaaacctctggacctctatcgcctctatgtgtctgtgaaggagattggtggattgactcaggtcaacaagaacaaaaaatggcgggaacttgcaaccaacctcaatgtgggcacatcaagcagtgctgccagctccttgaaaaagcagtatatccagtgtctctatgcctttgaatgcaagattgaacggggagaagaccctcccccagacatctttgcagctgctgattccaagaagtcccagcccaagatccagcctccctctcctgcgggatcaggatctatgcaggggccccagactccccagtcaaccagcagttccatggcagaaggaggagacttaaagccaccaactccagcatccacaccacacagtcagatccccccattgccaggcatgagcaggagcaattcagttgggatccaggatgcctttaatgatggaagtgactccacattccagaagcggaattccatgactccaaaccctgggtatcagcccagtatgaatacctctgacatgatggggcgcatgtcctatgagccaaataaggatccttatggcagcatgaggaaagctccagggagtgatcccttcatgtcctcagggcagggccccaacggcgggatgggtgacccctacagtcgtgctgccggccctgggctaggaaatgtggcgatgggaccacgacagcactatccctatggaggtccttatgacagagtgaggacggagcctggaatagggcctgagggaaacatgagcactggggccccacagccgaatctcatgccttccaacccagactcggggatgtattctcctagccgctaccccccgcagcagcagcagcagcagcagcaacgacatgattcctatggcaatcagttctccacccaaggcaccccttctggcagccccttccccagccagcagactacaatgtatcaacagcaacagcagaattacaagcggccaatggatggcacatatggccctcctgccaagcggcacgaaggggagatgtacagcgtgccatacagcactgggcaggggcagcctcagcagcagcagttgcccccagcccagccccagcctgccagccagcaacaagctgcccagccttcccctcagcaagatgtatacaaccagtatggcaatgcctatcctgccactgccacagctgctactgagcgccgaccagcaggcggcccccagaaccaatttccattccagtttggccgagaccgtgtctctgcaccccctggcaccaatgcccagcaaaacatgccaccacaaatgatgggcggccccatacaggcatcagctgaggttgctcagcaaggcaccatgtggcaggggcgtaatgacatgacctataattatgccaacaggcagagcacgggctctgccccccagggccccgcctatcatggcgtgaaccgaacagatgaaatgctgcacacagatcagagggccaaccacgaaggctcgtggccttcccatggcacacgccagcccccatatggtccctctgcccctgtgccccccatgacaaggccccctccatctaactaccagcccccaccaagcatgcagaatcacattcctcaggtatccagccctgctcccctgccccggccaatggagaaccgcacctctcctagcaagtctccattcctgcactctgggatgaaaatgcagaaggcaggtcccccagtacctgcctcgcacatagcacctgcccctgtgcagccccccatgattcggcgggatatcaccttcccacctggctctgttgaagccacacagcctgtgttgaagcagaggaggcggctcacaatgaaagacattggaaccccggaggcatggcgggtaatgatgtccctcaagtctggtctcctggcagagagcacatgggcattagataccatcaacatcctgctgtatgatgacaacagcatcatgaccttcaacctcagtcagctcccagggttgctagagctccttgtagaatatttccgacgatgcctgattgagatctttggcattttaaaggagtatgaggtgggtgacccaggacagagaacgctactggatcctgggaggttcagcaaggtgtctagtccagctcccatggagggtggggaagaagaagaagaacttctaggtcctaaactagaagaggaagaagaagaggaagtagttgaaaatgatgaggagatagccttttcaggcaaggacaagccagcttcagagaatagtgaggagaagctgatcagtaagtttgacaagcttccagtaaagatcgtacagaagaatgatccatttgtggtggactgctcagataagcttgggcgtgtgcaggagtttgacagtggcctgctgcactggcggattggtgggggggacaccactgagcatatccagacccacttcgagagcaagacagagctgctgccttcccggcctcacgcaccctgcccaccagcccctcggaagcatgtgacaacagcagagggtacaccagggacaacagaccaggaggggcccccacctgatggacctccagaaaaacggatcacagccactatggatgacatgttgtctactcggtctagcaccttgaccgaggatggagctaagagttcagaggccatcaaggagagcagcaagtttccatttggcattagcccagcacagagccaccggaacatcaagatcctagaggacgaaccccacagtaaggatgagaccccactgtgtacccttctggactggcaggattctcttgccaagcgctgcgtctgtgtgtccaataccattcgaagcctgtcatttgtgccaggcaatgactttgagatgtccaaacacccagggctgctgctcatcctgggcaagctgatcctgctgcaccacaagcacccagaacggaagcaggcaccactaacttatgaaaaggaggaggaacaggaccaaggggtgagctgcaacaaagtggagtggtggtgggactgcttggagatgctccgggaaaacaccttggttacactcgccaacatctcggggcagttggacctatctccataccccgagagcatttgcctgcctgtcctggacggactcctacactgggcagtttgcccttcagctgaagcccaggaccccttttccaccctgggccccaatgccgtcctttccccgcagagactggtcttggaaaccctcagcaaactcagcatccaggacaacaatgtggacctgattctggccacaccccccttcagccgcctggagaagttgtatagcactatggtgcgcttcctcagtgaccgaaagaacccggtgtgccgggagatggctgtggtactgctggccaacctggctcagggggacagcctggcagctcgtgccattgcagtgcagaagggcagtatcggcaacctcctgggcttcctagaggacagccttgccgccacacagttccagcagagccaggccagcctcctccacatgcagaacccaccctttgagccaactagtgtggacatgatgcggcgggctgcccgcgcgctgcttgccttggccaaggtggacgagaaccactcagagtttactctgtacgaatcacggctgttggacatctcggtatcaccgttgatgaactcattggtttcacaagtcatttgtgatgtactgtttttgattggccagtcatgacagccgtgggacacctcccccccccgtgtgtgtgtgcgtgtgtggagaacttagaaactgactgttgccctttatttatgcaaaaccacctcagaatccagtttaccctgtgctgtccagcttctcccttgggaaaaagtctctcctgtttctctctcctccttccacctcccctccctccatcacctcacgcctttctgttccttgtcctcaccttactcccctcaggaccctaccccaccctctttgaaaagacaaagctctgcctacatagaagactttttttattttaaccaaagttactgttgtttacagtgagtttggggaaaaaaaataaaataaaaatggctttcccagtccttgcatcaacgggatgccacatttcataactgtttttaatggtaaaaaaaaaaaaaaaaaatacaaaaaaaaattctgaaggacaaaaaaggtgactgctgaactgtgtgtggtttattgttgtacattcacaatcttgcaggagccaagaagttcgcagttgtgaacagaccctgttcactggagaggcctgtgcagtagagtgtagaccctttcatgtactgtactgtacacctgatactgtaaacatactgtaataataatgtctcacatagttcagcgtctgacgggtacgagatcaa

SEQ ID NO: 303616 - DNA, 6319 bp, Homo sapiens
aactcaggggcgagctgctaactcaggggcgagctgccatacagactaaaaaaacctgtgtacctgggttatatattcggtggccagaggccatcaaagctcaggttaatgaaatgctctttattttgtagccatccagtccaatggatcagatgggcaagatgagacctcagccatatggcgggactaacccatactcgcagcaacagggacctccgtcaggaccgcagcaaggacatgggtacccagggcagccatacgggtcccagaccccgcagcggtacccgatgaccatgcagggccgggcgcagagtgccatgggcggcctctcttatacacagcagattcctccttatggacaacaaggccccagcgggtatggtcaacagggccagactccatattacaaccagcaaagtcctcaccctcagcagcagcagccaccctactcccagcaaccaccgtcccagacccctcatgcccaaccttcgtatcagcagcagccacagtctcaaccaccacagctccagtcctctcagcctccatactcccagcagccatcccagcctccacatcagcagtccccggctccatacccctcccagcagtcgacgacacagcagcacccccagagccagcccccctactcacagccacaggctcagtctccttaccagcagcagcaacctcagcagccagcaccctcgacgctctcccagcaggctgcgtatcctcagccccagtctcagcagtcccagcaaactgcctattcccagcagcgcttccctccaccgcaggagctatctcaagattcatttgggtctcaggcatcctcagccccctcaatgacctccagtaagggagggcaagaagatatgaacctgagccttcagtcaagaccctccagcttgcctgatctatctggttcaatagatgacctccccatggggacagaaggagctctgagtcctggagtgagcacatcagggatttccagcagccaaggagagcagagtaatccagctcagtctcctttctctcctcatacctcccctcacctgcctggcatccgaggcccttccccgtcccctgttggctctcccgccagtgttgctcagtctcgctcaggaccactctcgcctgctgcagtgccaggcaaccagatgccacctcggccacccagtggccagtcggacagcatcatgcatccttccatgaaccaatcaagcattgcccaagatcgaggttatatgcagaggaacccccagatgccccagtacagttccccccagcccggctcagccttatctccgcgtcagccttccggaggacagatacacacaggcatgggctcctaccagcagaactccatggggagctatggtccccaggggggtcagtatggcccacaaggtggctaccccaggcagccaaactataatgccttgcccaatgccaactaccccagtgcaggcatggctggaggcataaaccccatgggtgccggaggtcaaatgcatggacagcctggcatcccaccttatggcacactccctccagggaggatgagtcacgcctccatgggcaaccggccttatggccctaacatggccaatatgccacctcaggttgggtcagggatgtgtccccaccagggggcatgaaccggaaaacccaagaaactgctgtcgccatgcatgttgctgccaactctatccaaaacaggccgccaggctaccccaatatgaatcaagggggcatgatgggaactggacctccttatggacaagggattaatagtatggctggcatgatcaaccctcagggacccccatattccatgggtggaaccatggccaacaattctgcagggatggcagccagcccagagatgatgggccttggggatgtaaagttaactccagccaccaaaatgaacaacaaggcagatgggacacccaagacagaatccaaatccaagaaatccagttcttctactacaaccaatgagaagatcaccaagttgtatgagctgggtggtgagcctgagaggaagatgtgggtggaccgttatctggccttcactgaggagaaggccatgggcatgacaaatctgcctgctgtgggtaggaaacctctggacctctatcgcctctatgtgtctgtgaaggagattggtggattgactcaggtcaacaagaacaaaaaatggcgggaacttgcaaccaacctcaatgtgggcacatcaagcagtgctgccagctccttgaaaaagcagtatatccagtgtctctatgcctttgaatgcaagattgaacggggagaagaccctcccccagacatctttgcagctgctgattccaagaagtcccagcccaagatccagcctccctctcctgcgggatcaggatctatgcaggggccccagactccccagtcaaccagcagttccatggcagaaggaggagacttaaagccaccaactccagcatccacaccacacagtcagatccccccattgccaggcatgagcaggagcaattcagttgggatccaggatgcctttaatgatggaagtgactccacattccagaagcggaattccatgactccaaaccctgggtatcagcccagtatgaatacctctgacatgatggggcgcatgtcctatgagccaaataaggatccttatggcagcatgaggaaagctccagggagtgatcccttcatgtcctcagggcagggccccaacggcgggatgggtgacccctacagtcgtgctgccggccctgggctaggaaatgtggcgatgggaccacgacagcactatccctatggaggtccttatgacagagtgaggacggagcctggaatagggcctgagggaaacatgagcactggggccccacagccgaatctcatgccttccaacccagactcggggatgtattctcctagccgctaccccccgcagcagcagcagcagcagcagcaacgacatgattcctatggcaatcagttctccacccaaggcaccccttctggcagccccttccccagccagcagactacaatgtatcaacagcaacagcaggaaccccggaggcatggcgggtaatgatgtccctcaagtctggtctcctggcagagagcacatgggcattagataccatcaacatcctgctgtatgatgacaacagcatcatgaccttcaacctcagtcagctcccagggttgctagagctccttgtagaatatttccgacgatgcctgattgagatctttggcattttaaaggagtatgaggtgggtgacccaggacagagaacgctactggatcctgggaggttcagcaaggtgtctagtccagctcccatggagggtggggaagaagaagaagaacttctaggtcctaaactagaagaggaagaagaagaggaagtagttgaaaatgatgaggagatagccttttcaggcaaggacaagccagcttcagagaatagtgaggagaagctgatcagtaagtttgacaagcttccagtaaagatcgtacagaagaatgatccatttgtggtggactgctcagataagcttgggcgtgtgcaggagtttgacagtggcctgctgcactggcggattggtgggggggacaccactgagcatatccagacccacttcgagagcaagacagagctgctgccttcccggcctcacgcaccctgcccaccagcccctcggaagcatgtgacaacagcagagggtacaccagggacaacagaccaggaggggcccccacctgatggacctccagaaaaacggatcacagccactatggatgacatgttgtctactcggtctagcaccttgaccgaggatggagctaagagttcagaggccatcaaggagagcagcaagtttccatttggcattagcccagcacagagccaccggaacatcaagatcctagaggacgaaccccacagtaaggatgagaccccactgtgtacccttctggactggcaggattctcttgccaagcgctgcgtctgtgtgtccaataccattcgaagcctgtcatttgtgccaggcaatgactttgagatgtccaaacacccagggctgctgctcatcctgggcaagctgatcctgctgcaccacaagcacccagaacggaagcaggcaccactaacttatgaaaaggaggaggaacaggaccaaggggtgagctgcaacaaagtggagtggtggtgggactgcttggagatgctccgggaaaacaccttggttacactcgccaacatctcggggcagttggacctatctccataccccgagagcatttgcctgcctgtcctggacggactcctacactgggcagtttgcccttcagctgaagcccaggaccccttttccaccctgggccccaatgccgtcctttccccgcagagactggtcttggaaaccctcagcaaactcagcatccaggacaacaatgtggacctgattctggccacaccccccttcagccgcctggagaagttgtatagcactatggtgcgcttcctcagtgaccgaaagaacccggtgtgccgggagatggctgtggtactgctggccaacctggctcagggggacagcctggcagctcgtgccattgcagtgcagaagggcagtatcggcaacctcctgggcttcctagaggacagccttgccgccacacagttccagcagagccaggccagcctcctccacatgcagaacccaccctttgagccaactagtgtggacatgatgcggcgggctgcccgcgcgctgcttgccttggccaaggtggacgagaaccactcagagtttactctgtacgaatcacggctgttggacatctcggtatcaccgttgatgaactcattggtttcacaagtcatttgtgatgtactgtttttgattggccagtcatgacagccgtgggacacctcccccccccgtgtgtgtgtgcgtgtgtggagaacttagaaactgactgttgccctttatttatgcaaaaccacctcagaatccagtttaccctgtgctgtccagcttctcccttgggaaaaagtctctcctgtttctctctcctccttccacctcccctccctccatcacctcacgcctttctgttccttgtcctcaccttactcccctcaggaccctaccccaccctctttgaaaagacaaagctctgcctacatagaagactttttttattttaaccaaagttactgttgtttacagtgagtttggggaaaaaaaataaaataaaaatggctttcccagtccttgcatcaacgggatgccacatttcataactgtttttaatggtaaaaaaaaaaaaaaaaaatacaaaaaaaaattctgaaggacaaaaaaggtgactgctgaactgtgtgtggtttattgttgtacattcacaatcttgcaggagccaagaagttcgcagttgtgaacagaccctgttcactggagaggcctgtgcagtagagtgtagaccctttcatgtactgtactgtacacctgatactgtaaacatactgtaataataatgtctcacatggaaacagaaaacgctgggtcagcagcaagctgtagtttttaaaaatgtttttagttaaacgttgaggagaaaaaaaaaaaaggcttttcccccaaagtatcatgtgtgaacctacaacaccctgacctctttctctcctccttgattgtatgaataaccctgagatcacctcttagaactggttttaacctttagctgcagcggctacgctgccacgtgtgtatatatatgacgttgtacattgcacatacccttggatccccacagtttggtcctcctcccagctacccctttatagtatgacgagttaacaagttggtgacctgcacaaagcgagacacagctatttaatctcttgccagatatcgcccctcttggtgcgatgctgtacaggtctctgtaaaaagtccttgctgtctcagcagccaatcaacttatagtttatttttttctgggtttttgttttgttttgttttctttctaatcgaggtgtgaaaaagttctaggttcagttgaagttctgatgaagaaacacaattgagattttttcagtgataaaatctgcatatttgtatttcaacaatgtagctaaaacttgatgtaaattcctcctttttttccttttttggcttaatgaatatcatttattcagtatgaaatctttatactatatgttccacgtgttaagaataaatgtacattaaatcttggtaaaaaaaaagtgaa

SEQ ID NO: 303617 - DNA, 5898 bp, Homo sapiens
  misc_feature (6)..(7): n is a, c, g, or t
agctanncacaggggcaagtccaacatagacactgcaaagggactagacccacatgaccgccagagaattattattattattattttttgagacggagtctcgctccagtcctctcagcctccatactcccagcagccatcccagcctccacatcagcagtccccggctccatacccctcccagcagtcgacgacacagcagcacccccagagccagcccccctactcacagccacaggctcagtctccttaccagcagcagcaacctcagcagccagcaccctcgacgctctcccagcaggctgcgtatcctcagccccagtctcagcagtcccagcaaactgcctattcccagcagcgcttccctccaccgcaggagctatctcaagattcatttgggtctcaggcatcctcagccccctcaatgacctccagtaagggagggcaagaagatatgaacctgagccttcagtcaagaccctccagcttgcctgatctatctggttcaatagatgacctccccatggggacagaaggagctctgagtcctggagtgagcacatcagggatttccagcagccaaggagagcagagtaatccagctcagtctcctttctctcctcatacctcccctcacctgcctggcatccgaggcccttccccgtcccctgttggctctcccgccagtgttgctcagtctcgctcaggaccactctcgcctgctgcagtgccaggcaaccagatgccacctcggccacccagtggccagtcggacagcatcatgcatccttccatgaaccaatcaagcattgcccaagatcgaggttatatgcagaggaacccccagatgccccagtacagttccccccagcccggctcagccttatctccgcgtcagccttccggaggacagatacacacaggcatgggctcctaccagcagaactccatggggagctatggtccccaggggggtcagtatggcccacaaggtggctaccccaggcagccaaactataatgccttgcccaatgccaactaccccagtgcaggcatggctggaggcataaaccccatgggtgccggaggtcaaatgcatggacagcctggcatcccaccttatggcacactccctccagggaggatgagtcacgcctccatgggcaaccggccttatggccctaacatggccaatatgccacctcaggttgggtcagggatgtgtccccaccagggggcatgaaccggaaaacccaagaaactgctgtcgccatgcatgttgctgccaactctatccaaaacaggccgccaggctaccccaatatgaatcaagggggcatgatgggaactggacctccttatggacaagggattaatagtatggctggcatgatcaaccctcagggacccccatattccatgggtggaaccatggccaacaattctgcagggatggcagccagcccagagatgatgggccttggggatgtaaagttaactccagccaccaaaatgaacaacaaggcagatgggacacccaagacagaatccaaatccaagaaatccagttcttctactacaaccaatgagaagatcaccaagttgtatgagctgggtggtgagcctgagaggaagatgtgggtggaccgttatctggccttcactgaggagaaggccatgggcatgacaaatctgcctgctgtgggtaggaaacctctggacctctatcgcctctatgtgtctgtgaaggagattggtggattgactcaggtcaacaagaacaaaaaatggcgggaacttgcaaccaacctcaatgtgggcacatcaagcagtgctgccagctccttgaaaaagcagtatatccagtgtctctatgcctttgaatgcaagattgaacggggagaagaccctcccccagacatctttgcagctgctgattccaagaagtcccagcccaagatccagcctccctctcctgcgggatcaggatctatgcaggggccccagactccccagtcaaccagcagttccatggcagaaggaggagacttaaagccaccaactccagcatccacaccacacagtcagatccccccattgccaggcatgagcaggagcaattcagttgggatccaggatgcctttaatgatggaagtgactccacattccagaagcggaattccatgactccaaaccctgggtatcagcccagtatgaatacctctgacatgatggggcgcatgtcctatgagccaaataaggatccttatggcagcatgaggaaagctccagggagtgatcccttcatgtcctcagggcagggccccaacggcgggatgggtgacccctacagtcgtgctgccggccctgggctaggaaatgtggcgatgggaccacgacagcactatccctatggaggtccttatgacagagtgaggacggagcctggaatagggcctgagggaaacatgagcactggggccccacagccgaatctcatgccttccaacccagactcggggatgtattctcctagccgctaccccccgcagcagcagcagcagcagcagcaacgacatgattcctatggcaatcagttctccacccaaggcaccccttctggcagccccttccccagccagcagactacaatgtatcaacagcaacagcaggaaccccggaggcatggcgggtaatgatgtccctcaagtctggtctcctggcagagagcacatgggcattagataccatcaacatcctgctgtatgatgacaacagcatcatgaccttcaacctcagtcagctcccagggttgctagagctccttgtagaatatttccgacgatgcctgattgagatctttggcattttaaaggagtatgaggtgggtgacccaggacagagaacgctactggatcctgggaggttcagcaaggtgtctagtccagctcccatggagggtggggaagaagaagaagaacttctaggtcctaaactagaagaggaagaagaagaggaagtagttgaaaatgatgaggagatagccttttcaggcaaggacaagccagcttcagagaatagtgaggagaagctgatcagtaagtttgacaagcttccagtaaagatcgtacagaagaatgatccatttgtggtggactgctcagataagcttgggcgtgtgcaggagtttgacagtggcctgctgcactggcggattggtgggggggacaccactgagcatatccagacccacttcgagagcaagacagagctgctgccttcccggcctcacgcaccctgcccaccagcccctcggaagcatgtgacaacagcagagggtacaccagggacaacagaccaggaggggcccccacctgatggacctccagaaaaacggatcacagccactatggatgacatgttgtctactcggtctagcaccttgaccgaggatggagctaagagttcagaggccatcaaggagagcagcaagtttccatttggcattagcccagcacagagccaccggaacatcaagatcctagaggacgaaccccacagtaaggatgagaccccactgtgtacccttctggactggcaggattctcttgccaagcgctgcgtctgtgtgtccaataccattcgaagcctgtcatttgtgccaggcaatgactttgagatgtccaaacacccagggctgctgctcatcctgggcaagctgatcctgctgcaccacaagcacccagaacggaagcaggcaccactaacttatgaaaaggaggaggaacaggaccaaggggtgagctgcaacaaagtggagtggtggtgggactgcttggagatgctccgggaaaacaccttggttacactcgccaacatctcggggcagttggacctatctccataccccgagagcatttgcctgcctgtcctggacggactcctacactgggcagtttgcccttcagctgaagcccaggaccccttttccaccctgggccccaatgccgtcctttccccgcagagactggtcttggaaaccctcagcaaactcagcatccaggacaacaatgtggacctgattctggccacaccccccttcagccgcctggagaagttgtatagcactatggtgcgcttcctcagtgaccgaaagaacccggtgtgccgggagatggctgtggtactgctggccaacctggctcagggggacagcctggcagctcgtgccattgcagtgcagaagggcagtatcggcaacctcctgggcttcctagaggacagccttgccgccacacagttccagcagagccaggccagcctcctccacatgcagaacccaccctttgagccaactagtgtggacatgatgcggcgggctgcccgcgcgctgcttgccttggccaaggtggacgagaaccactcagagtttactctgtacgaatcacggctgttggacatctcggtatcaccgttgatgaactcattggtttcacaagtcatttgtgatgtactgtttttgattggccagtcatgacagccgtgggacacctcccccccccgtgtgtgtgtgcgtgtgtggagaacttagaaactgactgttgccctttatttatgcaaaaccacctcagaatccagtttaccctgtgctgtccagcttctcccttgggaaaaagtctctcctgtttctctctcctccttccacctcccctccctccatcacctcacgcctttctgttccttgtcctcaccttactcccctcaggaccctaccccaccctctttgaaaagacaaagctctgcctacatagaagactttttttattttaaccaaagttactgttgtttacagtgagtttggggaaaaaaaataaaataaaaatggctttcccagtccttgcatcaacgggatgccacatttcataactgtttttaatggtaaaaaaaaaaaaaaaaaatacaaaaaaaaattctgaaggacaaaaaaggtgactgctgaactgtgtgtggtttattgttgtacattcacaatcttgcaggagccaagaagttcgcagttgtgaacagaccctgttcactggagaggcctgtgcagtagagtgtagaccctttcatgtactgtactgtacacctgatactgtaaacatactgtaataataatgtctcacatggaaacagaaaacgctgggtcagcagcaagctgtagtttttaaaaatgtttttagttaaacgttgaggagaaaaaaaaaaaaggcttttcccccaaagtatcatgtgtgaacctacaacaccctgacctctttctctcctccttgattgtatgaataaccctgagatcacctcttagaactggttttaacctttagctgcagcggctacgctgccacgtgtgtatatatatgacgttgtacattgcacatacccttggatccccacagtttggtcctcctcccagctacccctttatagtatgacgagttaacaagttggtgacctgcacaaagcgagacacagctatttaatctcttgccagatatcgcccctcttggtgcgatgctgtacaggtctctgtaaaaagtccttgctgtctcagcagccaatcaacttatagtttatttttttctgggtttttgttttgttttgttttctttctaatcgaggtgtgaaaaagttctaggttcagttgaagttctgatgaagaaacacaattgagattttttcagtgataaaatctgcatatttgtatttcaacaatgtagctaaaacttgatgtaaattcctcctttttttccttttttggcttaatgaatatcatttattcagtatgaaatctttatactatatgttccacgtgttaagaataaatgtacattaaatcttggtaaaaaaaaagtgaa

SEQ ID NO: 303618 - DNA, 5912 bp, Homo sapiens
gcagacaacgccatcctaacatccacacccatatccggtctgagttacaaacaggaaatccagacccctcatgcccaaccttcgtatcagcagcagccacagtctcaaccaccacagctccagtcctctcagcctccatactcccagcagccatcccagcctccacatcagcagtccccggctccatacccctcccagcagtcgacgacacagcagcacccccagagccagcccccctactcacagccacaggctcagtctccttaccagcagcagcaacctcagcagccagcaccctcgacgctctcccagcaggctgcgtatcctcagccccagtctcagcagtcccagcaaactgcctattcccagcagcgcttccctccaccgcaggagctatctcaagattcatttgggtctcaggcatcctcagccccctcaatgacctccagtaagggagggcaagaagatatgaacctgagccttcagtcaagaccctccagcttgcctgatctatctggttcaatagatgacctccccatggggacagaaggagctctgagtcctggagtgagcacatcagggatttccagcagccaaggagagcagagtaatccagctcagtctcctttctctcctcatacctcccctcacctgcctggcatccgaggcccttccccgtcccctgttggctctcccgccagtgttgctcagtctcgctcaggaccactctcgcctgctgcagtgccaggcaaccagatgccacctcggccacccagtggccagtcggacagcatcatgcatccttccatgaaccaatcaagcattgcccaagatcgaggttatatgcagaggaacccccagatgccccagtacagttccccccagcccggctcagccttatctccgcgtcagccttccggaggacagatacacacaggcatgggctcctaccagcagaactccatggggagctatggtccccaggggggtcagtatggcccacaaggtggctaccccaggcagccaaactataatgccttgcccaatgccaactaccccagtgcaggcatggctggaggcataaaccccatgggtgccggaggtcaaatgcatggacagcctggcatcccaccttatggcacactccctccagggaggatgagtcacgcctccatgggcaaccggccttatggccctaacatggccaatatgccacctcaggttgggtcagggatgtgtccccaccagggggcatgaaccggaaaacccaagaaactgctgtcgccatgcatgttgctgccaactctatccaaaacaggccgccaggctaccccaatatgaatcaagggggcatgatgggaactggacctccttatggacaagggattaatagtatggctggcatgatcaaccctcagggacccccatattccatgggtggaaccatggccaacaattctgcagggatggcagccagcccagagatgatgggccttggggatgtaaagttaactccagccaccaaaatgaacaacaaggcagatgggacacccaagacagaatccaaatccaagaaatccagttcttctactacaaccaatgagaagatcaccaagttgtatgagctgggtggtgagcctgagaggaagatgtgggtggaccgttatctggccttcactgaggagaaggccatgggcatgacaaatctgcctgctgtgggtaggaaacctctggacctctatcgcctctatgtgtctgtgaaggagattggtggattgactcaggtcaacaagaacaaaaaatggcgggaacttgcaaccaacctcaatgtgggcacatcaagcagtgctgccagctccttgaaaaagcagtatatccagtgtctctatgcctttgaatgcaagattgaacggggagaagaccctcccccagacatctttgcagctgctgattccaagaagtcccagcccaagatccagcctccctctcctgcgggatcaggatctatgcaggggccccagactccccagtcaaccagcagttccatggcagaaggaggagacttaaagccaccaactccagcatccacaccacacagtcagatccccccattgccaggcatgagcaggagcaattcagttgggatccaggatgcctttaatgatggaagtgactccacattccagaagcggaattccatgactccaaaccctgggtatcagcccagtatgaatacctctgacatgatggggcgcatgtcctatgagccaaataaggatccttatggcagcatgaggaaagctccagggagtgatcccttcatgtcctcagggcagggccccaacggcgggatgggtgacccctacagtcgtgctgccggccctgggctaggaaatgtggcgatgggaccacgacagcactatccctatggaggtccttatgacagagtgaggacggagcctggaatagggcctgagggaaacatgagcactggggccccacagccgaatctcatgccttccaacccagactcggggatgtattctcctagccgctaccccccgcagcagcagcagcagcagcagcaacgacatgattcctatggcaatcagttctccacccaaggcaccccttctggcagccccttccccagccagcagactacaatgtatcaacagcaacagcaggaaccccggaggcatggcgggtaatgatgtccctcaagtctggtctcctggcagagagcacatgggcattagataccatcaacatcctgctgtatgatgacaacagcatcatgaccttcaacctcagtcagctcccagggttgctagagctccttgtagaatatttccgacgatgcctgattgagatctttggcattttaaaggagtatgaggtgggtgacccaggacagagaacgctactggatcctgggaggttcagcaaggtgtctagtccagctcccatggagggtggggaagaagaagaagaacttctaggtcctaaactagaagaggaagaagaagaggaagtagttgaaaatgatgaggagatagccttttcaggcaaggacaagccagcttcagagaatagtgaggagaagctgatcagtaagtttgacaagcttccagtaaagatcgtacagaagaatgatccatttgtggtggactgctcagataagcttgggcgtgtgcaggagtttgacagtggcctgctgcactggcggattggtgggggggacaccactgagcatatccagacccacttcgagagcaagacagagctgctgccttcccggcctcacgcaccctgcccaccagcccctcggaagcatgtgacaacagcagagggtacaccagggacaacagaccaggaggggcccccacctgatggacctccagaaaaacggatcacagccactatggatgacatgttgtctactcggtctagcaccttgaccgaggatggagctaagagttcagaggccatcaaggagagcagcaagtttccatttggcattagcccagcacagagccaccggaacatcaagatcctagaggacgaaccccacagtaaggatgagaccccactgtgtacccttctggactggcaggattctcttgccaagcgctgcgtctgtgtgtccaataccattcgaagcctgtcatttgtgccaggcaatgactttgagatgtccaaacacccagggctgctgctcatcctgggcaagctgatcctgctgcaccacaagcacccagaacggaagcaggcaccactaacttatgaaaaggaggaggaacaggaccaaggggtgagctgcaacaaagtggagtggtggtgggactgcttggagatgctccgggaaaacaccttggttacactcgccaacatctcggggcagttggacctatctccataccccgagagcatttgcctgcctgtcctggacggactcctacactgggcagtttgcccttcagctgaagcccaggaccccttttccaccctgggccccaatgccgtcctttccccgcagagactggtcttggaaaccctcagcaaactcagcatccaggacaacaatgtggacctgattctggccacaccccccttcagccgcctggagaagttgtatagcactatggtgcgcttcctcagtgaccgaaagaacccggtgtgccgggagatggctgtggtactgctggccaacctggctcagggggacagcctggcagctcgtgccattgcagtgcagaagggcagtatcggcaacctcctgggcttcctagaggacagccttgccgccacacagttccagcagagccaggccagcctcctccacatgcagaacccaccctttgagccaactagtgtggacatgatgcggcgggctgcccgcgcgctgcttgccttggccaaggtggacgagaaccactcagagtttactctgtacgaatcacggctgttggacatctcggtatcaccgttgatgaactcattggtttcacaagtcatttgtgatgtactgtttttgattggccagtcatgacagccgtgggacacctcccccccccgtgtgtgtgtgcgtgtgtggagaacttagaaactgactgttgccctttatttatgcaaaaccacctcagaatccagtttaccctgtgctgtccagcttctcccttgggaaaaagtctctcctgtttctctctcctccttccacctcccctccctccatcacctcacgcctttctgttccttgtcctcaccttactcccctcaggaccctaccccaccctctttgaaaagacaaagctctgcctacatagaagactttttttattttaaccaaagttactgttgtttacagtgagtttggggaaaaaaaataaaataaaaatggctttcccagtccttgcatcaacgggatgccacatttcataactgtttttaatggtaaaaaaaaaaaaaaaaaatacaaaaaaaaattctgaaggacaaaaaaggtgactgctgaactgtgtgtggtttattgttgtacattcacaatcttgcaggagccaagaagttcgcagttgtgaacagaccctgttcactggagaggcctgtgcagtagagtgtagaccctttcatgtactgtactgtacacctgatactgtaaacatactgtaataataatgtctcacatggaaacagaaaacgctgggtcagcagcaagctgtagtttttaaaaatgtttttagttaaacgttgaggagaaaaaaaaaaaaggcttttcccccaaagtatcatgtgtgaacctacaacaccctgacctctttctctcctccttgattgtatgaataaccctgagatcacctcttagaactggttttaacctttagctgcagcggctacgctgccacgtgtgtatatatatgacgttgtacattgcacatacccttggatccccacagtttggtcctcctcccagctacccctttatagtatgacgagttaacaagttggtgacctgcacaaagcgagacacagctatttaatctcttgccagatatcgcccctcttggtgcgatgctgtacaggtctctgtaaaaagtccttgctgtctcagcagccaatcaacttatagtttatttttttctgggtttttgttttgttttgttttctttctaatcgaggtgtgaaaaagttctaggttcagttgaagttctgatgaagaaacacaattgagattttttcagtgataaaatctgcatatttgtatttcaacaatgtagctaaaacttgatgtaaattcctcctttttttccttttttggcttaatgaatatcatttattcagtatgaaatctttatactatatgttccacgtgttaagaataaatgtacattaaatcttggtaaaaaaaaagtgaa

SEQ ID NO: 303619 - DNA, 4448 bp, Homo sapiens
ctggtggttggggaagccgcggtcgtgagagttctgctggtaaggagactgagcctgtggctgtgagtaggggggctggctctgggggtgctgctgtgtcgtcgactgctgggaggggtatggagccggggactgctgatgtggaggctgggatggctgctgggagtatggagcctgagaggaagatgtgggtggaccgttatctggccttcactgaggagaaggccatgggcatgacaaatctgcctgctgtgggtaggaaacctctggacctctatcgcctctatgtgtctgtgaaggagattggtggattgactcaggtcaacaagaacaaaaaatggcgggaacttgcaaccaacctcaatgtgggcacatcaagcagtgctgccagctccttgaaaaagcagtatatccagtgtctctatgcctttgaatgcaagattgaacggggagaagaccctcccccagacatctttgcagctgctgattccaagaagtcccagcccaagatccagcctccctctcctgcgggatcaggatctatgcaggggccccagactccccagtcaaccagcagttccatggcagaaggaggagacttaaagccaccaactccagcatccacaccacacagtcagatccccccattgccaggcatgagcaggagcaattcagttgggatccaggatgcctttaatgatggaagtgactccacattccagaagcggaattccatgactccaaaccctgggtatcagcccagtatgaatacctctgacatgatggggcgcatgtcctatgagccaaataaggatccttatggcagcatgaggaaagctccagggagtgatcccttcatgtcctcagggcagggccccaacggcgggatgggtgacccctacagtcgtgctgccggccctgggctaggaaatgtggcgatgggaccacgacagcactatccctatggaggtccttatgacagagtgaggacggagcctggaatagggcctgagggaaacatgagcactggggccccacagccgaatctcatgccttccaacccagactcggggatgtattctcctagccgctaccccccgcagcagcagcagcagcagcagcaacgacatgattcctatggcaatcagttctccacccaaggcaccccttctggcagccccttccccagccagcagactacaatgtatcaacagcaacagcaggaaccccggaggcatggcgggtaatgatgtccctcaagtctggtctcctggcagagagcacatgggcattagataccatcaacatcctgctgtatgatgacaacagcatcatgaccttcaacctcagtcagctcccagggttgctagagctccttgtagaatatttccgacgatgcctgattgagatctttggcattttaaaggagtatgaggtgggtgacccaggacagagaacgctactggatcctgggaggttcagcaaggtgtctagtccagctcccatggagggtggggaagaagaagaagaacttctaggtcctaaactagaagaggaagaagaagaggaagtagttgaaaatgatgaggagatagccttttcaggcaaggacaagccagcttcagagaatagtgaggagaagctgatcagtaagtttgacaagcttccagtaaagatcgtacagaagaatgatccatttgtggtggactgctcagataagcttgggcgtgtgcaggagtttgacagtggcctgctgcactggcggattggtgggggggacaccactgagcatatccagacccacttcgagagcaagacagagctgctgccttcccggcctcacgcaccctgcccaccagcccctcggaagcatgtgacaacagcagagggtacaccagggacaacagaccaggaggggcccccacctgatggacctccagaaaaacggatcacagccactatggatgacatgttgtctactcggtctagcaccttgaccgaggatggagctaagagttcagaggccatcaaggagagcagcaagtttccatttggcattagcccagcacagagccaccggaacatcaagatcctagaggacgaaccccacagtaaggatgagaccccactgtgtacccttctggactggcaggattctcttgccaagcgctgcgtctgtgtgtccaataccattcgaagcctgtcatttgtgccaggcaatgactttgagatgtccaaacacccagggctgctgctcatcctgggcaagctgatcctgctgcaccacaagcacccagaacggaagcaggcaccactaacttatgaaaaggaggaggaacaggaccaaggggtgagctgcaacaaagtggagtggtggtgggactgcttggagatgctccgggaaaacaccttggttacactcgccaacatctcggggcagttggacctatctccataccccgagagcatttgcctgcctgtcctggacggactcctacactgggcagtttgcccttcagctgaagcccaggaccccttttccaccctgggccccaatgccgtcctttccccgcagagactggtcttggaaaccctcagcaaactcagcatccaggacaacaatgtggacctgattctggccacaccccccttcagccgcctggagaagttgtatagcactatggtgcgcttcctcagtgaccgaaagaacccggtgtgccgggagatggctgtggtactgctggccaacctggctcagggggacagcctggcagctcgtgccattgcagtgcagaagggcagtatcggcaacctcctgggcttcctagaggacagccttgccgccacacagttccagcagagccaggccagcctcctccacatgcagaacccaccctttgagccaactagtgtggacatgatgcggcgggctgcccgcgcgctgcttgccttggccaaggtggacgagaaccactcagagtttactctgtacgaatcacggctgttggacatctcggtatcaccgttgatgaactcattggtttcacaagtcatttgtgatgtactgtttttgattggccagtcatgacagccgtgggacacctcccccccccgtgtgtgtgtgcgtgtgtggagaacttagaaactgactgttgccctttatttatgcaaaaccacctcagaatccagtttaccctgtgctgtccagcttctcccttgggaaaaagtctctcctgtttctctctcctccttccacctcccctccctccatcacctcacgcctttctgttccttgtcctcaccttactcccctcaggaccctaccccaccctctttgaaaagacaaagctctgcctacatagaagactttttttattttaaccaaagttactgttgtttacagtgagtttggggaaaaaaaataaaataaaaatggctttcccagtccttgcatcaacgggatgccacatttcataactgtttttaatggtaaaaaaaaaaaaaaaaaatacaaaaaaaaattctgaaggacaaaaaaggtgactgctgaactgtgtgtggtttattgttgtacattcacaatcttgcaggagccaagaagttcgcagttgtgaacagaccctgttcactggagaggcctgtgcagtagagtgtagaccctttcatgtactgtactgtacacctgatactgtaaacatactgtaataataatgtctcacatggaaacagaaaacgctgggtcagcagcaagctgtagtttttaaaaatgtttttagttaaacgttgaggagaaaaaaaaaaaaggcttttcccccaaagtatcatgtgtgaacctacaacaccctgacctctttctctcctccttgattgtatgaataaccctgagatcacctcttagaactggttttaacctttagctgcagcggctacgctgccacgtgtgtatatatatgacgttgtacattgcacatacccttggatccccacagtttggtcctcctcccagctacccctttatagtatgacgagttaacaagttggtgacctgcacaaagcgagacacagctatttaatctcttgccagatatcgcccctcttggtgcgatgctgtacaggtctctgtaaaaagtccttgctgtctcagcagccaatcaacttatagtttatttttttctgggtttttgttttgttttgttttctttctaatcgaggtgtgaaaaagttctaggttcagttgaagttctgatgaagaaacacaattgagattttttcagtgataaaatctgcatatttgtatttcaacaatgtagctaaaacttgatgtaaattcctcctttttttccttttttggcttaatgaatatcatttattcagtatgaaatctttatactatatgttccacgtgttaagaataaatgtacattaaatcttggtaaaaaaaaagtgaa

SEQ ID NO: 303620 - DNA, 3891 bp, Homo sapiens
acaggggcagagggaccatatgggggctggcgtgtgccatgggaaggccacgagccttcgtggttggccctctgatctgtgtgcagcatttcatctgttcggttcacgaaatgatgggcggccccatacaggcatcagctgaggttgctcagcaaggcaccatgtggcaggggcgtaatgacatgacctataattatgccaacaggcagagcacgggctctgccccccagggccccgcctatcatggcgtgaaccgaacagatgaaatgctgcacacagatcagagggccaaccacgaaggctcgtggccttcccatggcacacgccagcccccatatggtccctctgcccctgtgccccccatgacaaggccccctccatctaactaccagcccccaccaagcatgcagaatcacattcctcaggtatccagccctgctcccctgccccggccaatggagaaccgcacctctcctagcaagtctccattcctgcactctgggatgaaaatgcagaaggcaggtcccccagtacctgcctcgcacatagcacctgcccctgtgcagccccccatgattcggcgggatatcaccttcccacctggctctgttgaagccacacagcctgtgttgaagcagaggaggcggctcacaatgaaagacattggaaccccggaggcatggcgggtaatgatgtccctcaagtctggtctcctggcagagagcacatgggcattagataccatcaacatcctgctgtatgatgacaacagcatcatgaccttcaacctcagtcagctcccagggttgctagagctccttgtagaatatttccgacgatgcctgattgagatctttggcattttaaaggagtatgaggtgggtgacccaggacagagaacgctactggatcctgggaggttcagcaaggtgtctagtccagctcccatggagggtggggaagaagaagaagaacttctaggtcctaaactagaagaggaagaagaagaggaagtagttgaaaatgatgaggagatagccttttcaggcaaggacaagccagcttcagagaatagtgaggagaagctgatcagtaagtttgacaagcttccagtaaagatcgtacagaagaatgatccatttgtggtggactgctcagataagcttgggcgtgtgcaggagtttgacagtggcctgctgcactggcggattggtgggggggacaccactgagcatatccagacccacttcgagagcaagacagagctgctgccttcccggcctcacgcaccctgcccaccagcccctcggaagcatgtgacaacagcagagggtacaccagggacaacagaccaggaggggcccccacctgatggacctccagaaaaacggatcacagccactatggatgacatgttgtctactcggtctagcaccttgaccgaggatggagctaagagttcagaggccatcaaggagagcagcaagtttccatttggcattagcccagcacagagccaccggaacatcaagatcctagaggacgaaccccacagtaaggatgagaccccactgtgtacccttctggactggcaggattctcttgccaagcgctgcgtctgtgtgtccaataccattcgaagcctgtcatttgtgccaggcaatgactttgagatgtccaaacacccagggctgctgctcatcctgggcaagctgatcctgctgcaccacaagcacccagaacggaagcaggcaccactaacttatgaaaaggaggaggaacaggaccaaggggtgagctgcaacaaagtggagtggtggtgggactgcttggagatgctccgggaaaacaccttggttacactcgccaacatctcggggcagttggacctatctccataccccgagagcatttgcctgcctgtcctggacggactcctacactgggcagtttgcccttcagctgaagcccaggaccccttttccaccctgggccccaatgccgtcctttccccgcagagactggtcttggaaaccctcagcaaactcagcatccaggacaacaatgtggacctgattctggccacaccccccttcagccgcctggagaagttgtatagcactatggtgcgcttcctcagtgaccgaaagaacccggtgtgccgggagatggctgtggtactgctggccaacctggctcagggggacagcctggcagctcgtgccattgcagtgcagaagggcagtatcggcaacctcctgggcttcctagaggacagccttgccgccacacagttccagcagagccaggccagcctcctccacatgcagaacccaccctttgagccaactagtgtggacatgatgcggcgggctgcccgcgcgctgcttgccttggccaaggtggacgagaaccactcagagtttactctgtacgaatcacggctgttggacatctcggtatcaccgttgatgaactcattggtttcacaagtcatttgtgatgtactgtttttgattggccagtcatgacagccgtgggacacctcccccccccgtgtgtgtgtgcgtgtgtggagaacttagaaactgactgttgccctttatttatgcaaaaccacctcagaatccagtttaccctgtgctgtccagcttctcccttgggaaaaagtctctcctgtttctctctcctccttccacctcccctccctccatcacctcacgcctttctgttccttgtcctcaccttactcccctcaggaccctaccccaccctctttgaaaagacaaagctctgcctacatagaagactttttttattttaaccaaagttactgttgtttacagtgagtttggggaaaaaaaataaaataaaaatggctttcccagtccttgcatcaacgggatgccacatttcataactgtttttaatggtaaaaaaaaaaaaaaaaaatacaaaaaaaaattctgaaggacaaaaaaggtgactgctgaactgtgtgtggtttattgttgtacattcacaatcttgcaggagccaagaagttcgcagttgtgaacagaccctgttcactggagaggcctgtgcagtagagtgtagaccctttcatgtactgtactgtacacctgatactgtaaacatactgtaataataatgtctcacatggaaacagaaaacgctgggtcagcagcaagctgtagtttttaaaaatgtttttagttaaacgttgaggagaaaaaaaaaaaaggcttttcccccaaagtatcatgtgtgaacctacaacaccctgacctctttctctcctccttgattgtatgaataaccctgagatcacctcttagaactggttttaacctttagctgcagcggctacgctgccacgtgtgtatatatatgacgttgtacattgcacatacccttggatccccacagtttggtcctcctcccagctacccctttatagtatgacgagttaacaagttggtgacctgcacaaagcgagacacagctatttaatctcttgccagatatcgcccctcttggtgcgatgctgtacaggtctctgtaaaaagtccttgctgtctcagcagccaatcaacttatagtttatttttttctgggtttttgttttgttttgttttctttctaatcgaggtgtgaaaaagttctaggttcagttgaagttctgatgaagaaacacaattgagattttttcagtgataaaatctgcatatttgtatttcaacaatgtagctaaaacttgatgtaaattcctcctttttttccttttttggcttaatgaatatcatttattcagtatgaaatctttatactatatgttccacgtgttaagaataaatgtacattaaatcttggtaaaaaaaaagtgaa

SEQ ID NO: 303621 - DNA, 1442 bp, Homo sapiens
tactagcctatagcgttgactaacttcctatgtgttcagcattcatcgtgatctactgtttctttgatggccattcttgattggagaaacccctggctcccccccccgtgtgtgtgtgcgtgtgtggagaacttagaaactgactgttgccctttatttatgcaaaaccacctcagaatccagtttaccctgtgctgtccagcttctcccttgggaaaaagtctctcctgtttctctctcctccttccacctcccctccctccatcacctcacgcctttctgttccttgtcctcaccttactcccctcaggaccctaccccaccctctttgaaaagacaaagctctgcctacatagaagactttttttattttaaccaaagttactgttgtttacagtgagtttggggaaaaaaaataaaataaaaatggctttcccagtccttgcatcaacgggatgccacatttcataactgtttttaatggtaaaaaaaaaaaaaaaaaatacaaaaaaaaattctgaaggacaaaaaaggtgactgctgaactgtgtgtggtttattgttgtacattcacaatcttgcaggagccaagaagttcgcagttgtgaacagaccctgttcactggagaggcctgtgcagtagagtgtagaccctttcatgtactgtactgtacacctgatactgtaaacatactgtaataataatgtctcacatggaaacagaaaacgctgggtcagcagcaagctgtagtttttaaaaatgtttttagttaaacgttgaggagaaaaaaaaaaaaggcttttcccccaaagtatcatgtgtgaacctacaacaccctgacctctttctctcctccttgattgtatgaataaccctgagatcacctcttagaactggttttaacctttagctgcagcggctacgctgccacgtgtgtatatatatgacgttgtacattgcacatacccttggatccccacagtttggtcctcctcccagctacccctttatagtatgacgagttaacaagttggtgacctgcacaaagcgagacacagctatttaatctcttgccagatatcgcccctcttggtgcgatgctgtacaggtctctgtaaaaagtccttgctgtctcagcagccaatcaacttatagtttatttttttctgggtttttgttttgttttgttttctttctaatcgaggtgtgaaaaagttctaggttcagttgaagttctgatgaagaaacacaattgagattttttcagtgataaaatctgcatatttgtatttcaacaatgtagctaaaacttgatgtaaattcctcctttttttccttttttggcttaatgaatatcatttattcagtatgaaatctttatactatatgttccacgtgttaagaataaatgtacattaaatcttggtaaaaaaaaagtgaa

SEQ ID NO: 303622 - DNA, 670 bp, Homo sapiens
tacatatacaatcagctcgtacccaggcttttcccccaaagtatcatgtgtgaacctacaacaccctgacctctttctctcctccttgattgtatgaataaccctgagatcacctcttagaactggttttaacctttagctgcagcggctacgctgccacgtgtgtatatatatgacgttgtacattgcacatacccttggatccccacagtttggtcctcctcccagctacccctttatagtatgacgagttaacaagttggtgacctgcacaaagcgagacacagctatttaatctcttgccagatatcgcccctcttggtgcgatgctgtacaggtctctgtaaaaagtccttgctgtctcagcagccaatcaacttatagtttatttttttctgggtttttgttttgttttgttttctttctaatcgaggtgtgaaaaagttctaggttcagttgaagttctgatgaagaaacacaattgagattttttcagtgataaaatctgcatatttgtatttcaacaatgtagctaaaacttgatgtaaattcctcctttttttccttttttggcttaatgaatatcatttattcagtatgaaatctttatactatatgttccacgtgttaagaataaatgtacattaaatcttggtaaaaaaaaagtgaa

SEQ ID NO: 303623 - DNA, 2628 bp, Homo sapiens
  misc_feature (488)..(488): n is a, c, g, or t
  misc_feature (501)..(501): n is a, c, g, or t
  misc_feature (579)..(579): n is a, c, g, or t
  misc_feature (599)..(599): n is a, c, g, or t
gaattccgaaagcggagagtcacagcggggccaggccctggggagcggagcctccaccgcccccctcattcccaggcaagggcttggggggaatgagccgggagagccgggtcccgagcctacagagccgggagcagctgagccgccggcgcctcggccgccgccgcctcctcctcctcctccgccgccgccagcccggagcctgagccggcggggcgggggggagaggagcgagcgcagcgcagcagcggagccccgcgaggcccgcccgggcgggtggggagggcagcccgggggactgggccccggggcggggtgggagggggggagaagacgaagacagggccgggtctctccgcggacgagacagcggggatcatggccgcgcaggtcgcccccgccgccgccagcagcctgggcaacccgccgccgccgccgccctcggagctgaagaaagccgagcagcagcagcgggaggaggcgggggncgaggcggcggcngcggcagcggccgagcgcggggaaatgaaggcagccgccgggcaggaaagcgagggccccgccgtggggccgccgcanccgctgggaaaggagctgcnggacggggccgagagcaatgggggtggcggcggcggcggagccggcagcggcggcgggcccggcgcggagccggacctgaagaactcgaacgggaacgcgggccctaggcccgccctgaacaataacctcacggagccgcccggcggcggcggtggcggcagcagcgatggggtgggggcgcctcctcactcagccgcggccgccttgccgcccccagcctacggcttcgggcaaccctacggccggagcccgtctgccgtcgccgccgccgcggccgccgtcttccaccaacaacatggcggacaacaaagccctggcctggcagcgctgcagagcggcggcggcgggggcctggagccctacgcggggccccagcagaactctcacgaccacggcttccccaaccaccagtacaactcctactaccccaaccgcagcgcctaccccccgcccgccccggcctacgcgctgagctccccgagaggtggcactccgggctccggcgcggcggcggctgccggctccaagccgcctccctcctccagcgcctccgcctcctcgtcgtcttcgtccttcgctcagcagcgcttcggggccatggggggaggcggcccctccgcggccggcgggggaactccccagcccaccgccacccccaccctcaaccaactgctcacgtcgcccagctcggcccggggctaccagggctaccccgggggcgactacagtggcgggccccaggacgggggcgccggcaagggcccggcggacatggcctcgcagtgttggggggctgcggcggcggcagctgcggcggcggccgcctcgggaggggcccaacaaaggagccaccacgcgcccatgagccccgggagcagcggcggcggggggcagccgctcgcccggacccctcagccatccagtccaatggatcagatgggcaagatgagacctcagccatatggcgggactaacccatactcgcagcaacagggacctccgtcaggaccgcagcaaggacatgggtacccagggcagccatacgggtcccagaccccgcagcggtacccgatgaccatgcagggccgggcgcagagtgccatgggcggcctctcttatacacagcagattcctccttatggacaacaaggccccagcgggtatggtcaacagggccagactccatattacaaccagcaaagtcctcaccctcagcagcagcagccaccctactcccagcaaccaccgtcccagacccctcatgcccaaccttcgtatcagcagcagccacagtctcaaccaccacagctccagtcctctcagcctccatactcccagcagccatcccagcctccacatcagcagtccccggctccatacccctcccagcagtcgacgacacagcagcacccccagagccagcccccctactcacagccacaggctcagtctccttaccagcagcagcaacctcagcagccagcaccctcgacgctctcccagcaggctgcgtatcctcagccccagtctcagcagtcccagcaaactgcctattcccagcagcgcttccctccaccgcaggagctatctcaagattcatttgggtctcaggcatcctcagccccctcaatgacctccagtaagggagggcaagaagatatgaacctgagccttcagtcaagaccctccagcttgcctgtgagtatttctgcaccttctgaaaggtgataggggcagagaggaaaccaatgcaaactagttagtttctggttggaagtttagctaattttgacctaaatgaataagttatttcttgaattcaaggaacttaaaggctgacttgtagatgtctgttctgtctccctgcccagggaataggtttgtgatctgtttagtttgtttttgtctttttaagtcttgtgcttttagacatggacccacatgaggggcagagaagatggagatatcagaagcactgtctgctctccatcaaagttgagaaaaatatcagtttcttgactttactct

SEQ ID NO: 303624 - DNA, 2593 bp, Homo sapiens
  misc_feature (488)..(488): n is a, c, g, or t
  misc_feature (501)..(501): n is a, c, g, or t
  misc_feature (579)..(579): n is a, c, g, or t
  misc_feature (599)..(599): n is a, c, g, or t
gaattccgaaagcggagagtcacagcggggccaggccctggggagcggagcctccaccgcccccctcattcccaggcaagggcttggggggaatgagccgggagagccgggtcccgagcctacagagccgggagcagctgagccgccggcgcctcggccgccgccgcctcctcctcctcctccgccgccgccagcccggagcctgagccggcggggcgggggggagaggagcgagcgcagcgcagcagcggagccccgcgaggcccgcccgggcgggtggggagggcagcccgggggactgggccccggggcggggtgggagggggggagaagacgaagacagggccgggtctctccgcggacgagacagcggggatcatggccgcgcaggtcgcccccgccgccgccagcagcctgggcaacccgccgccgccgccgccctcggagctgaagaaagccgagcagcagcagcgggaggaggcgggggncgaggcggcggcngcggcagcggccgagcgcggggaaatgaaggcagccgccgggcaggaaagcgagggccccgccgtggggccgccgcanccgctgggaaaggagctgcnggacggggccgagagcaatgggggtggcggcggcggcggagccggcagcggcggcgggcccggcgcggagccggacctgaagaactcgaacgggaacgcgggccctaggcccgccctgaacaataacctcacggagccgcccggcggcggcggtggcggcagcagcgatggggtgggggcgcctcctcactcagccgcggccgccttgccgcccccagcctacggcttcgggcaaccctacggccggagcccgtctgccgtcgccgccgccgcggccgccgtcttccaccaacaacatggcggacaacaaagccctggcctggcagcgctgcagagcggcggcggcgggggcctggagccctacgcggggccccagcagaactctcacgaccacggcttccccaaccaccagtacaactcctactaccccaaccgcagcgcctaccccccgcccgccccggcctacgcgctgagctccccgagaggtggcactccgggctccggcgcggcggcggctgccggctccaagccgcctccctcctccagcgcctccgcctcctcgtcgtcttcgtccttcgctcagcagcgcttcggggccatggggggaggcggcccctccgcggccggcgggggaactccccagcccaccgccacccccaccctcaaccaactgctcacgtcgcccagctcggcccggggctaccagggctaccccgggggcgactacagtggcgggccccaggacgggggcgccggcaagggcccggcggacatggcctcgcagtgttggggggctgcggcggcggcagctgcggcggcggccgcctcgggaggggcccaacaaaggagccaccacgcgcccatgagccccgggagcagcggcggcggggggcagccgctcgcccggacccctcagccatccagtccaatggatcagatgggcaagatgagacctcagccatatggcgggactaacccatactcgcagcaacagggacctccgtcaggaccgcagcaaggacatgggtacccagggcagccatacgggtcccagaccccgcagcggtacccgatgaccatgcagggccgggcgcagagtgccatgggcggcctctcttatacacagcagattcctccttatggacaacaaggccccagcgggtatggtcaacagggccagactccatattacaaccagcaaagtcctcaccctcagcagcagcagccaccctactcccagcaaccaccgtcccagacccctcatgcccaaccttcgtatcagcagcagccacagtctcaaccaccacagctccagtcctctcagcctccatactcccagcagccatcccagcctccacatcagcagtccccggctccatacccctcccagcagtcgacgacacagcagcacccccagagccagcccccctactcacagccacaggctcagtctccttaccagcagcagcaacctcagcagccagcaccctcgacgctctcccagcaggctgcgtatcctcagccccagtctcagcagtcccagcaaactgcctattcccagcagcgcttccctccaccgcaggagctatctcaagattcatttgggtctcaggcatcctcagccccctcaatgacctccagtaagggagggcaagaagatatgaacctgagccttcagtcaagaccctccagcttgcctgatctatctggttcaatagatgacctccccatggggacagaaggagctctgagtcctggagtgagcacatcagggatttccagcagccaaggagagcagagtaatccagctcagtctcctttctctcctcatacctcccctcacctgcctggcatccgaggcccttccccgtcccctgttggctctcccgccagtgttgctcagtctcgctcaggaccactctcgcctgctgcagtgccagcaacagatgcacctggcaccagtggcatcgacacatatgatattcttgaaccga

SEQ ID NO: 303625 - DNA, 2355 bp, Homo sapiens
  misc_feature (488)..(488): n is a, c, g, or t
  misc_feature (501)..(501): n is a, c, g, or t
  misc_feature (579)..(579): n is a, c, g, or t
  misc_feature (599)..(599): n is a, c, g, or t
gaattccgaaagcggagagtcacagcggggccaggccctggggagcggagcctccaccgcccccctcattcccaggcaagggcttggggggaatgagccgggagagccgggtcccgagcctacagagccgggagcagctgagccgccggcgcctcggccgccgccgcctcctcctcctcctccgccgccgccagcccggagcctgagccggcggggcgggggggagaggagcgagcgcagcgcagcagcggagccccgcgaggcccgcccgggcgggtggggagggcagcccgggggactgggccccggggcggggtgggagggggggagaagacgaagacagggccgggtctctccgcggacgagacagcggggatcatggccgcgcaggtcgcccccgccgccgccagcagcctgggcaacccgccgccgccgccgccctcggagctgaagaaagccgagcagcagcagcgggaggaggcgggggncgaggcggcggcngcggcagcggccgagcgcggggaaatgaaggcagccgccgggcaggaaagcgagggccccgccgtggggccgccgcanccgctgggaaaggagctgcnggacggggccgagagcaatgggggtggcggcggcggcggagccggcagcggcggcgggcccggcgcggagccggacctgaagaactcgaacgggaacgcgggccctaggcccgccctgaacaataacctcacggagccgcccggcggcggcggtggcggcagcagcgatggggtgggggcgcctcctcactcagccgcggccgccttgccgcccccagcctacggcttcgggcaaccctacggccggagcccgtctgccgtcgccgccgccgcggccgccgtcttccaccaacaacatggcggacaacaaagccctggcctggcagcgctgcagagcggcggcggcgggggcctggagccctacgcggggccccagcagaactctcacgaccacggcttccccaaccaccagtacaactcctactaccccaaccgcagcgcctaccccccgcccgccccggcctacgcgctgagctccccgagaggtggcactccgggctccggcgcggcggcggctgccggctccaagccgcctccctcctccagcgcctccgcctcctcgtcgtcttcgtccttcgctcagcagcgcttcggggccatggggggaggcggcccctccgcggccggcgggggaactccccagcccaccgccacccccaccctcaaccaactgctcacgtcgcccagctcggcccggggctaccagggctaccccgggggcgactacagtggcgggccccaggacgggggcgccggcaagggcccggcggacatggcctcgcagtgttggggggctgcggcggcggcagctgcggcggcggccgcctcgggaggggcccaacaaaggagccaccacgcgcccatgagccccgggagcagcggcggcggggggcagccgctcgcccggacccctcagccatccagtccaatggatcagatgggcaagatgagacctcagccatatggcgggactaacccatactcgcagcaacagggacctccgtcaggaccgcagcaaggacatgggtacccagggcagccatacgggtcccagaccccgcagcggtacccgatgaccatgcagggccgggcgcagagtgccatgggcggcctctcttatacacagcagattcctccttatggacaacaaggccccagcgggtatggtcaacagggccagactccatattacaaccagcaaagtcctcaccctcagcagcagcagccaccctactcccagcaaccaccgtcccagacccctcatgcccaaccttcgtatcagcagcagccacagtctcaaccaccacagctccagtcctctcagcctccatactcccagcagccatcccagcctccacatcagcagtccccggctccatacccctcccagcagtcgacgacacagcagcacccccagagccagcccccctactcacagccacaggctcagtctccttaccagcagcagcaacctcagcagccagcaccctcgacgctctcccagcaggctgcgtatcctcagccccagtctcagcagtcccagcaaactgcctattcccagcagcgcttccctccaccgcaggagctatctcaagattcatttgggtctcaggcatcctcagccccctcaatgacctccagtaagggagggcaagaagatatgaacctgagccttcagtcaagaccctccagcttgcctccatccagtccaatggatcagatgggcaagatgagacctcagccatatggcgggacc

SEQ ID NO: 303626 - DNA, 2043 bp, Homo sapiens
  misc_feature (488)..(488): n is a, c, g, or t
  misc_feature (501)..(501): n is a, c, g, or t
  misc_feature (579)..(579): n is a, c, g, or t
  misc_feature (599)..(599): n is a, c, g, or t
gaattccgaaagcggagagtcacagcggggccaggccctggggagcggagcctccaccgcccccctcattcccaggcaagggcttggggggaatgagccgggagagccgggtcccgagcctacagagccgggagcagctgagccgccggcgcctcggccgccgccgcctcctcctcctcctccgccgccgccagcccggagcctgagccggcggggcgggggggagaggagcgagcgcagcgcagcagcggagccccgcgaggcccgcccgggcgggtggggagggcagcccgggggactgggccccggggcggggtgggagggggggagaagacgaagacagggccgggtctctccgcggacgagacagcggggatcatggccgcgcaggtcgcccccgccgccgccagcagcctgggcaacccgccgccgccgccgccctcggagctgaagaaagccgagcagcagcagcgggaggaggcgggggncgaggcggcggcngcggcagcggccgagcgcggggaaatgaaggcagccgccgggcaggaaagcgagggccccgccgtggggccgccgcanccgctgggaaaggagctgcnggacggggccgagagcaatgggggtggcggcggcggcggagccggcagcggcggcgggcccggcgcggagccggacctgaagaactcgaacgggaacgcgggccctaggcccgccctgaacaataacctcacggagccgcccggcggcggcggtggcggcagcagcgatggggtgggggcgcctcctcactcagccgcggccgccttgccgcccccagcctacggcttcgggcaaccctacggccggagcccgtctgccgtcgccgccgccgcggccgccgtcttccaccaacaacatggcggacaacaaagccctggcctggcagcgctgcagagcggcggcggcgggggcctggagccctacgcggggccccagcagaactctcacgaccacggcttccccaaccaccagtacaactcctactaccccaaccgcagcgcctaccccccgcccgccccggcctacgcgctgagctccccgagaggtggcactccgggctccggcgcggcggcggctgccggctccaagccgcctccctcctccagcgcctccgcctcctcgtcgtcttcgtccttcgctcagcagcgcttcggggccatggggggaggcggcccctccgcggccggcgggggaactccccagcccaccgccacccccaccctcaaccaactgctcacgtcgcccagctcggcccggggctaccagggctaccccgggggcgactacagtggcgggccccaggacgggggcgccggcaagggcccggcggacatggcctcgcagtgttggggggctgcggcggcggcagctgcggcggcggccgcctcgggaggggcccaacaaaggagccaccacgcgcccatgagccccgggagcagcggcggcggggggcagccgctcgcccggacccctcagccatccagtccaatggatcagatgggcaagatgagacctcagccatatggcgggactaacccatactcgcagcaacagggacctccgtcaggaccgcagcaaggacatgggtacccagggcagccatacgggtcccagaccccgcagcggtacccgatgaccatgcagggccgggcgcagagtgccatgggcggcctctcttatacacagcagattcctccttatggacaacaaggccccagcgggtatggtcaacagggccagactccatattacaaccagcaaagtcctcaccctcagcagcagcagccaccctactcccagcaaccaccgtcccagacccctcatgcccaaccttcgtatcagcagcagccacagtctcaaccaccacagctccagtcctctcagcctccatactcccagcagccatcccagcctccacatcagcagtccccggctccatacccctcccagcacaaacgagcacagcacacacacgagcatacagcataagcaggtaccgactga

SEQ ID NO: 303627 - DNA, 2061 bp, Homo sapiens
  misc_feature (488)..(488): n is a, c, g, or t
  misc_feature (501)..(501): n is a, c, g, or t
  misc_feature (579)..(579): n is a, c, g, or t
  misc_feature (599)..(599): n is a, c, g, or t
gaattccgaaagcggagagtcacagcggggccaggccctggggagcggagcctccaccgcccccctcattcccaggcaagggcttggggggaatgagccgggagagccgggtcccgagcctacagagccgggagcagctgagccgccggcgcctcggccgccgccgcctcctcctcctcctccgccgccgccagcccggagcctgagccggcggggcgggggggagaggagcgagcgcagcgcagcagcggagccccgcgaggcccgcccgggcgggtggggagggcagcccgggggactgggccccggggcggggtgggagggggggagaagacgaagacagggccgggtctctccgcggacgagacagcggggatcatggccgcgcaggtcgcccccgccgccgccagcagcctgggcaacccgccgccgccgccgccctcggagctgaagaaagccgagcagcagcagcgggaggaggcgggggncgaggcggcggcngcggcagcggccgagcgcggggaaatgaaggcagccgccgggcaggaaagcgagggccccgccgtggggccgccgcanccgctgggaaaggagctgcnggacggggccgagagcaatgggggtggcggcggcggcggagccggcagcggcggcgggcccggcgcggagccggacctgaagaactcgaacgggaacgcgggccctaggcccgccctgaacaataacctcacggagccgcccggcggcggcggtggcggcagcagcgatggggtgggggcgcctcctcactcagccgcggccgccttgccgcccccagcctacggcttcgggcaaccctacggccggagcccgtctgccgtcgccgccgccgcggccgccgtcttccaccaacaacatggcggacaacaaagccctggcctggcagcgctgcagagcggcggcggcgggggcctggagccctacgcggggccccagcagaactctcacgaccacggcttccccaaccaccagtacaactcctactaccccaaccgcagcgcctaccccccgcccgccccggcctacgcgctgagctccccgagaggtggcactccgggctccggcgcggcggcggctgccggctccaagccgcctccctcctccagcgcctccgcctcctcgtcgtcttcgtccttcgctcagcagcgcttcggggccatggggggaggcggcccctccgcggccggcgggggaactccccagcccaccgccacccccaccctcaaccaactgctcacgtcgcccagctcggcccggggctaccagggctaccccgggggcgactacagtggcgggccccaggacgggggcgccggcaagggcccggcggacatggcctcgcagtgttggggggctgcggcggcggcagctgcggcggcggccgcctcgggaggggcccaacaaaggagccaccacgcgcccatgagccccgggagcagcggcggcggggggcagccgctcgcccggacccctcagccatccagtccaatggatcagatgggcaagatgagacctcagccatatggcgggactaacccatactcgcagcaacagggacctccgtcaggaccgcagcaaggacatgggtacccagggcagccatacgggtcccagaccccgcagcggtacccgatgaccatgcagggccgggcgcagagtgccatgggcggcctctcttatacacagcagattcctccttatggacaacaaggccccagcgggtatggtcaacagggccagactccatattacaaccagcaaagtcctcaccctcagcagcagcagccaccctactcccagcaaccaccgtctatgagacccacaagcttttgttctctcagtacttgttacccagcttctcaacatccagggcccaatttccactgcctggagttcccctggctctaggacactctaacaagctctgtccacgggtctccccattcccaccagcactgcacacacccactccgtaacctctccactgtacctgcgaacctatgagggatcctctagatcaca

SEQ ID NO: 303628 - DNA, 347 bp, Homo sapiens
acatgattcctatggcaatcagttctccacccaaggcaccccttctggcagccccttccccagccagcagactacaatgtatcaacagcaacagcaggtgaggagggtagctgggaatggactggcatgcaggttcgccttgaaaactagttagtaaactaatctaacgtgttgaagtctaagaagctcactttagatattttggcattcttctctcacctgactggccagtcctgcctgaagagccacgtcctcaatctcttctctatttggagttggaaggggctagaaatagaccttattttgatttttaggttttgtatatttttctacttaagcaagggaag

SEQ ID NO: 303629 - DNA, 364 bp, Homo sapiens
accagcagcagcaacctcagcagccagcaccctcgacgctctcccagcaggctgcgtatcctcagccccagtctcagcagtcccagcaaactgcctattcccagcagcgcttccctccaccgcaggtaagatatccctgcctcctgcccttccctgtgtgtgactacagacagcttgggggttagtgtcatgagaactttgctgtacagagtggttctctaacgtgcacttaaagaccaattaaactctgggtaaacatgataactggattgattgaactaataaaggcataacctccttaactgcataaagacctgtagctctccttaatgatgaagaaatagggcaatggaaagttgcatag

SEQ ID NO: 303630 - DNA, 480 bp, Homo sapiens
ctctcaaacttatgttgcccaaatagtaaatagtgtaaattttcagtggataaatgtagtccacttgtaaacaaaccacctaaaaacccagcttggccgtccttcctggctcagtttaggcagggtgagagaaaaaccctgggcctcctaagtatgaggccttgcatgcttgctttctatactcatcatcagtgcatagcttctcacaaaacacttcatctttcctcatgcaggagagtcagtgctaaaagtatattttcctttcctacagattcctccttatggacaacaaggccccagcgggtatggtcaacagggccagactccatattacaaccagcaaagtcctcaccctcagcagcagcagccaccctactcccagcaaccaccgtcccagacccctcatgcccaaccttcgtatcagcagcagccacagtctcaaccaccacagctccagtcctctcagcctccatactccca

SEQ ID NO: 303631 - DNA, 3270 bp, Homo sapiens
agcctgggtggcccaccccgcgcctggcgggactggccgccaactcccctccgctccagtcacttgtctggagcttgaagaagtgggtattccccttcccaccccaggcactggaggagcggccccccggggattccaggacctgagctccgggagctggactcgcagcgaccgcggcagagcgagctggcgccgggaagcgaggagacgcccgcgggaggcccagctgctcggagcaactggcatggcccgagccatggccgccgcgtggccgctgctgctggtggcgctactggtgctgtcctggccacccccaggaaccggggacgtcgtcgtgcaggcgcccacccaggtgcccggcttcttgggcgactccgtgacgctgccctgctacctacaggtgcccaacatggaggtgacgcatgtgtcacagctgacttgggcgcggcatggtgaatctggcagcatggccgtcttccaccaaacgcagggccccagctattcggagtccaaacggctggaattcgtggcagccagactgggcgcggagctgcggaatgcctcgctgaggatgttcgggttgcgcgtagaggatgaaggcaactacacctgcctgttcgtcacgttcccgcagggcagcaggagcgtggatatctggctccgagtgcttgccaagccccagaacacagctgaggttcagaaggtccagctcactggagagccagtgcccatggcccgctgcgtctccacagggggtcgcccgccagcccaaatcacctggcactcagacctgggcgggatgcccaatacgagccaggtgccagggttcctgtctggcacagtcactgtcaccagcctctggatattggtgccctcaagccaggtggacggcaagaatgtgacctgcaaggtggagcacgagagctttgagaagcctcagctgctgactgtgaacctcaccgtgtactaccccccagaggtatccatctctggctatgataacaactggtaccttggccagaatgaggccaccctgacctgcgatgctcgcagcaacccagagcccacaggctataattggagcacgaccatgggtcccctgccaccctttgctgtggcccagggcgcccagctcctgatccgtcctgtggacaaaccaatcaacacaactttaatctgcaacgtcaccaatgccctaggagctcgccaggcagaactgaccgtccaggtcaaagagggacctcccagtgagcactcaggcatgtcccgtaacgccatcatcttcctggttctgggaatcctggtttttctgatcctgctggggatcgggatttatttctattggtccaaatgttcccgtgaggtcctttggcactgtcatctgtgtccctcgagtacagagcatgccagcgcctcagctaatgggcatgtctcctattcagctgtgagcagagagaacagctcttcccaggatccacagacagagggcacaaggtgacagcgtcgggactgagaggggagagagactggagctggcaaggacgtgggcctccagagttggacccgaccccaatggatgaagaccccctccaaagagaccagcctccctccctgtgccagacctcaaaacgacgggggcaggtgcaagttcataggtctccaagaccaccctcctttcatttgctagaaggactcactagactcaggaaagctgttaggctcacagttacagtttattacagtaaaaggacagagattaagatcagcaaagggaggaggtgcacagcacacgttccacgacagatgaggcgacggcttccatctgccctctcccagtggagccatataggcagcacctgattctcacagcaacatgtgacaacatgcaagaagtactgccaatactgccaaccagagcagctcactcgagatctttgtgtccagagttttttgtttgtcttgagacagggtctggctctgttggcagactagagtacagtggtgagatcacagttcattgcagccttgacttctcaacgccaagtcatcctcccacctcagcctcctgagtagctatgactacaggtatgtgccaccacgtctggctaatctttttattatttgtaaagtcgaggtttccctgtgttgcccaggctggtcttgaactcttggctccaagtgatacttctgccttggcctcccaaagtgctgaattaagcagctcaccatccacacggctgacctcatacatcaagccaataccgtgtggcccaagacccccaccataaatcacatcattagcatgaaccacccagagtggcccaagactcccagatcagctaccaggcaggatattccaagggcttagagatgaatgcccaggagctgaggataaagggcccgatctttctttgggcaaggttaagcctttactgcatagcagaccacacagaagggtgtgggccaccagagaattttggtaaaaatttggcctctggccttgagcttctaaatctctgtatccgtcagatctctgtggttacaagaaacagccactgaccctggtcaccagaggctgcaattcaggccgcaagcagctgcctggggggtgtccaaggagcagagaaaactactagatgtgaacttgaagaaggttgtcagctgcagccactttctgccagcatctgcagccactttctgccagcatctgcagccagcaagctgggactggcaggaaataacccacaaaagaagcaaatgcaatttccaacacaagggggaagggatgcagggggaggcagcgctgcagttgctcaggacacgctcctataggaccaagatggatgcgacccaagacccaggaggcccagctgctcagtgcaactgacaagttaaaaaggtctatgatcttgagggcagacagcagaattcctcttataaagaaaactgtttgggaaaatacgttgagggagagaagaccttgggccaagatgctaaatgggaatgcaaagcttgagctgctctgcaagagaaaataagcaggacagaggatttgctctggacagagatggaagagccgggaacagagaagtgtggggaagagataggaaccagcaggatggcaggggcaaagggctcaagggtgaggaggccagtgggaccccacagagttggggagataaaggaacattggttgctttggtggcacgtaagctccttgtctgtctccagcacccagaatctcattaaagcttatttattgtacctcca

SEQ ID NO: 303632 - DNA, 1535 bp, Homo sapiens
agcctgggtggcccaccccgcgcctggcgggactggccgccaactcccctccgctccagtcacttgtctggagcttgaagaagtgggtattccccttcccaccccaggcactggaggagcggccccccggggattccaggacctgagctccgggagctggactcgcagcgaccgcggcagagcgagctggcgccgggaagcgaggagacgcccgcgggaggcccagctgctcggagcaactggcatggcccgagccatggccgccgcgtggccgctgctgctggtggcgctactggtgctgtcctggccacccccaggaaccggggacgtcgtcgtgcaggcgcccacccaggtgcccggcttcttgggcgactccgtgacgctgccctgctacctacaggtgcccaacatggaggtgacgcatgtgtcacagctgacttgggcgcggcatggtgaatctggcagcatggccgtcttccaccaaacgcagggccccagctattcggagtccaaacggctggaattcgtggcagccagactgggcgcggagctgcggaatgcctcgctgaggatgttcgggttgcgcgtagaggatgaaggcaactacacctgcctgttcgtcacgttcccgcagggcagcaggagcgtggatatctggctccgagtgcttgccaagccccagaacacagctgaggttcagaaggtccagctcactggagagccagtgcccatggcccgctgcgtctccacagggggtcgcccgccagcccaaatcacctggcactcagacctgggcgggatgcccaatacgagccaggtgccagggttcctgtctggcacagtcactgtcaccagcctctggatattggtgccctcaagccaggtggacggcaagaatgtgacctgcaaggtggagcacgagagctttgagaagcctcagctgctgactgtgaacctcaccgtgtactaccccccagaggtatccatctctggctatgataacaactggtaccttggccagaatgaggccaccctgacctgcgatgctcgcagcaacccagagcccacaggctataattggagcacgaccatgggtcccctgccaccctttgctgtggcccagggcgcccagctcctgatccgtcctgtggacaaaccaatcaacacaactttaatctgcaacgtcaccaatgccctaggagctcgccaggcagaactgaccgtccaggtcaaagagggacctcccagtgagcactcaggcatgtcccgtaacgccatcatcttcctggttctgggaatcctggtttttctgatcctgctggggatcgggatttatttctattggtccaaatgttcccgtgaggtcctttggcactgtcatctgtgtccctcgagtgagcatcaccagagctgccgtaattgagcacctactacgggctctgtgctgagtccttccagtgtgcctctcactgaatcctcaccccactgccatgaggtttcccccatttgactgatgagggtgcagagccagggag

SEQ ID NO: 303633 - DNA, 3401 bp, Homo sapiens
agcctgggtggcccaccccgcgcctggcgggactggccgccaactcccctccgctccagtcacttgtctggagcttgaagaagtgggtattccccttcccaccccaggcactggaggagcggccccccggggattccaggacctgagctccgggagctggactcgcagcgaccgcggcagagcgagctggcgccgggaagcgaggagacgcccgcgggaggcccagctgctcggagcaactggcatggcccgagccatggccgccgcgtggccgctgctgctggtggcgctactggtgctgtcctggccacccccaggaaccggggacgtcgtcgtgcaggcgcccacccaggtgcccggcttcttgggcgactccgtgacgctgccctgctacctacaggtgcccaacatggaggtgacgcatgtgtcacagctgacttgggcgcggcatggtgaatctggcagcatggccgtcttccaccaaacgcagggccccagctattcggagtccaaacggctggaattcgtggcagccagactgggcgcggagctgcggaatgcctcgctgaggatgttcgggttgcgcgtagaggatgaaggcaactacacctgcctgttcgtcacgttcccgcagggcagcaggagcgtggatatctggctccgagtgcttgccaagccccagaacacagctgaggttcagaaggtccagctcactggagagccagtgcccatggcccgctgcgtctccacagggggtcgcccgccagcccaaatcacctggcactcagacctgggcgggatgcccaatacgagccaggtgccagggttcctgtctggcacagtcactgtcaccagcctctggatattggtgccctcaagccaggtggacggcaagaatgtgacctgcaaggtggagcacgagagctttgagaagcctcagctgctgactgtgaacctcaccgtgtactaccccccagaggtatccatctctggctatgataacaactggtaccttggccagaatgaggccaccctgacctgcgatgctcgcagcaacccagagcccacaggctataattggagcacgaccatgggtcccctgccaccctttgctgtggcccagggcgcccagctcctgatccgtcctgtggacaaaccaatcaacacaactttaatctgcaacgtcaccaatgccctaggagctcgccaggcagaactgaccgtccaggtcaaagagggacctcccagtgagcactcaggcatgtcccgtaacgccatcatcttcctggttctgggaatcctggtttttctgatcctgctggggatcgggatttatttctattggtccaaatgttcccgtgaggtcctttggcactgtcatctgtgtccctcgagtacagagcatgccagcgcctcagctaatgggcatgtctcctattcagctgtgagcagagagaacagctcttcccaggatccacagacagagggcacaaggtgacagcgtcgggactgagaggggagagagactggagctggcaaggacgtgggcctccagagttggacccgaccccaatggatgaagaccccctccaaagagaccagcctccctccctgtgccagacctcaaaacgacgggggcaggtgcaagttcataggtctccaagaccaccctcctttcatttgctagaaggactcactagactcaggaaagctgttaggctcacagttacagtttattacagtaaaaggacagagattaagatcagcaaagggaggaggtgcacagcacacgttccacgacagatgaggcgacggcttccatctgccctctcccagtggagccatataggcagcacctgattctcacagcaacatgtgacaacatgcaagaagtactgccaatactgccaaccagagcagctcactcgagatctttgtgtccagagttttttgtttgtcttgagacagggtctggctctgttggcagactagagtacagtggtgagatcacagttcattgcagccttgacttctcaacgccaagtcatcctcccacctcagcctcctgagtagctatgactacaggtatgtgccaccacgtctggctaatctttttattatttgtaaagtcgaggtttccctgtgttgcccaggctggtcttgaactcttggctccaagtgatacttctgccttggcctcccaaagtgctgaattaagcagctcaccatccacacggctgacctcatacatcaagccaataccgtgtggcccaagacccccaccataaatcacatcattagcatgaaccacccagagtggcccaagactcccagatcagctaccaggcaggatattccaagggcttagagatgaatgcccaggagctgaggataaagggcccgatctttctttgggcaaggttaagcctttactgcatagcagaccacacagaagggtgtgggccaccagagaattttggtaaaaatttggcctctggccttgagcttctaaatctctgtatccgtcagatctctgtggttacaagaaacagccactgaccctggtcaccagaggctgcaattcaggccgcaagcagctgcctggggggtgtccaaggagcagagaaaactactagatgtgaacttgaagaaggttgtcagctgcagccactttctgccagcatctgcagccactttctgccagcatctgcagccagcaagctgggactggcaggaaataacccacaaaagaagcaaatgcaatttccaacacaagggggaagggatgcagggggaggcagcgctgcagttgctcaggacacgctcctataggaccaagatggatgcgacccaagacccaggaggcccagctgctcagtgcaactgacaagttaaaaaggtctatgatcttgagggcagacagcagaattcctcttataaagaaaactgtttgggaaaatacgttgagggagagaagaccttgggccaagatgctaaatgggaatgcaaagcttgagctgctctgcaagagaaaataagcaggacagaggatttgctctggacagagatggaagagccgggaacagagaagtgtggggaagagataggaaccagcaggatggcaggggcaaagggctcaagggtgaggaggccagtgggaccccacagagttggggagataaaggaacattggttgctttggtggcacgtaagctccttgtctgtctccagcacccagaatctcattaaagcttatttattgtacctccaaaaaaaaaaaaaaaaaaaaaaaaaaaaaaaacgggggttttttgggggggaaaaaggttaaaggggggggaatgttcgagacctttttgaaaagggggaatgggggccaaaggggggaaaagaaagcggca

SEQ ID NO: 303634 - DNA, 3215 bp, Homo sapiens
agcctgggtggcccaccccgcgcctggcgggactggccgccaactcccctccgctccagtcacttgtctggagcttgaagaagtgggtattccccttcccaccccaggcactggaggagcggccccccggggattccaggacctgagctccgggagctggactcgcagcgaccgcggcagagcgagctggcgccgggaagcgaggagacgcccgcgggaggcccagctgctcggagcaactggcatggcccgagccatggccgccgcgtggccgctgctgctggtggcgctactggtgctgtcctggccacccccaggaaccggggacgtcgtcgtgcaggcgcccacccaggtgcccggcttcttgggcgactccgtgacgctgccctgctacctacaggtgcccaacatggaggtgacgcatgtgtcacagctgacttgggcgcggcatggtgaatctggcagcatggccgtcttccaccaaacgcagggccccagctattcggagtccaaacggctggaattcgtggcagccagactgggcgcggagctgcggaatgcctcgctgaggatgttcgggttgcgcgtagaggatgaaggcaactacacctgcctgttcgtcacgttcccgcagggcagcaggagcgtggatatctggctccgagtgcttgccaagccccagaacacagctgaggttcagaaggtccagctcactggagagccagtgcccatggcccgctgcgtctccacagggggtcgcccgccagcccaaatcacctggcactcagacctgggcgggatgcccaatacgagccaggtgccagggttcctgtctggcacagtcactgtcaccagcctctggatattggtgccctcaagccaggtggacggcaagaatgtgacctgcaaggtggagcacgagagctttgagaagcctcagctgctgactgtgaacctcaccgtgtactaccccccagaggtatccatctctggctatgataacaactggtaccttggccagaatgaggccaccctgacctgcgatgctcgcagcaacccagagcccacaggctataattggagcacgaccatgggtcccctgccaccctttgctgtggcccagggcgcccagctcctgatccgtcctgtggacaaaccaatcaacacaactttaatctgcaacgtcaccaatgccctaggagctcgccaggcagaactgaccgtccaggtcaaagagggacctcccagtgagcactcaggcatgtcccgtaacgccatcatcttcctggttctgggaatcctggtttttctgatcctgctggggatcgggatttatttctattggtccaaatgttcccgtgaggtcctttggcactgtcatctgtgtccctcgagtacagagcatgccagcgcctcagctaatgggcatgtctcctattcagctgtgagcagagagaacagctcttcccaggatccacagacagagggcacaaggtgacagcgtcgggactgagaggggagagagactggagctggcaaggacgtgggcctccagagttggacccgaccccaatggatgaagaccccctccaaagagaccagcctccctccctgtgccagacctcaaaacgacgggggcaggtgcaagttcataggtctccaagaccaccctcctttcatttgctagaaggactcactagactcaggaaagctgttaggctcacagttacagtttattacagtgacagatgaggcgacggcttccatctgccctctcccagtggagccatataggcagcacctgattctcacagcaacatgtgacaacatgcaagaagtactgccaatactgccaaccagagcagctcactcgagatctttgtgtccagagttttttgtttgtcttgagacagggtctggctctgttggcagactagagtacagtggtgagatcacagttcattgcagccttgacttctcaacgccaagtcatcctcccacctcagcctcctgagtagctatgactacaggtatgtgccaccacgtctggctaatctttttattatttgtaaagtcgaggtttccctgtgttgcccaggctggtcttgaactcttggctccaagtgatacttctgccttggcctcccaaagtgctgaattaagcagctcaccatccacacggctgacctcatacatcaagccaataccgtgtggcccaagacccccaccataaatcacatcattagcatgaaccacccagagtggcccaagactcccagatcagctaccaggcaggatattccaagggcttagagatgaatgcccaggagctgaggataaagggcccgatctttctttgggcaaggttaagcctttactgcatagcagaccacacagaagggtgtgggccaccagagaattttggtaaaaatttggcctctggccttgagcttctaaatctctgtatccgtcagatctctgtggttacaagaaacagccactgaccctggtcaccagaggctgcaattcaggccgcaagcagctgcctggggggtgtccaaggagcagagaaaactactagatgtgaacttgaagaaggttgtcagctgcagccactttctgccagcatctgcagccactttctgccagcatctgcagccagcaagctgggactggcaggaaataacccacaaaagaagcaaatgcaatttccaacacaagggggaagggatgcagggggaggcagcgctgcagttgctcaggacacgctcctataggaccaagatggatgcgacccaagacccaggaggcccagctgctcagtgcaactgacaagttaaaaaggtctatgatcttgagggcagacagcagaattcctcttataaagaaaactgtttgggaaaatacgttgagggagagaagaccttgggccaagatgctaaatgggaatgcaaagcttgagctgctctgcaagagaaaataagcaggacagaggatttgctctggacagagatggaagagccgggaacagagaagtgtggggaagagataggaaccagcaggatggcaggggcaaagggctcaagggtgaggaggccagtgggaccccacagagttggggagataaaggaacattggttgctttggtggcacgtaagctccttgtctgtctccagcacccagaatctcattaaagcttatttattgtacctcca

SEQ ID NO: 303635 - DNA, 3247 bp, Homo sapiens
agcctgggtggcccaccccgcgcctggcgggactggccgccaactcccctccgctccagtcacttgtctggagcttgaagaagtgggtattccccttcccaccccaggcactggaggagcggccccccggggattccaggacctgagctccgggagctggactcgcagcgaccgcggcagagcgagctggcgccgggaagcgaggagacgcccgcgggaggcccagctgctcggagcaactggcatggcccgagccatggccgccgcgtggccgctgctgctggtggcgctactggtgctgtcctggccacccccaggaaccggggacgtcgtcgtgcaggcgcccacccaggtgcccggcttcttgggcgactccgtgacgctgccctgctacctacaggtgcccaacatggaggtgacgcatgtgtcacagctgacttgggcgcggcatggtgaatctggcagcatggccgtcttccaccaaacgcagggccccagctattcggagtccaaacggctggaattcgtggcagccagactgggcgcggagctgcggaatgcctcgctgaggatgttcgggttgcgcgtagaggatgaaggcaactacacctgcctgttcgtcacgttcccgcagggcagcaggagcgtggatatctggctccgagtgcttgccaagccccagaacacagctgaggttcagaaggtccagctcactggagagccagtgcccatggcccgctgcgtctccacagggggtcgcccgccagcccaaatcacctggcactcagacctgggcgggatgcccaatacgagccaggtgccagggttcctgtctggcacagtcactgtcaccagcctctggatattggtgccctcaagccaggtggacggcaagaatgtgacctgcaaggtggagcacgagagctttgagaagcctcagctgctgactgtgaacctcaccgtgtactaccccccagaggtatccatctctggctatgataacaactggtaccttggccagaatgaggccaccctgacctgcgatgctcgcagcaacccagagcccacaggctataattggagcacgaccatgggtcccctgccaccctttgctgtggcccagggcgcccagctcctgatccgtcctgtggacaaaccaatcaacacaactttaatctgcaacgtcaccaatgccctaggagctcgccaggcagaactgaccgtccaggtcaaagagggacctcccagtgagcactcaggcatgtcccgtaacgccatcatcttcctggttctgggaatcctggtttttctgatcctgctggggatcgggatttatttctattggtccaaatgttcccgtgaggtcctttggcactgtcatctgtgtccctcgagtacagagcatgccagcgcctcagctaatgggcatgtctcctattcagctgtgagcagagagaacagctcttcccaggatccacagacagagggcacaaggtgacagcgtcgggactgagaggggagagagactggagctggcaaggacgtgggcctccagagttggacccgaccccaatggatgaagaccccctccaaagagaccagcctccctccctgtgccagacctcaaaacgacgggggcaggtgcaagttcataggtctccaagaccaccctcctttcatttgctagaaggactcactagactcaggaaagctgttaggctcacagttacagtttattacagtaaaaggacagagattaagatcagcaaagggaggaggtgcacagcacacgttccacgacagatgaggcgacggcttccatctgccctctcccagtggagccatataggcagcacctgattctcacagcaacatgtgacaacatgcaagaagtactgccaatactgccaaccagagcagctcactcgagatctttgtgtccagagttttttgtttgtcttgagacagggtctggctctgttggcagactagagtacagtggtgagatcacagttcattgcagccttgacttctcaacgccaagtcatcctcccacctcagcctcctgagtagctatgactacaggtatgtgccaccacgtctggctaatctttttattatttgtaaagtcgaggtttccctgtgttgcccaggctggtcttgaactcttgggcctcccaaagtgctgaattaagcagctcaccatccacacggctgacctcatacatcaagccaataccgtgtggcccaagacccccaccataaatcacatcattagcatgaaccacccagagtggcccaagactcccagatcagctaccaggcaggatattccaagggcttagagatgaatgcccaggagctgaggataaagggcccgatctttctttgggcaaggttaagcctttactgcatagcagaccacacagaagggtgtgggccaccagagaattttggtaaaaatttggcctctggccttgagcttctaaatctctgtatccgtcagatctctgtggttacaagaaacagccactgaccctggtcaccagaggctgcaattcaggccgcaagcagctgcctggggggtgtccaaggagcagagaaaactactagatgtgaacttgaagaaggttgtcagctgcagccactttctgccagcatctgcagccactttctgccagcatctgcagccagcaagctgggactggcaggaaataacccacaaaagaagcaaatgcaatttccaacacaagggggaagggatgcagggggaggcagcgctgcagttgctcaggacacgctcctataggaccaagatggatgcgacccaagacccaggaggcccagctgctcagtgcaactgacaagttaaaaaggtctatgatcttgagggcagacagcagaattcctcttataaagaaaactgtttgggaaaatacgttgagggagagaagaccttgggccaagatgctaaatgggaatgcaaagcttgagctgctctgcaagagaaaataagcaggacagaggatttgctctggacagagatggaagagccgggaacagagaagtgtggggaagagataggaaccagcaggatggcaggggcaaagggctcaagggtgaggaggccagtgggaccccacagagttggggagataaaggaacattggttgctttggtggcacgtaagctccttgtctgtctccagcacccagaatctcattaaagcttatttattgtacctcca

SEQ ID NO: 303636 - DNA, 3111 bp, Homo sapiens
agcctgggtggcccaccccgcgcctggcgggactggccgccaactcccctccgctccagtcacttgtctggagcttgaagaagtgggtattccccttcccaccccaggcactggaggagcggccccccggggattccaggacctgagctccgggagctggactcgcagcgaccgcggcagagcgagctggcgccgggaagcgaggagacgcccgcgggaggcccagctgctcggagcaactggcatggcccgagccatggccgccgcgtggccgctgctgctggtggcgctactggtgctgtcctggccacccccaggaaccggggacgtcgtcgtgcaggcgcccacccaggtgcccggcttcttgggcgactccgtgacgctgccctgctacctacaggtgcccaacatggaggtgacgcatgtgtcacagctgacttgggcgcggcatggtgaatctggcagcatggccgtcttccaccaaacgcagggccccagctattcggagtccaaacggctggaattcgtggcagccagactgggcgcggagctgcggaatgcctcgctgaggatgttcgggttgcgcgtagaggatgaaggcaactacacctgcctgttcgtcacgttcccgcagggcagcaggagcgtggatatctggctccgagtgcttgccaagccccagaacacagctgaggttcagaaggtccagctcactggagagccagtgcccatggcccgctgcgtctccacagggggtcgcccgccagcccaaatcacctggcactcagacctgggcgggatgcccaatacgagccaggtgccagggttcctgtctggcacagtcactgtcaccagcctctggatattggtgccctcaagccaggtggacggcaagaatgtgacctgcaaggtggagcacgagagctttgagaagcctcagctgctgactgtgaacctcaccgtgtactaccccccagaggtatccatctctggctatgataacaactggtaccttggccagaatgaggccaccctgacctgcgatgctcgcagcaacccagagcccacaggctataattggagcacgaccatgggtcccctgccaccctttgctgtggcccagggcgcccagctcctgatccgtcctgtggacaaaccaatcaacacaactttaatctgcaacgtcaccaatgccctaggagctcgccaggcagaactgaccgtccaggtcaaaggtacagagcatgccagcgcctcagctaatgggcatgtctcctattcagctgtgagcagagagaacagctcttcccaggatccacagacagagggcacaaggtgacagcgtcgggactgagaggggagagagactggagctggcaaggacgtgggcctccagagttggacccgaccccaatggatgaagaccccctccaaagagaccagcctccctccctgtgccagacctcaaaacgacgggggcaggtgcaagttcataggtctccaagaccaccctcctttcatttgctagaaggactcactagactcaggaaagctgttaggctcacagttacagtttattacagtaaaaggacagagattaagatcagcaaagggaggaggtgcacagcacacgttccacgacagatgaggcgacggcttccatctgccctctcccagtggagccatataggcagcacctgattctcacagcaacatgtgacaacatgcaagaagtactgccaatactgccaaccagagcagctcactcgagatctttgtgtccagagttttttgtttgtcttgagacagggtctggctctgttggcagactagagtacagtggtgagatcacagttcattgcagccttgacttctcaacgccaagtcatcctcccacctcagcctcctgagtagctatgactacaggtatgtgccaccacgtctggctaatctttttattatttgtaaagtcgaggtttccctgtgttgcccaggctggtcttgaactcttggctccaagtgatacttctgccttggcctcccaaagtgctgaattaagcagctcaccatccacacggctgacctcatacatcaagccaataccgtgtggcccaagacccccaccataaatcacatcattagcatgaaccacccagagtggcccaagactcccagatcagctaccaggcaggatattccaagggcttagagatgaatgcccaggagctgaggataaagggcccgatctttctttgggcaaggttaagcctttactgcatagcagaccacacagaagggtgtgggccaccagagaattttggtaaaaatttggcctctggccttgagcttctaaatctctgtatccgtcagatctctgtggttacaagaaacagccactgaccctggtcaccagaggctgcaattcaggccgcaagcagctgcctggggggtgtccaaggagcagagaaaactactagatgtgaacttgaagaaggttgtcagctgcagccactttctgccagcatctgcagccactttctgccagcatctgcagccagcaagctgggactggcaggaaataacccacaaaagaagcaaatgcaatttccaacacaagggggaagggatgcagggggaggcagcgctgcagttgctcaggacacgctcctataggaccaagatggatgcgacccaagacccaggaggcccagctgctcagtgcaactgacaagttaaaaaggtctatgatcttgagggcagacagcagaattcctcttataaagaaaactgtttgggaaaatacgttgagggagagaagaccttgggccaagatgctaaatgggaatgcaaagcttgagctgctctgcaagagaaaataagcaggacagaggatttgctctggacagagatggaagagccgggaacagagaagtgtggggaagagataggaaccagcaggatggcaggggcaaagggctcaagggtgaggaggccagtgggaccccacagagttggggagataaaggaacattggttgctttggtggcacgtaagctccttgtctgtctccagcacccagaatctcattaaagcttatttattgtacctcca

SEQ ID NO: 303637 - DNA, 3316 bp, Homo sapiens
agcctgggtggcccaccccgcgcctggcgggactggccgccaactcccctccgctccagtcacttgtctggagcttgaagaagtgggtattccccttcccaccccaggcactggaggagcggccccccggggattccaggacctgagctccgggagctggactcgcagcgaccgcggcagagcgagctggcgccgggaagcgaggagacgcccgcgggaggcccagctgctcggagcaactggcatggcccgagccatggccgccgcgtggccgctgctgctggtggcgctactggtgctgtcctggccacccccaggaaccggggacgtcgtcgtgcaggcgcccacccaggtgcccggcttcttgggcgactccgtgacgctgccctgctacctacaggtgcccaacatggaggtgacgcatgtgtcacagctgacttgggcgcggcatggtgaatctggcagcatggccgtcttccaccaaacgcagggccccagctattcggagtccaaacggctggaattcgtggcagccagactgggcgcggagctgcggaatgcctcgctgaggatgttcgggttgcgcgtagaggatgaaggcaactacacctgcctgttcgtcacgttcccgcagggcagcaggagcgtggatatctggctccgagtgcttgccaagccccagaacacagctgaggttcagaaggtccagctcactggagagccagtgcccatggcccgctgcgtctccacagggggtcgcccgccagcccaaatcacctggcactcagacctgggcgggatgcccaatacgagccaggtgccagggttcctgtctggcacagtcactgtcaccagcctctggatattggtgccctcaagccaggtggacggcaagaatgtgacctgcaaggtggagcacgagagctttgagaagcctcagctgctgactgtgaacctcaccgtgtactaccccccagaggtatccatctctggctatgataacaactggtaccttggccagaatgaggccaccctgacctgcgatgctcgcagcaacccagagcccacaggctataattggagcacgaccatgggtcccctgccaccctttgctgtggcccagggcgcccagctcctgatccgtcctgtggacaaaccaatcaacacaactttaatctgcaacgtcaccaatgccctaggagctcgccaggcagaactgaccgtccaggtcaaagagggacctcccagtgagcactcaggcatgtcccgtaacgccatcatcttcctggttctgggaatcctggtttttctgatcctgctggggatcgggatttatttctattggtccaaatgttcccgtgaggtcctttggcactgtcatctgtgtccctcgagtacagagcatgccagcgcctcagctaatgggcatgtctcctattcagctgtgagcagagagaacagctcttcccaggatccacagacagagggcacaaggtgacagcgtcgggactgagaggggagagagactggagctggcaaggacgtgggcctccagagttggacccgaccccaatggatgaagaccccctccaaagagaccagcctccctccctgtgccagacctcaaaacgacgggggcaggtgcaagttcataggtctccaagaccaccctcctttcatttgctagaaggactcactagactcaggaaagctgttaggctcacagttacagtttattacagtaaaaggacagagattaagatcagcaaagggaggaggtgcacagcacacgttccacgacagatgaggcgacggcttccatctgccctctcccagtggagccatataggcagcacctgattctcacagcaacatgtgacaacatgcaagaagtactgccaatactgccaaccagagcagctcactcgagatctttgtgtccagagttttttgtttgtcttgagacagggtctggctctgttggcagactagagtacagtggtgagatcacagttcattgcagccttgacttctcaacgccaagtcatcctcccacctcagcctcctgagtagctatgactacaggtatgtgccaccacgtctggctaatctttttattatttgtaaagtcgaggtttccctgtgttgcccaggctggtcttgaactcttggctccaagtgatacttctgccttggcctcccaaagtgctgaattaagcagctcaccatccacacggctgacctcatacatcaagccaataccgtgtggcccaagacccccaccataaatcacatcattagcatgaaccacccagagtggcccaagactcccagatcagctaccaggcaggatattccaagggcttagagatgaatgcccaggagctgaggataaagggcccgatctttctttgggcaaggttaagcctttactgcatagcagaccacacagaagggtgtgggccaccagagaattttggtaaaaatttggcctctggccttgagcttctaaatctctgtatccgtcagatctctgtggttacaagaaacagccactgaccctggtcaccagaggctgcaattcaggccgcaagcagctgcctggggggtgtccaaggagcagagaaaactactagatgtgaacttgaagaaggttgtcagctgcagccactttctgccagcatctgcagccactttctgccagcatctgcagccagcaagctgggactggcaggaaataacccacaaaagaagcaaatgcaatttccaacacaagggggaagggatgcagggggaggcagcgctgcagttgctcaggacacgctcctataggaccaagatggatgcgacccaagacccaggaggcccagctgctcagtgcaactgacaagttaaaaaggtctatgatcttgagggcagacagcagaattcctcttataaagaaaactgtttgggaaaatacgttgagggagagaagaccttgggccaagatgctaaatgggaatgcaaagcttgagctgctctgcaagagaaaataagcaggacagaggatttgctctggacagagatggaagagccgggaacagagaagtgtggggaagagataggaaccagcaggatggcaggggcaaagggctcaagggtgaggaggccagtgggaccccacagagttggggagataaaggaacattggttgctttggtggcacgtaagctccttgtctgtctccagcacccagaatctcattaaagcttatttattgtacctccagcggctgtgtgcaatggggtcttttgtggaaatcaaggagcagaca

SEQ ID NO: 303638 - DNA, 2962 bp, Homo sapiens
agcctgggtggcccaccccgcgcctggcgggactggccgccaactcccctccgctccagtcacttgtctggagcttgaagaagtgggtattccccttcccaccccaggcactggaggagcggccccccggggattccaggacctgagctccgggagctggactcgcagcgaccgcggcagagcgagctggcgccgggaagcgaggagacgcccgcgggaggcccagctgctcggagcaactggcatggcccgagccatggccgccgcgtggccgctgctgctggtggcgctactggtgctgtcctggccacccccaggaaccggggacgtcgtcgtgcaggcgcccacccaggtgcccggcttcttgggcgactccgtgacgctgccctgctacctacaggtgcccaacatggaggtgacgcatgtgtcacagctgacttgggcgcggcatggtgaatctggcagcatggccgtcttccaccaaacgcagggccccagctattcggagtccaaacggctggaattcgtggcagccagactgggcgcggagctgcggaatgcctcgctgaggatgttcgggttgcgcgtagaggatgaaggcaactacacctgcctgttcgtcacgttcccgcagggcagcaggagcgtggatatctggctccgagtgcttgccaagccccagaacacagctgaggttcagaaggtccagctcactggagagccagtgcccatggcccgctgcgtctccacagggggtcgcccgccagcccaaatcacctggcactcagacctgggcgggatgcccaatacgagccaggtgccagggttcctgtctggcacagtcactgtcaccagcctctggatattggtgccctcaagccaggtggacggcaagaatgtgacctgcaaggtggagcacgagagctttgagaagcctcagctgctgactgtgaacctcaccgtgtactaccccccagaggtatccatctctggctatgataacaactggtaccttggccagaatgaggccaccctgacctgcgatgctcgcagcaacccagagcccacaggctataattggagcacgtacagagcatgccagcgcctcagctaatgggcatgtctcctattcagctgtgagcagagagaacagctcttcccaggatccacagacagagggcacaaggtgacagcgtcgggactgagaggggagagagactggagctggcaaggacgtgggcctccagagttggacccgaccccaatggatgaagaccccctccaaagagaccagcctccctccctgtgccagacctcaaaacgacgggggcaggtgcaagttcataggtctccaagaccaccctcctttcatttgctagaaggactcactagactcaggaaagctgttaggctcacagttacagtttattacagtaaaaggacagagattaagatcagcaaagggaggaggtgcacagcacacgttccacgacagatgaggcgacggcttccatctgccctctcccagtggagccatataggcagcacctgattctcacagcaacatgtgacaacatgcaagaagtactgccaatactgccaaccagagcagctcactcgagatctttgtgtccagagttttttgtttgtcttgagacagggtctggctctgttggcagactagagtacagtggtgagatcacagttcattgcagccttgacttctcaacgccaagtcatcctcccacctcagcctcctgagtagctatgactacaggtatgtgccaccacgtctggctaatctttttattatttgtaaagtcgaggtttccctgtgttgcccaggctggtcttgaactcttggctccaagtgatacttctgccttggcctcccaaagtgctgaattaagcagctcaccatccacacggctgacctcatacatcaagccaataccgtgtggcccaagacccccaccataaatcacatcattagcatgaaccacccagagtggcccaagactcccagatcagctaccaggcaggatattccaagggcttagagatgaatgcccaggagctgaggataaagggcccgatctttctttgggcaaggttaagcctttactgcatagcagaccacacagaagggtgtgggccaccagagaattttggtaaaaatttggcctctggccttgagcttctaaatctctgtatccgtcagatctctgtggttacaagaaacagccactgaccctggtcaccagaggctgcaattcaggccgcaagcagctgcctggggggtgtccaaggagcagagaaaactactagatgtgaacttgaagaaggttgtcagctgcagccactttctgccagcatctgcagccactttctgccagcatctgcagccagcaagctgggactggcaggaaataacccacaaaagaagcaaatgcaatttccaacacaagggggaagggatgcagggggaggcagcgctgcagttgctcaggacacgctcctataggaccaagatggatgcgacccaagacccaggaggcccagctgctcagtgcaactgacaagttaaaaaggtctatgatcttgagggcagacagcagaattcctcttataaagaaaactgtttgggaaaatacgttgagggagagaagaccttgggccaagatgctaaatgggaatgcaaagcttgagctgctctgcaagagaaaataagcaggacagaggatttgctctggacagagatggaagagccgggaacagagaagtgtggggaagagataggaaccagcaggatggcaggggcaaagggctcaagggtgaggaggccagtgggaccccacagagttggggagataaaggaacattggttgctttggtggcacgtaagctccttgtctgtctccagcacccagaatctcattaaagcttatttattgtacctcca

SEQ ID NO: 303639 - DNA, 2566 bp, Homo sapiens
agcctgggtggcccaccccgcgcctggcgggactggccgccaactcccctccgctccagtcacttgtctggagcttgaagaagtgggtattccccttcccaccccaggcactggaggagcggccccccggggattccaggacctgagctccgggagctggactcgcagcgaccgcggcagagcgagctggcgccgggaagcgaggagacgcccgcgggaggcccagctgctcggagcaactggcatggcccgagccatggccgccgcgtggccgctgctgctggtggcgctactggtgctgtcctggccacccccaggaaccggggacgtcgtcgtgcaggcgcccacccaggtgcccggcttcttgggcgactccgtgacggaccatgggtcccctgccaccctttgctgtggcccagggcgcccagctcctgatccgtcctgtggacaaaccaatcaacacaactttaatctgcaacgtcaccaatgccctaggagctcgccaggcagaactgaccgtccaggtcaaagagggacctcccagtgagcactcaggcatgtcccgtaacgccatcatcttcctggttctgggaatcctggtttttctgatcctgctggggatcgggatttatttctattggtccaaatgttcccgtgaggtcctttggcactgtcatctgtgtccctcgagtacagagcatgccagcgcctcagctaatgggcatgtctcctattcagctgtgagcagagagaacagctcttcccaggatccacagacagagggcacaaggtgacagcgtcgggactgagaggggagagagactggagctggcaaggacgtgggcctccagagttggacccgaccccaatggatgaagaccccctccaaagagaccagcctccctccctgtgccagacctcaaaacgacgggggcaggtgcaagttcataggtctccaagaccaccctcctttcatttgctagaaggactcactagactcaggaaagctgttaggctcacagttacagtttattacagtaaaaggacagagattaagatcagcaaagggaggaggtgcacagcacacgttccacgacagatgaggcgacggcttccatctgccctctcccagtggagccatataggcagcacctgattctcacagcaacatgtgacaacatgcaagaagtactgccaatactgccaaccagagcagctcactcgagatctttgtgtccagagttttttgtttgtcttgagacagggtctggctctgttggcagactagagtacagtggtgagatcacagttcattgcagccttgacttctcaacgccaagtcatcctcccacctcagcctcctgagtagctatgactacaggtatgtgccaccacgtctggctaatctttttattatttgtaaagtcgaggtttccctgtgttgcccaggctggtcttgaactcttggctccaagtgatacttctgccttggcctcccaaagtgctgaattaagcagctcaccatccacacggctgacctcatacatcaagccaataccgtgtggcccaagacccccaccataaatcacatcattagcatgaaccacccagagtggcccaagactcccagatcagctaccaggcaggatattccaagggcttagagatgaatgcccaggagctgaggataaagggcccgatctttctttgggcaaggttaagcctttactgcatagcagaccacacagaagggtgtgggccaccagagaattttggtaaaaatttggcctctggccttgagcttctaaatctctgtatccgtcagatctctgtggttacaagaaacagccactgaccctggtcaccagaggctgcaattcaggccgcaagcagctgcctggggggtgtccaaggagcagagaaaactactagatgtgaacttgaagaaggttgtcagctgcagccactttctgccagcatctgcagccactttctgccagcatctgcagccagcaagctgggactggcaggaaataacccacaaaagaagcaaatgcaatttccaacacaagggggaagggatgcagggggaggcagcgctgcagttgctcaggacacgctcctataggaccaagatggatgcgacccaagacccaggaggcccagctgctcagtgcaactgacaagttaaaaaggtctatgatcttgagggcagacagcagaattcctcttataaagaaaactgtttgggaaaatacgttgagggagagaagaccttgggccaagatgctaaatgggaatgcaaagcttgagctgctctgcaagagaaaataagcaggacagaggatttgctctggacagagatggaagagccgggaacagagaagtgtggggaagagataggaaccagcaggatggcaggggcaaagggctcaagggtgaggaggccagtgggaccccacagagttggggagataaaggaacattggttgctttggtggcacgtaagctccttgtctgtctccagcacccagaatctcattaaagcttatttattgtacctcca

SEQ ID NO: 303640 - DNA, 1918 bp, Homo sapiens
cccaacagtacggcccagagcgtcgaagttcgctccgaatgtaccaggagtcatgccagcgctcagctaatgggcatgtctcctattcagctgtgagcagagagaacagctcttcccaggatccacagacagagggcacaaggtgacagcgtcgggactgagaggggagagagactggagctggcaaggacgtgggcctccagagttggacccgaccccaatggatgaagaccccctccaaagagaccagcctccctccctgtgccagacctcaaaacgacgggggcaggtgcaagttcataggtctccaagaccaccctcctttcatttgctagaaggactcactagactcaggaaagctgttaggctcacagttacagtttattacagtaaaaggacagagattaagatcagcaaagggaggaggtgcacagcacacgttccacgacagatgaggcgacggcttccatctgccctctcccagtggagccatataggcagcacctgattctcacagcaacatgtgacaacatgcaagaagtactgccaatactgccaaccagagcagctcactcgagatctttgtgtccagagttttttgtttgtcttgagacagggtctggctctgttggcagactagagtacagtggtgagatcacagttcattgcagccttgacttctcaacgccaagtcatcctcccacctcagcctcctgagtagctatgactacaggtatgtgccaccacgtctggctaatctttttattatttgtaaagtcgaggtttccctgtgttgcccaggctggtcttgaactcttggctccaagtgatacttctgccttggcctcccaaagtgctgaattaagcagctcaccatccacacggctgacctcatacatcaagccaataccgtgtggcccaagacccccaccataaatcacatcattagcatgaaccacccagagtggcccaagactcccagatcagctaccaggcaggatattccaagggcttagagatgaatgcccaggagctgaggataaagggcccgatctttctttgggcaaggttaagcctttactgcatagcagaccacacagaagggtgtgggccaccagagaattttggtaaaaatttggcctctggccttgagcttctaaatctctgtatccgtcagatctctgtggttacaagaaacagccactgaccctggtcaccagaggctgcaattcaggccgcaagcagctgcctggggggtgtccaaggagcagagaaaactactagatgtgaacttgaagaaggttgtcagctgcagccactttctgccagcatctgcagccactttctgccagcatctgcagccagcaagctgggactggcaggaaataacccacaaaagaagcaaatgcaatttccaacacaagggggaagggatgcagggggaggcagcgctgcagttgctcaggacacgctcctataggaccaagatggatgcgacccaagacccaggaggcccagctgctcagtgcaactgacaagttaaaaaggtctatgatcttgagggcagacagcagaattcctcttataaagaaaactgtttgggaaaatacgttgagggagagaagaccttgggccaagatgctaaatgggaatgcaaagcttgagctgctctgcaagagaaaataagcaggacagaggatttgctctggacagagatggaagagccgggaacagagaagtgtggggaagagataggaaccagcaggatggcaggggcaaagggctcaagggtgaggaggccagtgggaccccacagagttggggagataaaggaacattggttgctttggtggcacgtaagctccttgtctgtctccagcacccagaatctcattaaagcttatttattgtacctcca

SEQ ID NO: 303641 - DNA, 3194 bp, Homo sapiens
agcctgggtggcccaccccgcgcctggcgggactggccgccaactcccctccgctccagtcacttgtctggagcttgaagaagtgggtattccccttcccaccccaggcactggaggagcggccccccggggattccaggacctgagctccgggagctggactcgcagcgaccgcggcagagcgagctggcgccgggaagcgaggagacgcccgcgggaggcccagctgctcggagcaactggcatggcccgagccatggccgccgcgtggccgctgctgctggtggcgctactggtgctgtcctggccacccccaggaaccggggacgtcgtcgtgcaggcgcccacccaggtgcccggcttcttgggcgactccgtgacgctgccctgctacctacaggtgcccaacatggaggtgacgcatgtgtcacagctgacttgggcgcggcatggtgaatctggcagcatggccgtcttccaccaaacgcagggccccagctattcggagtccaaacggctggaattcgtggcagccagactgggcgcggagctgcggaatgcctcgctgaggatgttcgggttgcgcgtagaggatgaaggcaactacacctgcctgttcgtcacgttcccgcagggcagcaggagcgtggatatctggctccgagtgcttgccaagccccagaacacagctgaggttcagaaggtccagctcactggagagccagtgcccatggcccgctgcgtctccacagggggtcgcccgccagcccaaatcacctggcactcagacctgggcgggatgcccaatacgagccaggtgccagggttcctgtctggcacagtcactgtcaccagcctctggatattggtgccctcaagccaggtggacggcaagaatgtgacctgcaaggtggagcacgagagctttgagaagcctcagctgctgactgtgaacctcaccgtgtactaccccccagaggtatccatctctggctatgataacaactggtaccttggccagaatgaggccaccctgacctgcgatgctcgcagcaacccagagcccacaggctataattggagcacgaccatgggtcccctgccaccctttgctgtggcccagggcgcccagctcctgatccgtcctgtggacaaaccaatcaacacaactttaatctgcaacgtcaccaatgccctaggagctcgccaggcagaactgaccgtccaggtcaaagagggacctcccagtgagcactcaggcatgtcccgtaacgccatcatcttcctggttctgggaatcctggtttttctgatcctgctggggatcgggatttatttctattggtccaaatgttcccgtgaggtcctttggcactgtcatctgtgtccctcgagtacagagcatgccagcgcctcagctaatgggcatgtctcctattcagctgtgagcagagagaacagctcttcccaggatccacagacagagggcacaaggtgacagcgtcgggactgagaggggagagagactggagctggcaaggacgtgggcctccagagttggacccgaccccaatggatgaagaccccctccaaagagaccagcctccctccctgtgccagacctcaaaacgacgggggcaggtgcaagttcataggtctccaagaccaccctcctttcatttgctagaaggactcactagactcaggaaagctgttaggctcacagttacagtttattacagtaaaaggacagagattaagatcagcaaagggaggaggtgcacagcacacgttccacgacagatgaggcgacggcttccatctgccctctcccagtggagccatataggcagcacctgattctcacagcaacatgtgacaacatgcaagaagtactgccaatactgccaaccagagcagctcactcgagatctttgtgtccagagttttttgtttgtcttgagacagggtctggctctgttggcagactagagtacagtggtgagatcacagttcattgcagccttgacttctcaacgccaagtcatcctcccacctcagcctcctgagtagctatgactacaggtatgtgccaccacgtctggctaatctttttattatttgtaaagtcgaggtttccctgtgttgcccaggctggtcttgaactcttggctccaagtgatacttctgccttggcctcccaaagtgctgaattaagcagctcaccatccacacggctgacctcatacatcaagccaataccgtgtggcccaagacccccaccataaatcacatcattagcatgaaccacccagagtggcccaagactcccagatcagctaccaggcaggatattccaagggcttagagatgaatgcccaggagctgaggataaagggcccgatctttctttgggcaaggttaagcctttactgcatagcagaccacacagaagggtgtgggccaccagagaattttggtaaaaatttggcctctggccttgagcttctaaatctctgtatccgtcagatctctgtggttacaagaaacagccactgaccctggtcaccagaggctgcaattcaggccgcaagcagctgcctggggggtgtccaaggagcagagaaaactactagatgtgaacttgaagaaggttgtcagctgcagccactttctgccagcatctgcagccactttctgccagcatctgcagccagcaagctgggactggcaggaaataacccacaaaagaagcaaatgcaatttccaacacaagggggaagggatgcagggggaggcagcgctgcagttgctcaggacacgctcctataggaccaagatggatgcgacccaagacccaggaggcccagctgctcagtgcaactgacaagttaaaaaggtctatgatcttgagggcagacagcagaattcctcttataaagaaaactgtttgggaaaataagcaggacagaggatttgctctggacagagatggaagagccgggaacagagaagtgtggggaagagataggaaccagcaggatggcaggggcaaagggctcaagggtgaggaggccagtgggaccccacagagttggggagataaaggaacattggttgctttggtggcacgtaagctccttgtctgtctccagcacccagaatctcattaaagcttatttattgtacctcca

SEQ ID NO: 303642 - DNA, 2773 bp, Homo sapiens
agcctgggtggcccaccccgcgcctggcgggactggccgccaactcccctccgctccagtcacttgtctggagcttgaagaagtgggtattccccttcccaccccaggcactggaggagcggccccccggggattccaggacctgagctccgggagctggactcgcagcgaccgcggcagagcgagctggcgccgggaagcgaggagacgcccgcgggaggcccagctgctcggagcaactggcatggcccgagccatggccgccgcgtggccgctgctgctggtggcgctactggtgctgtcctggccacccccaggaaccggggacgtcgtcgtgcaggcgcccacccaggtgcccggcttcttgggcgactccgtgacgctgccctgctacctacaggtgcccaacatggaggtgacgcatgtgtcacagctgacttgggcgcggcatggtgaatctggcagcatggccgtcttccaccaaacgcagggccccagctattcggagtccaaacggctggaattcgtggcagccagactgggcgcggagctgcggaatgcctcgctgaggatgttcgggttgcgcgtagaggatgaaggcaactacacctgcctgttcgtcacgttcccgcagggcagcaggagcgtggatatctggctccgagtgcttgccaagccccagaacacagctgaggttcagaaggtccagctcactggagagccagtgcccatggcccgctgcgtctccacagggggtcgcccgccagcccaaatcacctggcactcagacctgggcgggatgcccaatacgagccaggtgccagggttcctgtctggcacagtcactgtcaccagcctctggatattggtgccctcaagccaggtggacggcaagaatgtgacctgcaaggtggagcacgagagctttgagaagcctcagctgctgactgtgaacctcaccgtgtactaccccccagaggtatccatctctggctatgataacaactggtaccttggccagaatgaggccaccctgacctgcgatgctcgcagcaacccagagcccacaggctataattggagcacgaccatgggtcccctgccaccctttgctgtggcccagggcgcccagctcctgatccgtcctgtggacaaaccaatcaacacaactttaatctgcaacgtcaccaatgccctaggagctcgccaggcagaactgaccgtccaggtcaaagagggacctcccagtgagcactcaggcatgtcccgtaacgccatcatcttcctggttctgggaatcctggtttttctgatcctgctggggatcgggatttatttctattggtccaaatgttcccgtgaggtcctttggcactgtcatctgtgtccctcgagtacagagcatgccagcgcctcagctaatgggcatgtctcctattcagctgtgagcagagagaacagctcttcccaggatccacagacagagggcacaaggtgacagcgtcgggactgagaggggagagagactggagctggcaaggacgtgggcctccagagttggacccgaccccaatggatgaagaccccctccaaagagaccagcctccctccctgtgccagacctcaaaacgacgggggcaggtgcaagttcataggtctccaagaccaccctcctttcatttgctagaaggactcactagactcaggaaagctgttaggctcacagttacagtttattacagtaaaaggacagagattaagatcagcaaagggaggaggtgcacagcacacgttccacgacagatgaggcgacggcttccatctgccctctcccagtggagccatataggcagcacctgattctcacagcaacatgtgacaacatgcaagaagtactgccaatactgccaaccagagcagctcactcgagatctttgtgtccagagttttttgtttgtcttgagacagggtctggctctgttggcagactagagtacagtggtgagatcacagttcattgcagccttgacttctcaacgccaagtcatcctcccacctcagcctcctgagtagctatgactacaggtatgtgccaccacgtctggctaatctttttattatttgtaaagtcgaggtttccctgtgttgcccaggctggtcttgaactcttggctccaagtgatacttctgccttggcctcccaaagtgctgaattaagcagctcaccatccacacggctgacctcatacatcaagccaataccgtgtggcccaagacccccaccataaatcacatcattagcatgaaccacccagagtggcccaagactcccagatcagctaccaggcaggatattccaagggcttagagatgaatgcccaggagctgaggataaagggcccgatctttctttgggcaaggttaagcctttactgcatagcagaccacacagaagggtgtgggccaccagagaattttggtaaaaatttggcctctggccttgagcttctaaatctctgtatccgtcagatctctgtggttacaagaaacagccactgaccctggtcaccagaggctgcaattcaggccgcaagcagctgcctggggggtgtccaaggagcagagaaaactactagatgtgaacttgaagaaggttgtcagctgcagccactttctgccagcatctgcagccactttctgccagcatctgcagccagcatgacgcactggatgccccccctgatgccatcacagatgccccccgatggtcagc

SEQ ID NO: 303643 - DNA, 1937 bp, Homo sapiens
agcctgggtggcccaccccgcgcctggcgggactggccgccaactcccctccgctccagtcacttgtctggagcttgaagaagtgggtattccccttcccaccccaggcactggaggagcggccccccggggattccaggacctgagctccgggagctggactcgcagcgaccgcggcagagcgagctggcgccgggaagcgaggagacgcccgcgggaggcccagctgctcggagcaactggcatggcccgagccatggccgccgcgtggccgctgctgctggtggcgctactggtgctgtcctggccacccccaggaaccggggacgtcgtcgtgcaggcgcccacccaggtgcccggcttcttgggcgactccgtgacgctgccctgctacctacaggtgcccaacatggaggtgacgcatgtgtcacagctgacttgggcgcggcatggtgaatctggcagcatggccgtcttccaccaaacgcagggccccagctattcggagtccaaacggctggaattcgtggcagccagactgggcgcggagctgcggaatgcctcgctgaggatgttcgggttgcgcgtagaggatgaaggcaactacacctgcctgttcgtcacgttcccgcagggcagcaggagcgtggatatctggctccgagtgcttgccaagccccagaacacagctgaggttcagaaggtccagctcactggagagccagtgcccatggcccgctgcgtctccacagggggtcgcccgccagcccaaatcacctggcactcagacctgggcgggatgcccaatacgagccaggtgccagggttcctgtctggcacagtcactgtcaccagcctctggatattggtgccctcaagccaggtggacggcaagaatgtgacctgcaaggtggagcacgagagctttgagaagcctcagctgctgactgtgaacctcaccgtgtactaccccccagaggtatccatctctggctatgataacaactggtaccttggccagaatgaggccaccctgacctgcgatgctcgcagcaacccagagcccacaggctataattggagcacgaccatgggtcccctgccaccctttgctgtggcccagggcgcccagctcctgatccgtcctgtggacaaaccaatcaacacaactttaatctgcaacgtcaccaatgccctaggagctcgccaggcagaactgaccgtccaggtcaaagagggacctcccagtgagcactcaggcatgtcccgtaacgccatcatcttcctggttctgggaatcctggtttttctgatcctgctggggatcgggatttatttctattggtccaaatgttcccgtgaggtcctttggcactgtcatctgtgtccctcgagtacagagcatgccagcgcctcagctaatgggcatgtctcctattcagctgtgagcagagagaacagctcttcccaggatccacagacagagggcacaaggtgacagcgtcgggactgagaggggagagagactggagctggcctgctcagtgcaactgacaagttaaaaaggtctatgatcttgagggcagacagcagaattcctcttataaagaaaactgtttgggaaaatacgttgagggagagaagaccttgggccaagatgctaaatgggaatgcaaagcttgagctgctctgcaagagaaaataagcaggacagaggatttgctctggacagagatggaagagccgggaacagagaagtgtggggaagagataggaaccagcaggatggcaggggcaaagggctcaagggtgaggaggccagtgggaccccacagagttggggagataaaggaacattggttgctttggtggcacgtaagctccttgtctgtctccagcacccagaatctcattaaagcttatttattgtacctcca

SEQ ID NO: 303644 - DNA, 1680 bp, Homo sapiens
agcctgggtggcccaccccgcgcctggcgggactggccgccaactcccctccgctccagtcacttgtctggagcttgaagaagtgggtattccccttcccaccccaggcactggaggagcggccccccggggattccaggacctgagctccgggagctggactcgcagcgaccgcggcagagcgagctggcgccgggaagcgaggagacgcccgcgggaggcccagctgctcggagcaactggcatggcccgagccatggccgccgcgtggccgctgctgctggtggcgctactggtgctgtcctggccacccccaggaaccggggacgtcgtcgtgcaggcgcccacccaggtgcccggcttcttgggcgactccgtgacgctgccctgctacctacaggtgcccaacatggaggtgacgcatgtgtcacagctgacttgggcgcggcatggtgaatctggcagcatggccgtcttccaccaaacgcagggccccagctattcggagtccaaacggctggaattcgtggcagccagactgggcgcggagctgcggaatgcctcgctgaggatgttcgggttgcgcgtagaggatgaaggcaactacacctgcctgttcgtcacgttcccgcagggcagcaggagcgtggatatctggctccgagtgcttgccaagccccagaacacagctgaggttcagaaggtccagctcactggagagccagtgcccatggcccgctgcgtctccacagggggtcgcccgccagcccaaatcacctggcactcagacctgggcgggatgcccaatacgagccaggtgccagggttcctgtctggcacagtcactgtcaccagcctctggatattggtgccctcaagccaggtggacggcaagaatgtgacctgcaaggtggagcacgagagctttgagaagcctcagctgctgactgtgaacctcaccgtgtactaccccccagaggtatccatctctggctatgataacaactggtaccttggccagaatgaggccaccctgacctgcgatgctcgcagcaacccagagcccacaggctataattggagcacgaccatgggtcccctgccaccctttgctgtggcccagggcgcccagctcctgatccgtcctgtggacaaaccaatcaacacaactttaatctgcaacgtcaccaatgccctaggagctcgccaggcagaactgaccgtccaggtcaaagagggacctcccagtgagcactcaggcatgtcccgtaacgccatcatcttcctggttctgggaatcctggtttttctgatcctgctggggatcgggatttatttctattggtccaaatgttcccgtgaggtcctttggcactgtcatctgtgtccctcgagtacagagcatgccagcgcctcagctaatgggcatgtctcctattcagctgtgagcagagagaacagctcttcccaggatccacagacagagggcacaaggtgacagcgtcgggactgagaggggagagagactggagctggcgcaaagggctcaagggtgaggaggccagtgggaccccacagagttggggagataaaggaacattggttgctttggtggcacgtaagctccttgtctgtctccagcacccagaatctcattaaagcttatttattgtacctcca

SEQ ID NO: 303645 - DNA, 214 bp, Homo sapiens
caaggtggagcacgagagctttgagaagcctcagctgctgactgtgaacctcaccgtgtactgtgagtgtgcccaagtcagcgatggcaagaacccctgccgggctgcccccaccactgtctacactgactccccaaggcactgtaggcattgcttccatcatctgcaccggctcccctgactcctgtctacacgacccacccccattgtctgc

SEQ ID NO: 303646 - DNA, 407 bp, Homo sapiens
acagagatggaatttgaacccatccatctggttccagagccaggctcgatatttatggatatttcataaccaagtgaataactggatggctaaatccttagaaagcacaccctccatccctgtctgacacacgtgtataccattaagggaaatggcacccccatgtaatagcagaggcagaacttgacattttcagggccctgacacccaggcatgtcttcttcccatgcttcccagcattattccttcctgacgacttcccctcctatttccccagtacagagcatgccagcgcctcagctaatggggtaagtgcagtgttggagctaaggagggtgtggggtctgcacgaactacagaccagacgtcttcagatgcccacggcccggcctcaggagcctgggtct

SEQ ID NO: 303647 - DNA, 381 bp, Homo sapiens
tctgggattataggcgtgagccaccccgcccagcaaccatgccatcctgtacccttaatgaatgcccccttctgccacggaggggttcattgaatgacttgttgcttttgttcctcttcccagccaagccccagaacacagctgaggttcagaaggtccagctcactggagagccagtgcccatggcccgctgcgtctccacagggggtcgcccgccagcccaaatcacctggcactcagacctgggcgggatgcccaatacgagccaggtgccagggttcctgtctggcacagtcactgtcaccagcctctggatattggtgccctcaagccaggtggacggcaagaatgtgacctgcaaggtggagcacgagagctttg

SEQ ID NO: 303648 - DNA, 932 bp, Homo sapiens
ctgctccactcttggaataaatgaaggattgttggttcaggatatgcagaaagctgcttagcaaaaggagagttggagaagcatcttggtttgagggtcttgaaggacacctactgtactcccagctgagaggactctttctcctcatcttcaggaggatgcctccagagcctggggttactgtaggcctttgccagaggcatgttcggacttagccagctgagtatcccctgtttcctgcttttaccatctcagctgctggtcaggaggtttgggaaggtgacatcatctagctgaatcagctgctgcttctagatacattactggaactgaaagtcattaccccttccttcctgctctgcaagtctcttcagaatgaggctggagtatgggtgttccacctgtctgcagggtcatgactggaatggtacttgctgcttttaaagagctaaaaggtttttaaaagcttgttcatggaaaaagctttcctcaaggcttctcaagctaagggaacagagcgtccttgagaggcaggaggattcacaggaaggccctccccgactccctcttgtccacctacatttagccatatgacccttctgatctcctttgcctaagtccgaggcttaggcctagcactgtaggatgggtaaacaaaacgttatttgtggactttttgaccttaagacttttagagtctggtcaaggggacaaaaaaaaactgcttacatttcagagcagaccagccaccacactattggagatatattggagatctccccttgactcactaattgaaaagcaaaaaagggcaggtgtggtggctcatgcctgtaatctgagcactttaggaggctgaggcaggcagattgcttgagcttaggagtttgagaccagcctgggcaacatggcgaaactctgtctctacaaaa

SEQ ID NO: 303649 - DNA, 675 bp, Homo sapiens
ggaagaggagaggataccggtacgagatagtgctcgagggggatagtagctgttctagatacattactggaactgaaagtcattaccccttccttcctgctctgcaagtctcttcagaatgaggctggagtatgggtgttccacctgtctgcagggtcatgactggaatggtacttgctgcttttaaagagctaaaaggtttttaaaagcttgttcatggaaaaagctttcctcaaggcttctcaagctaagggaacagagcgtccttgagaggcaggaggattcacaggaaggccctccccgactccctcttgtccacctacatttagccatatgacccttctgatctcctttgcctaagtccgaggcttaggcctagcactgtaggatgggtaaacaaaacgttatttgtggactttttgaccttaagacttttagagtctggtcaaggggacaaaaaaaaactgcttacatttcagagcagaccagccaccacactattggagatatattggagatctccccttgactcactaattgaaaagcaaaaaagggcaggtgtggtggctcatgcctgtaatctgagcactttaggaggctgaggcaggcagattgcttgagcttaggagtttgagaccagcctgggcaacatggcgaaactctgtctctacaaaa

SEQ ID NO: 303650 - DNA, 2611 bp, Homo sapiens
tgcggagcgcgcacgcgggaacccgcgctggaggcgggcgagggccgaggggcagctagggagcgcggcttgaggagggcggggccgccccgcaggcccgccagtgtcctcagctgcctccgcgcgccaaagtcaaaccccgacacccgccggcgggccggtgagctcactagctgacccggcaggtcaggatctggcttagcggcgccgcgagctccagtgcgcgcacccgtggccgcctcccagccctctttgccggacgagctctgggccgccacaagactaaggaatggccaccccgcccaagagaagctgcccgtctttctcagccagctctgaggggacccgcatcaagaaaatctccatcgaagggaacatcgctgcagggaagtcaacatttgtgaatatccttaaacaattgtgtgaagattgggaagtggttcctgaacctgttgccagatggtgcaatgttcaaagtactcaagatgaatttgaggaacttacaatgtctcagaaaaatggtgggaatgttcttcagatgatgtatgagaaacctgaacgatggtcttttaccttccaaacatatgcctgtctcagtcgaataagagctcagcttgcctctctgaatggcaagctcaaagatgcagagaaacctgtattattttttgaacgatctgtgtatagtgacaggtatatttttgcatctaatttgtatgaatctgaatgcatgaatgagacagagtggacaatttatcaagactggcatgactggatgaataaccaatttggccaaagccttgaattggatggaatcatttatcttcaagccactccagagacatgcttacatagaatatatttacggggaagaaatgaagagcaaggcattcctcttgaatatttagagaagcttcattataaacatgaaagctggctcctgcataggacactgaaaaccaacttcgattatcttcaagaggtgcctatcttaacactggatgttaatgaagactttaaagacaaatatgaaagtctggttgaaaaggtcaaagagtttttgagtactttgtgatcttgctgaagactacaggcagccaaatggttccagatacttcagctttgtgtatcttcgtaacttcatattaatataagtttctttagaaaacccaagtttttaatcgtttttgttttaaggaaaaaagatttttaaaatgaatcttatgcaaaactttttgatcagtttcttttcttttgttttttttttaaaaaagacatttaaagacaaagacattatttctcatagcaggaaatgtagaggtagatggttccagtatcagcatagtgactaaactacattataaaagatccagcttccttctgtcattcccctcttttgtcttcctcagcaggttggcttttttccctggtgcctctcacttcgttggtgaccagtttcttaaactgaaagctttaatgttacatagtaaatggtagtgtgtcctgtgtaaattagtgtacctattaaaagttgcaaagtggaattaaaggaatccctagaataaggattctgaagttttattttaaattattatcttcttaacagtttagtcccacctcttacttcctgcctcagtctgctttctctactgtctggattaattaggcagcctgctataaagttaaagtcacacatttctattttgcaaacactgtgattactctttgctttgtagtttgctttgctttgtagggttctgcttttaagtttttctctttttcagacaaattactgataaaaatgatattgctctatatgtaatatatcctgaaagcattattttttgttgaataggaaataaaattaatgaagacagaggctagaaagcatccattaattaatgagacacacttaactacttatctctaaaccatctatgtgaatatttgtaaaaataatgaatggactcatcttagttctgtatataaatatattttctttctagtttgtttagttaaggtgtgcagtgtttttcctgtgtattaaacctttccattttacgttttagaaaattttatgtattttaaaataaggggaagagtcattttcacttttaaactactatttttctttccaagtcatttttgtttttggtttcttattcaaagatgataatttagtggattaaccagtccagacgcactgatctttgcaaaggagacttaatttcaaatctgtaattaccatacataaactgtctcattatacgtatgcatttttttagtttgtttttgtttggtataaattaatttgttaattaaatatttcttaagtataaaccttatgaactacagtggagctacactcattgaaatgtaatttcagttctaaaaagatgtaataatcattttagaattaaaatttattctacttttaaataaattatgaatattaaaggtgaaaattgtataaattactttgattccattttaagtggagacatatttcagtgatttttagtaacctttaaaaatgtataatgacttttaaaatttgtagaattgaaaagacgctaataaaaatttattatttatttgtcatgactcaaaaatt

SEQ ID NO: 303651 - DNA, 2600 bp, Homo sapiens
  misc_feature (2597)..(2597): n is a, c, g, or t
tgcggagcgcgcacgcgggaacccgcgctggaggcgggcgagggccgaggggcagctagggagcgcggcttgaggagggcggggccgccccgcaggcccgccagtgtcctcagctgcctccgcgcgccaaagtcaaaccccgacacccgccggcgggccggtgagctcactagctgacccggcaggtcaggatctggcttagcggcgccgcgagctccagtgcgcgcacccgtggccgcctcccagccctctttgccggacgagctctgggccgccacaagactaaggaatggccaccccgcccaagagaagctgcccgtctttctcagccagctctgaggggacccgcatcaagaaaatctccatcgaagggaacatcgctgcagggaagtcaacatttgtgaatatccttaaacaattgtgtgaagattgggaagtggttcctgaacctgttgccagatggtgcaatgttcaaagtactcaagatgaatttgaggaacttacaatgtctcagaaaaatggtgggaatgttcttcagatgatgtatgagaaacctgaacgatggtcttttaccttccaaacatatgcctgtctcagtcgaataagagctcagcttgcctctctgaatggcaagctcaaagatgcagagaaacctgtattattttttgaacgatctgtgtatagtgacaggtatatttttgcatctaatttgtatgaatctgaatgcatgaatgagacagagtggacaatttatcaagactggcatgactggatgaataaccaatttggccaaagccttgaattggatggaatcatttatcttcaagccactccagagacatgcttacatagaatatatttacggggaagaaatgaagagcaaggcattcctcttgaatatttagagaagcttcattataaacatgaaagctggctcctgcataggacactgaaaaccaacttcgattatcttcaagaggtgcctatcttaacactggatgttaatgaagactttaaagacaaatatgaaagtctggttgaaaaggtcaaagagtttttgagtactttgtgatcttgctgaagactacaggcagccaaatggttccagatacttcagctttgtgtatcttcgtaacttcatattaatataagtttctttagaaaacccaagtttttaatcgtttttgttttaaggaaaaaagatttttaaaatgaatcttatgcaaaactttttgatcagtttcttttcttttgttttttttttaaaaaagacatttaaagacaaagacattatttctcatagcaggaaatgtagaggtagatggttccagtatcagcatagtgactaaactacattataaaagatccagcttccttctgtcattcccctcttttgtcttcctcagcaggttggcttttttccctggtgcctctcacttcgttggtgaccagtttcttaaactgaaagctttaatgttacatagtaaatggtagtgtgtcctgtgtaaattagtgtacctattaaaagttgcaaagtggaattaaaggaatccctagaataaggattctgaagttttattttaaattattatcttcttaacagtttagtcccacctcttacttcctgcctcagtctgctttctctactgtctggattaattaggcagcctgctataaagttaaagtcacacatttctattttgcaaacactgtgattactctttgctttgtagtttgctttgctttgtagggttctgcttttaagtttttctctttttcagacaaattactgataaaaatgatattgctctatatgtaatatatcctgaaagcattattttttgttgaataggaaataaaattaatgaagacagaggctagaaagcatccattaattaatgagacacacttaactacttatctctaaaccatctatgtgaatatttgtaaaaataatgaatggactcatcttagttctgtatataaatatattttctttctagtttgtttagttaaggtgtgcagtgtttttcctgtgtattaaacctttccattttacgttttagaaaattttatgtattttaaaataaggggaagagtcattttcacttttaaactactatttttctttccaagtcatttttgtttttggtttcttattcaaagatgataatttagtggattaaccagtccagacgcactgatctttgcaaaggagacttaatttcaaatctgtaattaccatacataaactgtctcattatacgtatgcatttttttagtttgtttttgtttggtataaattaatttgttaattaaatatttcttaagtataaaccttatgaactacagtggagctacactcattgaaatgtaatttcagttctaaaaagatgtaataatcattttagaattaaaatttattctacttttaaataaattatgaatattaaaggtgaaaattgtataaattactttgattccattttaagtggagacatatttcagtgatttttagtaacctttaaaaatgtataatgacttttaaaatttgtagaattgaacacccgcatgttaattacaattgccgctctggntcc

SEQ ID NO: 303652 - DNA, 2557 bp, Homo sapiens
tgcggagcgcgcacgcgggaacccgcgctggaggcgggcgagggccgaggggcagctagggagcgcggcttgaggagggcggggccgccccgcaggcccgccagtgtcctcagctgcctccgcgcgccaaagtcaaaccccgacacccgccggcgggccggtgagctcactagctgacccggcaggtcaggatctggcttagcggcgccgcgagctccagtgcgcgcacccgtggccgcctcccagccctctttgccggacgagctctgggccgccacaagactaaggaatggccaccccgcccaagagaagctgcccgtctttctcagccagctctgaggggacccgcatcaagaaaatctccatcgaagggaacatcgctgcagggaagtcaacatttgtgaatatccttaaacaattgtgtgaagattgggaagtggttcctgaacctgttgccagatggtgcaatgttcaaagtactcaagatgaatttgagaaacctgaacgatggtcttttaccttccaaacatatgcctgtctcagtcgaataagagctcagcttgcctctctgaatggcaagctcaaagatgcagagaaacctgtattattttttgaacgatctgtgtatagtgacaggtatatttttgcatctaatttgtatgaatctgaatgcatgaatgagacagagtggacaatttatcaagactggcatgactggatgaataaccaatttggccaaagccttgaattggatggaatcatttatcttcaagccactccagagacatgcttacatagaatatatttacggggaagaaatgaagagcaaggcattcctcttgaatatttagagaagcttcattataaacatgaaagctggctcctgcataggacactgaaaaccaacttcgattatcttcaagaggtgcctatcttaacactggatgttaatgaagactttaaagacaaatatgaaagtctggttgaaaaggtcaaagagtttttgagtactttgtgatcttgctgaagactacaggcagccaaatggttccagatacttcagctttgtgtatcttcgtaacttcatattaatataagtttctttagaaaacccaagtttttaatcgtttttgttttaaggaaaaaagatttttaaaatgaatcttatgcaaaactttttgatcagtttcttttcttttgttttttttttaaaaaagacatttaaagacaaagacattatttctcatagcaggaaatgtagaggtagatggttccagtatcagcatagtgactaaactacattataaaagatccagcttccttctgtcattcccctcttttgtcttcctcagcaggttggcttttttccctggtgcctctcacttcgttggtgaccagtttcttaaactgaaagctttaatgttacatagtaaatggtagtgtgtcctgtgtaaattagtgtacctattaaaagttgcaaagtggaattaaaggaatccctagaataaggattctgaagttttattttaaattattatcttcttaacagtttagtcccacctcttacttcctgcctcagtctgctttctctactgtctggattaattaggcagcctgctataaagttaaagtcacacatttctattttgcaaacactgtgattactctttgctttgtagtttgctttgctttgtagggttctgcttttaagtttttctctttttcagacaaattactgataaaaatgatattgctctatatgtaatatatcctgaaagcattattttttgttgaataggaaataaaattaatgaagacagaggctagaaagcatccattaattaatgagacacacttaactacttatctctaaaccatctatgtgaatatttgtaaaaataatgaatggactcatcttagttctgtatataaatatattttctttctagtttgtttagttaaggtgtgcagtgtttttcctgtgtattaaacctttccattttacgttttagaaaattttatgtattttaaaataaggggaagagtcattttcacttttaaactactatttttctttccaagtcatttttgtttttggtttcttattcaaagatgataatttagtggattaaccagtccagacgcactgatctttgcaaaggagacttaatttcaaatctgtaattaccatacataaactgtctcattatacgtatgcatttttttagtttgtttttgtttggtataaattaatttgttaattaaatatttcttaagtataaaccttatgaactacagtggagctacactcattgaaatgtaatttcagttctaaaaagatgtaataatcattttagaattaaaatttattctacttttaaataaattatgaatattaaaggtgaaaattgtataaattactttgattccattttaagtggagacatatttcagtgatttttagtaacctttaaaaatgtataatgacttttaaaatttgtagaattgaaaagacgctaataaaaatttattatttatttgtcatgactcaaaaatt

SEQ ID NO: 303653 - DNA, 1685 bp, Homo sapiens
tcgacccacgcgtccggacccacgcgtcgcggacgcgtgggtcgtatcaagaggtgcctatcttaacactggatgttaatgaagactttaaagacaaatatgaaagtctggttgaaaaggtcaaagagtttttgagtactttgtgatcttgctgaagactacaggcagccaaatggttccagatacttcagctttgtgtatcttcgtaacttcatattaatataagtttctttagaaaacccaagtttttaatcgtttttgttttaaggaaaaaagatttttaaaatgaatcttatgcaaaactttttgatcagtttcttttcttttgttttttttttaaaaaagacatttaaagacaaagacattatttctcatagcaggaaatgtagaggtagatggttccagtatcagcatagtgactaaactacattataaaagatccagcttccttctgtcattcccctcttttgtcttcctcagcaggttggcttttttccctggtgcctctcacttcgttggtgaccagtttcttaaactgaaagctttaatgttacatagtaaatggtagtgtgtcctgtgtaaattagtgtacctattaaaagttgcaaagtggaattaaaggaatccctagaataaggattctgaagttttattttaaattattatcttcttaacagtttagtcccacctcttacttcctgcctcagtctgctttctctactgtctggattaattaggcagcctgctataaagttaaagtcacacatttctattttgcaaacactgtgattactctttgctttgtagtttgctttgctttgtagggttctgcttttaagtttttctctttttcagacaaattactgataaaaatgatattgctctatatgtaatatatcctgaaagcattattttttgttgaataggaaataaaattaatgaagacagaggctagaaagcatccattaattaatgagacacacttaactacttatctctaaaccatctatgtgaatatttgtaaaaataatgaatggactcatcttagttctgtatataaatatattttctttctagtttgtttagttaaggtgtgcagtgtttttcctgtgtattaaacctttccattttacgttttagaaaattttatgtattttaaaataaggggaagagtcattttcacttttaaactactatttttctttccaagtcatttttgtttttggtttcttattcaaagatgataatttagtggattaaccagtccagacgcactgatctttgcaaaggagacttaatttcaaatctgtaattaccatacataaactgtctcattatacgtatgcatttttttagtttgtttttgtttggtataaattaatttgttaattaaatatttcttaagtataaaccttatgaactacagtggagctacactcattgaaatgtaatttcagttctaaaaagatgtaataatcattttagaattaaaatttattctacttttaaataaattatgaatattaaaggtgaaaattgtataaattactttgattccattttaagtggagacatatttcagtgatttttagtaacctttaaaaatgtataatgacttttaaaatttgtagaattgaaaagacgctaataaaaatttattatttatttgtcatgactcaaaaatt

SEQ ID NO: 303654 - DNA, 5273 bp, Homo sapiens
ggaatggagggctgccacaataatggaaatggtaaatgaggcaaataaggttggactggtggcatagcgtcaaggttgccagctttattaaatcactcttccaatatgctagcactggcctgttgggaaaagtaatatatcatgtaatcgaacaaaagacaaacagaggcaagctccaggaatgggcactgtaaacaggacttgccccagagtagccagatgtaggctttagataagttgatgcaggctgagcatctctaatctgagggggaatgtctcacatggtgtccaagaaatggtgacacatctcacagagggtctaggctcaggagggctagagtatgagacgttccccctcgcctgtgaacttaaaaatgtggccaacaatttttgtaaaagatggctactctgtagtgctttaactggacctatttagacaatgccttacacactggaggacgatactgtgtaaatctaataagtctacaagacaatacttctgtcttttggctctctccttcctctccagggtgatgacaaatccgtgagggtggagattatacctctctcatcatttcagcaccaaggaaataaattagtggcagagtaagggtgacttgatgagtacatccaattgttgacatagttttgggtggagaaattttgctattatatcgacttcttaaaatagtctagtgggattaacttggtttcaattcacagagatctggaagcgaggatcttttaaaaatcctgaaatatacactgcaataaaagaacaaagcatacacctcagccttaaatgactgaagaagtatgtcaagtagcagcaggtgggaaagtggctttggttttcagtttgtgagctctgaatccacacagaaacaggactgcattctgacaacctgaattaattattgtccttaccacaatgaggcagaaaagtataataaaaatcattagtatttcagtcacaattaatgccaagatgagtttgtcagtatagccatatcctggaacttattttgtgagctaaaaaaaacaaaaaaacaaaacaaaaaaaaacacaccagaatgagagctaactattcaaaaccccagtattccaggtgagtagcttacaggttcttttttatttttttgaaagagggtctcactctgttacccaggctggggtacagtggtgcaatcaccgttcactagactcgacctccctgggctcaggtgaccctcccacctcagcctcccaagtagctgggactacaggcacgtgtcatcaacccagctaatttttttattttttgtggagacaggctttcactatgttggccaagctggtctcaaactcctgacttcaagtaatccacccaccttggcctcccaaagtgctgagattacaggcatgagctaccacccctggcctacagttcatcttgtgccctaatctatatttcactctctacatgagcaaagtgggagatcactgtcatgaccaaagttacatggccaagataagctatggcctgggagtcccagattcttctgtgtgggcactttcctgggatatgctaaatgatgggaaatctgggtctcatgtttctgtgtggtcctcacctcaagcgacttctctttctgttcactctgggcttccgtgctctcattaatgtagttctgagtcttccattggtccgtatcccattctatctcagatgcctttacttcctgctgcccactgagaagcttcatcaggtggcctgtcctggagatgagcttggcacaggtcacttgcacatgggccccagagcagtccatcttcaaggtccggataacatgagaaatgagccttctcacattgttggggataagggactgtagctgctgggttagctgaatttcaaactgagcaatgggtaattgaagcttttgggctcgggggacaggtcagtgcccacgttgttgtattcccattttgtctcagtttgtttaacagttggccctaagttgaatgcagtcccagcggaatctgcctcaggaggatgattgtagtttgtgttttcagagatggtgacttctggcatgttagtgttttccataaaaacattttcttccaaggcatttcttgcagttgtgtcttttatattagtggtttctataaaatgttctgaaggagcagatacttccagaaaagggttttcttgaggactcaggtctcctaaggatgaaaaagccccttgtgaaggggaatttatgaggctcttcgctgcagagaacggaggcctgtttgcgagcatcagtctactcagataacttttctttctgaactttggactctttttgaccttgggtgttctgtgggtcatgcgggagcgagttttgtgaaagcggtatttttttctggaatgtgaaattggtttagaagccttcatatttgtaactctagcctttgcactttctaaaatggaaatagtgtgtgtgttgtctttccatctgtctctcacctgtggtagggcttttgcagggctggaggtagaaggcgcgcccttggagaagggtgtcagcacagagactgctgccttatgctcttgggtgaacgaaggcttggtgtagatggcgtttcccgctaacttctcaggcccctgctgtgtgtgaggctgttccagctcccttggggctggactcccgagccttttttcttcggcagcgttctccacagatgcctgggcaccctgttccctcctgatgctctgccttcccacctctttgaagtgccttttctggatgctccttgggcccatgaggactctattcactttttgctggttttggcctacagtttgaatctttgccaggctgtttcctgtggttggcagtttaatgaacggtagtaacattgattccacatctaggtttactgctgagaaatatggcaaatgtaacttagtgcactgataacctcactctcgtcattggtgtctagctgctcactcccaaagcctgacaagttgatgccactgctgtctgagggctcctccggctcaacagtcagctcagtgcttgtgtaattcttccgggcttgtaacgtcttcatgaatgctccttctggattccctacagattcttcttcagctgtcaaaaaagagactgctttgctcatgaaagatgatgggatgggatgcatcagtccatagctgtacaccccagtcacacagagtaggagtcagcaaacatttgagtgccattcagagaggagacacacacacccaatcctaaacctatgaaatggcaacaacaaaaggagaaaatatatcttttgaaaacacggccatctacttggaacattccatagtgtgacatagagtaactctgcttaggattatttcattgatccccagggtccaattgcccagtgctcagtcaaagcccaaggtggaagacaagtgcttccctgatgagctgatgagctggcctctctgcagactgctccataccctgtgctgtcctgcctcagatgcagagagagcacaaggctcccgctctcctcgtcctcggtgcgcctgtgttcttgctaccatcacagctgaatgcaatgaaaggcggtcctctgagaggagcagggtggagatgctaaagtggaggccccctcccattgctgatagatcctcatctggcatgcgctccaccctccccattctctgctcccacatatcgtagccccatcacagaagatgcgacatggaaaaaagcactgtgtccaccctagttcttaaatttgggcagggatttggggtgtatgttaagagtttttcaaatttgccagattgcatgcctatgttgttaaatacacagtgaatctctggtatgatagcagtttctggataaacattacttgaggtcctaaaatgcagaagggaaaaagcaacttttgtcagatgcctactttgctttcatttcatctctaatattttggatggggaatcagccaaagcttctgactgcatgaaggtcaagtgtgccagtgtgcagctgggtttcttttccagaattaaaagtattttgggtggtggtgagggtcagaggaagaagtaaagattgtgagaaagtggaagaagcatgggcttggggagaacccagaattggggccagaagacctggcactaggctacagcacttagcacctctgatcttgtttttcttcatctgtaaaaggaggttaacaaagcttttctgcccacttcttggggagaagggaataatataattggtaaaaaaaaaaaaaaaaagttttgaaaaataagcaacactgactttatgtaaccaagcattattaattctccaccccatatcactggtagatacctgtattcaagctatctggacatgaaagtagtcacattttagaagtcatgaagttgatgctaataaacctaatctacagaaacactcttgaaagcccttgagcatttgttctgtgaacagaaaggtttgagattcagagcaagttcagagttggatggtctaagaatggaaaagccctccattctattagaagagccaggtagcaatttctggttatggaaccagaagctctcaggcttcaaataaaacagcatcacttgtactcttataaaactgtaaaaacagaaaaaccgaaaccgtatctacatctgtcctataaggcagagagtacttgagacctcatgaatttaaaaccaccttacaaactactttgcactatatgaagaaattatcactgtgggcaaagcatcaagcagagagcacagtacacagtgtgtggatgttaatgttattctctagccttcccattcctttgtcttggtcctttgtgcatatggaacagttctattattaaattttgtaatagtaactgagaacctgactctcagcaagggagtagttcagaaattgagggagtttaactctgaatgagtaaataaaaataaagcaattatgtcattagcttaaaattttatcatcattaaaaataaaaagtttaaaaacaaatacttaatgtaacaatttatcaccgcgcaatttggactcacgacaatgtatggtgtttgtcagacatgcactgttgcaatgcagcttgactgtcttgcagacagcctcaatgctgtttttaagttggcagaggcagcaggccatatggctaggtaagatctgggcatggtggcacgtgcctgtagtcccagctactcgggaggctgaggcaggagaattgcttgaacccgggaggcggaggttgcggtgag

SEQ ID NO: 303655 - DNA, 5015 bp, Homo sapiens
ggaatggagggctgccacaataatggaaatggtaaatgaggcaaataaggttggactggtggcatagcgtcaaggttgccagctttattaaatcactcttccaatatgctagcactggcctgttgggaaaagtaatatatcatgtaatcgaacaaaagacaaacagaggcaagctccaggaatgggcactgtaaacaggacttgccccagagtagccagatgtaggctttagataagttgatgcaggctgagcatctctaatctgagggggaatgtctcacatggtgtccaagaaatggtgacacatctcacagagggtctaggctcaggagggctagagtatgagacgttccccctcgcctgtgaacttaaaaatgtggccaacaatttttgtaaaagatggctactctgtagtgctttaactggacctatttagacaatgccttacacactggaggacgatactgtgtaaatctaataagtctacaagacaatacttctgtcttttggctctctccttcctctccagggtgatgacaaatccgtgagggtggagattatacctctctcatcatttcagcaccaaggaaataaattagtggcagagtaagggtgacttgatgagtacatccaattgttgacatagttttgggtggagaaattttgctattatatcgacttcttaaaatagtctagtgggattaacttggtttcaattcacagagatctggaagcgaggatcttttaaaaatcctgaaatatacactgcaataaaagaacaaagcatacacctcagccttaaatgactgaagaagtatgtcaagtagcagcaggtgggaaagtggctttggttttcagtttgtgagctctgaatccacacagaaacaggactgcattctgacaacctgaattaattattgtccttaccacaatgaggcagaaaagtataataaaaatcattagtatttcagtcacaattaatgccaagatgagtttgtcagtatagccatatcctggaacttattttgtgagctaaaaaaaacaaaaaaacaaaacaaaaaaaaacacaccagaatgagagctaactattcaaaaccccagtattccaggtgagtagcttacaggttcttttttatttttttgaaagagggtctcactctgttacccaggctggggtacagtggtgcaatcaccgttcactagactcgacctccctgggctcaggtgaccctcccacctcagcctcccaagtagctgggactacaggcacgtgtcatcaacccagctaatttttttattttttgtggagacaggctttcactatgttggccaagctggtctcaaactcctgacttcaagtaatccacccaccttggcctcccaaagtgctgagattacaggcatgagctaccacccctggcctacagttcatcttgtgccctaatctatatttcactctctacatgagcaaagtgggagatcactgtcatgaccaaagttacatggccaagataagctatggcctgggagtcccagattcttctgtgtgggcactttcctgggatatgctaaatgatgggaaatctgggtctcatgtttctgtgtggtcctcacctcaagcgacttctctttctgttcactctgggcttccgtgctctcattaatgtagttctgagtcttccattggtccgtatcccattctatctcagatgcctttacttcctgctgcccactgagaagcttcatcaggtggcctgtcctggagatgagcttggcacaggtcacttgcacatgggccccagagcagtccatcttcaaggtccggataacatgagaaatgagccttctcacattgttggggataagggactgtagctgctgggttagctgaatttcaaactgagcaatgggtaattgaagcttttgggctcgggggacaggtcagtgcccacgttgttgtattcccattttgtctcagtttgtttaacagttggccctaagttgaatgcagtcccagcggaatctgcctcaggaggatgattgtagtttgtgttttcagagatggtgacttctggcatgttagtgttttccataaaaacattttcttccaaggcatttcttgcagttgtgtcttttatattagtggtttctataaaatgttctgaaggagcagatacttccagaaaagggttttcttgaggactcaggtctcctaaggatgaaaaagccccttgtgaaggggaatttatgaggctcttcgctgcagagaacggaggcctgtttgcgagcatcagtctactcagataacttttctttctgaactttggactctttttgaccttgggtgttctgtgggtcatgcgggagcgagttttgtgaaagcggtatttttttctggaatgtgaaattggtttagaagccttcatatttgtaactctagcctttgcactttctaaaatggaaatagtgtgtgtgttgtctttccatctgtctctcacctgtggtagggcttttgcagggctggaggtagaaggcgcgcccttggagaagggtgtcagcacagagactgctgccttatgctcttgggtgaacgaaggcttggtgtagatggcgtttcccgctaacttctcaggcccctgctgtgtgtgaggctgttccagctcccttggggctggactcccgagccttttttcttcggcagcgttctccacagatgcctgggcaccctgttccctcctgatgctctgccttcccacctctttgaagtgccttttctggatgctccttgggcccatgaggactctattcactttttgctggttttggcctacagtttgaatctttgccaggctgtttcctgtggttggcagtttaatgaacggtagtaacattgattccacatctaggtttactgctgagaaatatggcaaatgtaacttagtgcactgataacctcactctcgtcattggtgtctagctgctcactcccaaagcctgacaagttgatgccactgctgtctgagggctcctccggctcaacagtcagctcagtgcttgtgtaattcttccgggcttgtaacgtcttcatgaatgctccttctggattccctacagattcttcttcagctgtcaaaaaagagactgctttgctcatgaaagatgatgggatgggatgcatcagtccatagctgtacaccccagtcacacagagtaggagtcagcaaacatttgagtgccattcagagaggagacacacacacccaatcctaaacctatgaaatggcaacaacaaaaggagaaaatatatcttttgaaaacacggccatctacttggaacattccatagtgtgacatagagtaactctgcttaggattatttcattgatccccagggtccaattgcccagtgctcagtcaaagcccaaggtggaagacaagtgcttccctgatgagctgatgagctggcctctctgcagactgctccataccctgtgctgtcctgcctcagatgcagagagagcacaaggctcccgctctcctcgtcctcggtgcgcctgtgttcttgctaccatcacagctgaatgcaatgaaaggcggtcctctgagaggagcagggtggagatgctaaagtggaggccccctcccattgctgatagatcctcatctggcatgcgctccaccctccccattctctgctcccacatatcgtagccccatcacagaagatgcgacatggaaaaaagcactgtgtccaccctagttcttaaatttgggcagggatttggggtgtatgttaagagtttttcaaatttgccagattgcatgcctatgttgttaaatacacagtgaatctctggtatgatagcagtttctggataaacattacttgaggtcctaaaatgcagaagggaaaaagcaacttttgtcagatgcctactttgctttcatttcatctctaatattttggatggggaatcagccaaagcttctgactgcatgaaggtcaagtgtgccagtgtgcagctgggtttcttttccagaattaaaagtattttgggtggtggtgagggtcagaggaagaagtaaagattgtgagaaagtggaagaagcatgggcttggggagaacccagaattggggccagaagacctggcactaggctacagcacttagcacctctgatcttgtttttcttcatctgtaaaaggaggttaacaaagcttttctgcccacttcttggggagaagggaataatataattggtaaaaaaaaaaaaaaaaagttttgaaaaataagcaacactgactttatgtaaccaagcattattaattctccaccccatatcactggtagatacctgtattcaagctatctggacatgaaagtagtcacattttagaagtcatgaagttgatgctaataaacctaatctacagaaacactcttgaaagcccttgagcatttgttctgtgaacagaaaggtttgagattcagagcaagttcagagttggatggtctaagaatggaaaagccctccattctattagaagagccaggtagcaatttctggttatggaaccagaagctctcaggcttcaaataaaacagcatcacttgtactcttataaaactgtaaaaacagaaaaaccgaaaccgtatctacatctgtcctataaggcagagagtacttgagacctcatgaatttaaaaccaccttacaaactactttgcactatatgaagaaattatcactgtgggcaaagcatcaagcagagagcacagtacacagtgtgtggatgttaatgttattctctagccttcccattcctttgtcttggtcctttgtgcatatggaacagttctattattaaattttgtaatagtaactgagaacctgactctcagcaagggagtagttcagaaattgagggagtttaactctgaatgagtaaataaaaataaagcaattatgtcattagcttaaaattttatcatcattaaaaataaaaagtttaa

SEQ ID NO: 303656 - DNA, 6292 bp, Homo sapiens
  misc_feature (4741)..(4741): n is a, c, g, or t
  misc_feature (6292)..(6292): n is a, c, g, or t
atcatgggaccgggtgagcgctgagaatcgcggccgcagccatcagccctggagatgaccaggagcggccactgctgagaactatgtggagagaggctgcgagccctgctgcagagcctccggctgggatagccgccccccgtgggggcgatgcggacagcgcgggacagccaggggagcgcgctggggccgcagcatgcgggaacccgctaaacccggtggctgctgaggcggccgagatgctcgtgcgcgcagcgcgccccactgcatcctcgaccttctcgggctacagggaccgtcagtggcgactatgggcagagtgggctattggaccctgctggtgctgccggcccttctggtctggcgcggtccggcgccgagcgcggcggcggagaagggtccccccgcgctaaatattgcggtgatgctgggtcacagccacgacgtgacagagcgcgaacttcgaacactgtggggccccgagcaggcggcggggctgcccctggacgtgaacgtggtagctctgctgatgaaccgcaccgaccccaagagcctcatcacgcacgtgtgcgacctcatgtccggggcacgcatccacggcctcgtgtttggggacgacacggaccaggaggccgtagcccagatgctggattttatctcctcccacaccttcgtccccatcttgggcattcatgggggcgcatctatgatcatggctgacaaggatccgacgtctaccttcttccagtttggagcgtccatccagcagcaagccacggtcatgctgaagatcatgcaggattatgactggcatgtcttctccctggtgaccactatcttccctggctacagggaattcatcagcttcgtcaagaccacagtggacaacagctttgtgggctgggacatgcagaatgtgatcacactggacacttcctttgaggatgcaaagacacaagtccagctgaagaagatccactcttctgtcatcttgctctactgttccaaagacgaggctgttctcattctgagtgaggcccgctcccttggcctcaccgggtatgatttcttctggattgtccccagcttggtctctgggaacacggagctcatcccaaaagagtttccatcgggactcatttctgtctcctacgatgactgggactacagcctggaggcgagagtgagggacggcattggcatcctaaccaccgctgcatcttctatgctggagaagttctcctacatccccgaggccaaggccagctgctacgggcagatggagaggccagaggtcccgatgcacaccttgcacccatttatggtcaatgttacatgggatggcaaagacttatccttcactgaggaaggctaccaggtgcaccccaggctggtggtgattgtgctgaacaaagaccgggaatgggaaaaggtgggcaagtgggagaaccatacgctgagcctgaggcacgccgtgtggcccaggtacaagtccttctccgactgtgagccggatgacaaccatctcagcatcgtcaccctggaggaggccccattcgtcatcgtggaagacatagaccccctgaccgagacgtgtgtgaggaacaccgtgccatgtcggaagttcgtcaaaatcaacaattcaaccaatgaggggatgaatgtgaagaaatgctgcaaggggttctgcattgatattctgaagaagctttccagaactgtgaagtttacttacgacctctatctggtgaccaatgggaagcatggcaagaaagttaacaatgtgtggaatggaatgatcggtgaagtggtctatcaacgggcagtcatggcagttggctcgctcaccatcaatgaggaacgttctgaagtggtggacttctctgtgccctttgtggaaacgggaatcagtgtcatggtttcaagaagtaatggcaccgtctcaccttctgcttttctagaaccattcagcgcctctgtctgggtgatgatgtttgtgatgctgctcattgtttctgccatagctgtttttgtctttgaatacttcagccctgttggatacaacagaaacttagccaaagggaaagcaccccatgggccttcttttacaattggaaaagctatatggcttctttggggcctggtgttcaataactccgtgcctgtccagaatcctaaagggaccaccagcaagatcatggtatctgtatgggccttcttcgctgtcatattcctggctagctacacagccaatctggctgccttcatgatccaagaggaatttgtggaccaagtgaccggcctcagtgacaaaaagtttcagagacctcatgactattccccaccttttcgatttgggacagtgcctaatggaagcacggagagaaacattcggaataactatccctacatgcatcagtacatgaccaaatttaatcagaaaggagtagaggacgccttggtcagcctgaaaacggggaagctggacgctttcatctacgatgccgcagtcttgaattacaaggctgggagggatgaaggctgcaagctggtgaccatcgggagtgggtacatctttgccaccaccggttatggaattgcccttcagaaaggctctccttggaagaggcagatcgacctggccttgcttcagtttgtgggtgatggtgagatggaggagctggagaccctgtggctcactgggatctgccacaacgagaagaacgaggtgatgagcagccagctggacattgacaacatggcgggcgtattctacatgctggctgccgccatggcccttagcctcatcaccttcatctgggagcacctcttctactggaagctgcgcttctgtttcacgggcgtgtgctccgaccggcctgggttgctcttctccatcagcaggggcatctacagctgcattcatggagtgcacattgaagaaaagaagaagtctccagacttcaatctgacgggatcccagagcaacatgttaaaactcctccggtcagccaaaaacatttccagcatgtccaacatgaactcctcaagaatggactcacccaaaagagctgctgacttcatccaaagaggttccctcatcatggacatggtttcagataaggggaatttgatgtactcagacaacaggtcctttcaggggaaagagagcatttttggagacaacatgaacgaactccaaacatttgtggccaaccggcagaaggataacctcaataactatgtattccagggacaacatcctcttactctcaatgagtccaaccctaacacggtggaggtggccgtgagcacagaatccaaagcgaactctagaccccggcagctgtggaagaaatccgtggattccatacgccaggattcactatcccagaatccagtctcccagagggatgaggcaacagcagagaataggacccactccctaaagagccctaggtatcttccagaagagatggcccactctgacatttcagaaacgtcaaatcgggccacgtgccacagggaacctgacaacagtaagaaccacaaaaccaaggacaactttaaaaggtcagtggcctccaaataccccaaggactgtagtgaggtcgagcgcacctacctgaaaaccaaatcaagctcccctagagacaagatctacactatagatggtgagaaggagcctggtttccacttagatccaccccagtttgttgaaaatgtgaccctgcccgagaacgtggacttcccggacccctaccaggatcccagtgaaaacttccgcaagggggactccacgctgccaatgaaccggaaccccttgcataatgaagaggggctttccaacaacgaccagtataaactctactccaagcacttcaccttgaaagacaagggttccccgcacagtgagaccagcgagcgataccggcagaactccacgcactgcagaagctgcctttccaacatgcccacctattcaggccacttcaccatgaggtcccccttcaagtgcgatgcctgcctgcggatggggaacctctatgacatcgatgaagaccagatgcttcaggagacaggtaacccagccaccggggagcaggtctaccagcaggactgggcacagaacaatgcccttcaattacaaaagaacaagctaaggattagccgtcagcattcctacgataacattgtcgacaaacctagggagctagaccttagcaggccctcccggagcataagcctcaaggacagggaacggcttctggagggaaatttttacggcagcctgtttagtgtcccctcaagcaaactctcggggaaaaaaagctcccttttcccccaaggtctggaggacagcaagaggagcaagtctctcttgccagaccacacctccgataaccctttcctccactcccacagggatgaccaacgcttggttattgggagatgcccctcggacccttacaaacactcgttgccatcccaggcggtgaatgacagctatcttcggtcgtccttgaggtcaacggcatcgtactgttccagggacagtcggggccacaatgatgtgtatatttcggagcatgttatgccttatgctgcaaataagaataatatgtactctacccccagggttttaaattcctgcagcaatagacgcgtgtacaagaaaatgcctagtatcgaatctgatgtttaaaaatcttccattaatgttttatctatagggaaatanacgtaatggccaatgttctggagggtaaatgttggatgtccaatagtgccctgctaagaggaagaagatgtagggaggtattttgttgttgttgttgttggctcttttgcacacggcttcatgccataatcttccactcaaggaatcttgtgaggtgtgtgctgagcatggcagacaccagataggtgagtccttaaccaaaaataactaactacataagggcaagtctccgggacatgcctactgggtatgttggcaataatgatgcattggatgccaatggtgatgttatgatttcctatattccaaattccattaaggtcagcccaccatgtaattttctcatcagaaatgcctaatggtttctctaatacagaataagcaatatggtgtgcatgtaaacctgacacagacaaaataaaaacagttaagaatgcatctgcactgtagtcggatttgaacatgtgcaagagattaggaagtttggctcgtaacagtttcagctttcttgttatgccttccatcacagcccaggctcaccccaagaactccaggctcccctaaagaatagcaaatcagtgtgttcgtgatgactgtgctaccttcattatagttcatttccaagacacatctggagccaaaggcccgagggaccctcaggtggggagagctacaggaatctctttggatgttgatgtgtgtttctctcaccctcggcttcgatggtcttgttcagagctgcataaactaacacatttatgtctccgagatctaagtgtggatcttctgtctgtgacacagtggccattgtagtttatcccgaagacgcctatgtacgtaagtttgcatttcctcccttctggtgatgactcagggttgtatagtatctgttaccccttccctcccagagtaaccataactcgttccgtttccaaacagccatggtggtgtccaattagctgtgtatcgctcttcccagagttgttaatgtggtgacatgcaccaacagccgtatgtgtactgtgatctgtaagaagtacaatgccatctgtctgccgaaggctagcatggttttaggtttatcttccttcacatccagaaattctgttggacactcacttccaccccaaactcctcaaatcaaaagccttcaaaacacgaggcactcttggatctaccctgagtatcctccaaactgtggatacagtttagtgagacaagcaatttctcccttctgagttattctctctgttggtggcaaaccacttcatagcaccaacagagatgtaggaaaaattcctcaaagtatttgtcatttctgagtcgcctgcattatcccattcttattctcctcaaacctgtgcatatatgacatgaaatgatatccattttttttttaagttagaaacagagaggggaatacttatgcatggggagcctgttagcacagtgcctgccacaaaaacaagtgcccccgacaagatagttgctatgttatgacactttctcagatcaggattttctagtttaaaaattaaatatcataaaacn

SEQ ID NO: 303657 - DNA, 5463 bp, Homo sapiens
  misc_feature (3912)..(3912): n is a, c, g, or t
  misc_feature (5463)..(5463): n is a, c, g, or t
gctctctgctgggtgccaggaacgcagcactgaccacgacaaagcccctgccttagagagatgacgtttctgtataaggacagagacggcaaatggacaagcaagtgaatgaatgtggcaggaagcagtgtggctgggaagaaatacttaaaagcagggcgagagactagagcatattggctgccatttaggcaggaaaaacctcttgtgctgacatttgaagtgaagggacacccatgatccgacgtctaccttcttccagtttggagcgtccatccagcagcaagccacggtcatgctgaagatcatgcaggattatgactggcatgtcttctccctggtgaccactatcttccctggctacagggaattcatcagcttcgtcaagaccacagtggacaacagctttgtgggctgggacatgcagaatgtgatcacactggacacttcctttgaggatgcaaagacacaagtccagctgaagaagatccactcttctgtcatcttgctctactgttccaaagacgaggctgttctcattctgagtgaggcccgctcccttggcctcaccgggtatgatttcttctggattgtccccagcttggtctctgggaacacggagctcatcccaaaagagtttccatcgggactcatttctgtctcctacgatgactgggactacagcctggaggcgagagtgagggacggcattggcatcctaaccaccgctgcatcttctatgctggagaagttctcctacatccccgaggccaaggccagctgctacgggcagatggagaggccagaggtcccgatgcacaccttgcacccatttatggtcaatgttacatgggatggcaaagacttatccttcactgaggaaggctaccaggtgcaccccaggctggtggtgattgtgctgaacaaagaccgggaatgggaaaaggtgggcaagtgggagaaccatacgctgagcctgaggcacgccgtgtggcccaggtacaagtccttctccgactgtgagccggatgacaaccatctcagcatcgtcaccctggaggaggccccattcgtcatcgtggaagacatagaccccctgaccgagacgtgtgtgaggaacaccgtgccatgtcggaagttcgtcaaaatcaacaattcaaccaatgaggggatgaatgtgaagaaatgctgcaaggggttctgcattgatattctgaagaagctttccagaactgtgaagtttacttacgacctctatctggtgaccaatgggaagcatggcaagaaagttaacaatgtgtggaatggaatgatcggtgaagtggtctatcaacgggcagtcatggcagttggctcgctcaccatcaatgaggaacgttctgaagtggtggacttctctgtgccctttgtggaaacgggaatcagtgtcatggtttcaagaagtaatggcaccgtctcaccttctgcttttctagaaccattcagcgcctctgtctgggtgatgatgtttgtgatgctgctcattgtttctgccatagctgtttttgtctttgaatacttcagccctgttggatacaacagaaacttagccaaagggaaagcaccccatgggccttcttttacaattggaaaagctatatggcttctttggggcctggtgttcaataactccgtgcctgtccagaatcctaaagggaccaccagcaagatcatggtatctgtatgggccttcttcgctgtcatattcctggctagctacacagccaatctggctgccttcatgatccaagaggaatttgtggaccaagtgaccggcctcagtgacaaaaagtttcagagacctcatgactattccccaccttttcgatttgggacagtgcctaatggaagcacggagagaaacattcggaataactatccctacatgcatcagtacatgaccaaatttaatcagaaaggagtagaggacgccttggtcagcctgaaaacggggaagctggacgctttcatctacgatgccgcagtcttgaattacaaggctgggagggatgaaggctgcaagctggtgaccatcgggagtgggtacatctttgccaccaccggttatggaattgcccttcagaaaggctctccttggaagaggcagatcgacctggccttgcttcagtttgtgggtgatggtgagatggaggagctggagaccctgtggctcactgggatctgccacaacgagaagaacgaggtgatgagcagccagctggacattgacaacatggcgggcgtattctacatgctggctgccgccatggcccttagcctcatcaccttcatctgggagcacctcttctactggaagctgcgcttctgtttcacgggcgtgtgctccgaccggcctgggttgctcttctccatcagcaggggcatctacagctgcattcatggagtgcacattgaagaaaagaagaagtctccagacttcaatctgacgggatcccagagcaacatgttaaaactcctccggtcagccaaaaacatttccagcatgtccaacatgaactcctcaagaatggactcacccaaaagagctgctgacttcatccaaagaggttccctcatcatggacatggtttcagataaggggaatttgatgtactcagacaacaggtcctttcaggggaaagagagcatttttggagacaacatgaacgaactccaaacatttgtggccaaccggcagaaggataacctcaataactatgtattccagggacaacatcctcttactctcaatgagtccaaccctaacacggtggaggtggccgtgagcacagaatccaaagcgaactctagaccccggcagctgtggaagaaatccgtggattccatacgccaggattcactatcccagaatccagtctcccagagggatgaggcaacagcagagaataggacccactccctaaagagccctaggtatcttccagaagagatggcccactctgacatttcagaaacgtcaaatcgggccacgtgccacagggaacctgacaacagtaagaaccacaaaaccaaggacaactttaaaaggtcagtggcctccaaataccccaaggactgtagtgaggtcgagcgcacctacctgaaaaccaaatcaagctcccctagagacaagatctacactatagatggtgagaaggagcctggtttccacttagatccaccccagtttgttgaaaatgtgaccctgcccgagaacgtggacttcccggacccctaccaggatcccagtgaaaacttccgcaagggggactccacgctgccaatgaaccggaaccccttgcataatgaagaggggctttccaacaacgaccagtataaactctactccaagcacttcaccttgaaagacaagggttccccgcacagtgagaccagcgagcgataccggcagaactccacgcactgcagaagctgcctttccaacatgcccacctattcaggccacttcaccatgaggtcccccttcaagtgcgatgcctgcctgcggatggggaacctctatgacatcgatgaagaccagatgcttcaggagacagggatgaccaacgcttggttattgggagatgcccctcggacccttacaaacactcgttgccatcccaggcggtgaatgacagctatcttcggtcgtccttgaggtcaacggcatcgtactgttccagggacagtcggggccacaatgatgtgtatatttcggagcatgttatgccttatgctgcaaataagaataatatgtactctacccccagggttttaaattcctgcagcaatagacgcgtgtacaagaaaatgcctagtatcgaatctgatgtttaaaaatcttccattaatgttttatctatagggaaatanacgtaatggccaatgttctggagggtaaatgttggatgtccaatagtgccctgctaagaggaagaagatgtagggaggtattttgttgttgttgttgttggctcttttgcacacggcttcatgccataatcttccactcaaggaatcttgtgaggtgtgtgctgagcatggcagacaccagataggtgagtccttaaccaaaaataactaactacataagggcaagtctccgggacatgcctactgggtatgttggcaataatgatgcattggatgccaatggtgatgttatgatttcctatattccaaattccattaaggtcagcccaccatgtaattttctcatcagaaatgcctaatggtttctctaatacagaataagcaatatggtgtgcatgtaaacctgacacagacaaaataaaaacagttaagaatgcatctgcactgtagtcggatttgaacatgtgcaagagattaggaagtttggctcgtaacagtttcagctttcttgttatgccttccatcacagcccaggctcaccccaagaactccaggctcccctaaagaatagcaaatcagtgtgttcgtgatgactgtgctaccttcattatagttcatttccaagacacatctggagccaaaggcccgagggaccctcaggtggggagagctacaggaatctctttggatgttgatgtgtgtttctctcaccctcggcttcgatggtcttgttcagagctgcataaactaacacatttatgtctccgagatctaagtgtggatcttctgtctgtgacacagtggccattgtagtttatcccgaagacgcctatgtacgtaagtttgcatttcctcccttctggtgatgactcagggttgtatagtatctgttaccccttccctcccagagtaaccataactcgttccgtttccaaacagccatggtggtgtccaattagctgtgtatcgctcttcccagagttgttaatgtggtgacatgcaccaacagccgtatgtgtactgtgatctgtaagaagtacaatgccatctgtctgccgaaggctagcatggttttaggtttatcttccttcacatccagaaattctgttggacactcacttccaccccaaactcctcaaatcaaaagccttcaaaacacgaggcactcttggatctaccctgagtatcctccaaactgtggatacagtttagtgagacaagcaatttctcccttctgagttattctctctgttggtggcaaaccacttcatagcaccaacagagatgtaggaaaaattcctcaaagtatttgtcatttctgagtcgcctgcattatcccattcttattctcctcaaacctgtgcatatatgacatgaaatgatatccattttttttttaagttagaaacagagaggggaatacttatgcatggggagcctgttagcacagtgcctgccacaaaaacaagtgcccccgacaagatagttgctatgttatgacactttctcagatcaggattttctagtttaaaaattaaatatcataaaacn

SEQ ID NO: 303658 - DNA, 3422 bp, Homo sapiens
  misc_feature (1871)..(1871): n is a, c, g, or t
  misc_feature (3422)..(3422): n is a, c, g, or t
tggaaacccagcaaactcagaaacttgtcttaaggttacatagctgtgagttgcacatcgtctgttccaaacccagaagcgtctgccccaaagtgcatgttctggtcctcactgcctgtgaatgttgtgatctgtccaggtgagatggaggagctggagaccctgtggctcactgggatctgccacaacgagaagaacgaggtgatgagcagccagctggacattgacaacatggcgggcgtattctacatgctggctgccgccatggcccttagcctcatcaccttcatctgggagcacctcttctactggaagctgcgcttctgtttcacgggcgtgtgctccgaccggcctgggttgctcttctccatcagcaggggcatctacagctgcattcatggagtgcacattgaagaaaagaagaagtctccagacttcaatctgacgggatcccagagcaacatgttaaaactcctccggtcagccaaaaacatttccagcatgtccaacatgaactcctcaagaatggactcacccaaaagagctgctgacttcatccaaagaggttccctcatcatggacatggtttcagataaggggaatttgatgtactcagacaacaggtcctttcaggggaaagagagcatttttggagacaacatgaacgaactccaaacatttgtggccaaccggcagaaggataacctcaataactatgtattccagggacaacatcctcttactctcaatgagtccaaccctaacacggtggaggtggccgtgagcacagaatccaaagcgaactctagaccccggcagctgtggaagaaatccgtggattccatacgccaggattcactatcccagaatccagtctcccagagggatgaggcaacagcagagaataggacccactccctaaagagccctaggtatcttccagaagagatggcccactctgacatttcagaaacgtcaaatcgggccacgtgccacagggaacctgacaacagtaagaaccacaaaaccaaggacaactttaaaaggtcagtggcctccaaataccccaaggactgtagtgaggtcgagcgcacctacctgaaaaccaaatcaagctcccctagagacaagatctacactatagatggtgagaaggagcctggtttccacttagatccaccccagtttgttgaaaatgtgaccctgcccgagaacgtggacttcccggacccctaccaggatcccagtgaaaacttccgcaagggggactccacgctgccaatgaaccggaaccccttgcataatgaagaggggctttccaacaacgaccagtataaactctactccaagcacttcaccttgaaagacaagggttccccgcacagtgagaccagcgagcgataccggcagaactccacgcactgcagaagctgcctttccaacatgcccacctattcaggccacttcaccatgaggtcccccttcaagtgcgatgcctgcctgcggatggggaacctctatgacatcgatgaagaccagatgcttcaggagacagggatgaccaacgcttggttattgggagatgcccctcggacccttacaaacactcgttgccatcccaggcggtgaatgacagctatcttcggtcgtccttgaggtcaacggcatcgtactgttccagggacagtcggggccacaatgatgtgtatatttcggagcatgttatgccttatgctgcaaataagaataatatgtactctacccccagggttttaaattcctgcagcaatagacgcgtgtacaagaaaatgcctagtatcgaatctgatgtttaaaaatcttccattaatgttttatctatagggaaatanacgtaatggccaatgttctggagggtaaatgttggatgtccaatagtgccctgctaagaggaagaagatgtagggaggtattttgttgttgttgttgttggctcttttgcacacggcttcatgccataatcttccactcaaggaatcttgtgaggtgtgtgctgagcatggcagacaccagataggtgagtccttaaccaaaaataactaactacataagggcaagtctccgggacatgcctactgggtatgttggcaataatgatgcattggatgccaatggtgatgttatgatttcctatattccaaattccattaaggtcagcccaccatgtaattttctcatcagaaatgcctaatggtttctctaatacagaataagcaatatggtgtgcatgtaaacctgacacagacaaaataaaaacagttaagaatgcatctgcactgtagtcggatttgaacatgtgcaagagattaggaagtttggctcgtaacagtttcagctttcttgttatgccttccatcacagcccaggctcaccccaagaactccaggctcccctaaagaatagcaaatcagtgtgttcgtgatgactgtgctaccttcattatagttcatttccaagacacatctggagccaaaggcccgagggaccctcaggtggggagagctacaggaatctctttggatgttgatgtgtgtttctctcaccctcggcttcgatggtcttgttcagagctgcataaactaacacatttatgtctccgagatctaagtgtggatcttctgtctgtgacacagtggccattgtagtttatcccgaagacgcctatgtacgtaagtttgcatttcctcccttctggtgatgactcagggttgtatagtatctgttaccccttccctcccagagtaaccataactcgttccgtttccaaacagccatggtggtgtccaattagctgtgtatcgctcttcccagagttgttaatgtggtgacatgcaccaacagccgtatgtgtactgtgatctgtaagaagtacaatgccatctgtctgccgaaggctagcatggttttaggtttatcttccttcacatccagaaattctgttggacactcacttccaccccaaactcctcaaatcaaaagccttcaaaacacgaggcactcttggatctaccctgagtatcctccaaactgtggatacagtttagtgagacaagcaatttctcccttctgagttattctctctgttggtggcaaaccacttcatagcaccaacagagatgtaggaaaaattcctcaaagtatttgtcatttctgagtcgcctgcattatcccattcttattctcctcaaacctgtgcatatatgacatgaaatgatatccattttttttttaagttagaaacagagaggggaatacttatgcatggggagcctgttagcacagtgcctgccacaaaaacaagtgcccccgacaagatagttgctatgttatgacactttctcagatcaggattttctagtttaaaaattaaatatcataaaacn

SEQ ID NO: 303659 - DNA, 1396 bp, Homo sapiens
gctctctgctgggtgccaggaacgcagcactgaccacgacaaagcccctgccttagagagatgacgtttctgtataaggacagagacggcaaatggacaagcaagtgaatgaatgtggcaggaagcagtgtggctgggaagaaatacttaaaagcagggcgagagactagagcatattggctgccatttaggcaggaaaaacctcttgtgctgacatttgaagtgaagggacacccatgatccgacgtctaccttcttccagtttggagcgtccatccagcagcaagccacggtcatgctgaagatcatgcaggattatgactggcatgtcttctccctggtgaccactatcttccctggctacagggaattcatcagcttcgtcaagaccacagtggacaacagctttgtgggctgggacatgcagaatgtgatcacactggacacttcctttgaggatgcaaagacacaagtccagctgaagaagatccactcttctgtcatcttgctctactgttccaaagacgaggctgttctcattctgagtgaggcccgctcccttggcctcaccgggtatgatttcttctggattgtccccagcttggtctctgggaacacggagctcatcccaaaagagtttccatcgggactcatttctgtctcctacgatgactgggactacagcctggaggcgagagtgagggacggcattggcatcctaaccaccgctgcatcttctatgctggagaagttctcctacatccccgaggccaaggccagctgctacgggcagatggagaggccagaggtcccgatgcacaccttgcacccatttatggtcaatgttacatgggatggcaaagacttatccttcactgaggaaggctaccaggtgcaccccaggctggtggtgattgtgctgaacaaagaccgggaatgggaaaaggtgagcatccttctgtgtgctgaatgcaggggagggaagaaagcatgggcaataaaggggctcacagtgcttctttctcccacgcatttcctgttgagctgctctagatcccatctcacagccaagagcacgtctttcttgcaacaaggcagactaaatctgtaaggtgcaattggaatgctttctctgggtgaactgtggtaattgtgtggtgcgctgtatgtctgttctcaaatcccagtaggaaaggtctgaactaaggataatttaaagacagtgaagtctgggttgcagcattacactaataagtgttgactatgtagcaatgatcatagaagtttgcctaaacttcctaattgtgtaccatagtcattgccatatgaacgaaccctctgtattttcatgtactcagtcttttgctttaaataaactaattttaaaaacttaaaa

SEQ ID NO: 303660 - DNA, 827 bp, Homo sapiens
gatccgacgtctaccttcttccagtttggagcgtccatccagcagcaagccacggtcatgctgaagatcatgcaggattatgactggcatgtcttctccctggtgaccactatcttccctggctacagggaattcatcagcttcgtcaagaccacagtggacaacagctttgtgggctgggacatgcagaatgtgatcacactggacacttcctttgaggatgcaaagacacaagtccagctgaagaagatccactcttctgtcatcttgctctactgttccaaagacgaggctgttctcattctgagtgaggcccgctcccttggcctcaccgggtatgatttcttctggattgtccccagcttggtctctgggaacacggagctcatcccaaaagagtttccatcgggactcatttctgtctcctacgatgactgggactacagcctggaggcgagagtgagggacggcattggcatcctaaccaccgctgcatcttctatgctggagaagttctcctacatccccgaggccaaggccagctgctacgggcagatggagaggccagaggtcccgatgcacaccttgcacccgtaagaaagggcttgttgtctcccaaagtgggatcagagttttgctgttgtcattgtttgcttgcttacatactcattgttggaaatacgcactgaaaatgcagaatgttatgtgtttacttacgggacttttattttgctctcctctctctttctttcatctcctttgtaagaaaagtcacattagactttgtttcctgcaacttaacttttttttctactcaacaatatatc

SEQ ID NO: 303661 - DNA, 3435 bp, Homo sapiens
gaattgcggcacgcagcttgcgcgcgccccaccgaccaaaatggcggctgccgttggtgcggggtgcggtttgtagtgctgttgccctactcatccctttgcaaaatgtgaaagaagaagcggctggtggaggcgggccataggcaatgagtcggcgaaggaaacatgatgacagccctagcccgaagaaaacgccgcacaaaacagtggcggcggaggaatgcggctcggtggtcgagccagggaggaggcggctgagatcggcccgcggttcgtggccctgcggggctagagaggggcctcccgggccagtgcggcagcgagagcagcctccgaccgccgccctgtgcagtaaaagtaaccccgaggaaaggtatgaaacaccaaagagagcgctgaaaatggactcactgtcatcttccttcagttctcctaatgatccagatggacagaatgatatcttttgggatcagaattctccattgacaaagcagttaggtaaaggaagaaaaaaacagatttacaccacagatagtgatgagatttcacatattgttaatcgtattgctcctcaggatgaaaaaccaacaacaaattctatgctggacatgtggattggtgaaactgctattccttgtactcccagtgtagcaaaaggaaaatcaagagcaaaaatcagctgcacaaagttaaaaacacaaagtcaagaagaagaacttatgaaactggctaaacaatttgataaaaatatggaagagctagatgtgattcaagagcaaaacaagaggaattatgattttacccagatgatttcagaaacagagattttaagtaattataaagataatatacagatgtggtcattacataatatagttcccgaaatagataatgctacaaaaaagccaatcaaaggaaacaccaagatatctgtggcaaataatcaaaatagcagtcagaagccatttgaccaaattgctgaagcagcctttaatgctatttttgatggttctactcagaaatgttagcggacagttaagccaagaactgccagaggctttttggagcaccagtaatactacctttgtaaagacaaatgctttgaaagaggagaaaatcattactaatgaaactctggtcattgaaaaactgtcaaataaaaccccacgatcactttcttctcaagtagatacacccataatgacaaaatcatgtgtgacttcctgtactaaggagccagaaacttctaataagtacattgatgcatttactacaagtgattttgaggatgattgggaaaacttactaggtagtgaaccttttgctatgcaaaatatcgacatgcctgaactctttccttctaaaacagcccatgttactgatcaaaaggaaatttgtacctttaatagtaaaactgttaaaaatacgtcaagagcaaatacaagtccagatgccaggttaggagattcaaaagtattacaagatctttcttcaaagacatatgacagagaattaatagatgcagaatatagattttcaccaaattcaaataaatcaaacaaattatccactggaaataaaatgaaatttgagaactcttccaataaaattgttattcaagacgaaattcaaaattgtatagttacatctaatctgacaaaaataaaggaagatattcttactaactctactgaagcttctgaaaggaagtcagctttgaacacaaggtattctaatgaacagaaaaataagtgcattttaaatcagtctattaaagcccctgttaatactgatctttttggctctgcaaatctaggcagtaaaaccagtgttagtaacccaaatcagactagtgcatcaaaagtaggttctttctttgatgattggaatgatccctcatttgccaatgaaattattaaagcatgtcatcaattagataatacctgggaagcagatgatgtagatgatgatttgttgtaccaagcatgtgatgatattgaaagactaactcagcaacaagacattagaaaggacagtaagacatcagaaagtatatgtgagatcaataataattccgaacatggagccaaactaactcagcaacaagacattagaaaggacagtaagacatcagaaagtatatgtgagatcaataataattccgaacatggagccaaaaacatgtttgctatatctaaacaaggaagtaatttggtacaatcaaagcatttgaatccaggcagcatttcagtgcagacatctttgacaaatagctcacaaatagataagccaatgaagatggagaaaggggaaatgtatggaaattctccaagatttttaggtgccacaaatttgactatgtattctaagatctcaaactgtcagataaataatctgcatgtgtcttatactaacactgatgttccaatacaagtgaatagttccaaattggttcttccaggaagttcaagtttgaatgtaacttcagatcatatgaatacagaaattactacttataagaagaaattgagtactaatcagccatgccataagactgtaacagatgaagctcagagcaaccttaacacaacagttggattttcaaagtttacatttacaaggatgaaaaattctcagattctttctcagtttaatcaaaattgtataactggaagtatgtctgataccaaaattacacagggtgtggagaaaaagaaaggtgtcaacccattactggaggaagctgttggacagcaatctttggtgaaactttctgaatctttgaaacaatcttcaaaagaggaagaagagaaaaatagaaagtgttctcctgaagaaattcagagaaaaagacaagaagcactggttcggagaatggctaaagcacgagcctcatctgtaaatgcagctcccacttcatttctttaatgaaatattagttggaagacttcacaaagactgctgataactatctgtgattgataggaaattttttttcttgatttctctgtgagaaatgtaatgctgacttttataaagcctggacttctactttatttaataaatcaatgtttgcaatggtaaatgaaacatttccttggacatgtatttgaaagtcattaaatacaaaagttttggaaattcaggaaagttagcaattatgtacggatattatacagaggaaagtagttatatttttaaatgctattattgcagaggatcatcaaaaaagaggtaatctacgttatttcctattctaatgtcttttcctaataaaaaacttcaactttctaagttagtagagactgtttttgtagttttactttcattaactgttgcttaagggtttttatacacttccagattttaattaaatactttcatatttctaggaacataggttgatatgaaataaaggactttttatttgtaagg

SEQ ID NO: 303662 - DNA, 953 bp, Homo sapiens
gaattgcggcacgcagcttgcgcgcgccccaccgaccaaaatggcggctgccgttggtgcggggtgcggtttgtagtgctgttgccctactcatccctttgcaaaatgtgaaagaagaagcggctggtggaggcgggccataggcaatgagtcggcgaaggaaacatgatgacagccctagcccgaagaaaacgccgcacaaaacagtggcggcggaggaatgcggctcggtggtcgagccagggaggaggcggctgagatcggcccgcggttcgtggccctgcggggctagagaggggcctcccgggccagtgcggcagcgagagcagcctccgaccgccgccctgtgcagtaaaagtaaccccgagggtgagacgtcggcagcgcggcctgccttggcttcggcgccgcatccccacatcccagcttgcaacagggaaatctggggtgggggtggagtctggagcgtgtattctgtctctgaggatacccctgaaccatcgagagtccaaaaataatcctataccactccccgatgggcttttgtccccgaacttcagcactaccccgttaggtttgaccatccatttgcctccgccacaggaataggtaatgtggtttacctgtttgcgggagggcggctgctttccaggctgctcctccagtcagcagcagtggtggagtgagaagaaacagctgataggcccgctaacctcagtttttgcccggagaagttatttctctttaaaccctttttttccctgtgacctgctttagagaagagttcataggaaaagttaaagtttgtctcaaagcctggtagatgtctcacctcattgtgaataaaccggaagttcctgtgtgtaacatccctccaaataagatactaaggatctctttcgtctcgatggtgtcaggggatcctcatagaatcgactatcacccaatcacga

SEQ ID NO: 303663 - DNA, 3311 bp, Homo sapiens
cacgagggctaaacatatttaggtttctgttgggttactttggatttttgaatgtacctataaattacagatggttccccaaagcctccaagactcaatggtaataaatagaatgacttaggttatacagtattgtattatgcattcataaagcttctggattatctagaagtgtttgctatttacaatgtgaagtttgcgaagtgccgcgtggatttttatgtgaaacaagcatttctgttacggttcaggtaattatctctgggaaaaaaaattatcttggactataaaagttagtctcagctatttgaccttggggtcttacgaagtaaggtaatgctttaaaatgcaacaattgttattttactcatattttatatagaaaggtatgaaacaccaaagagagcgctgaaaatggactcactgtcatcttccttcagttctcctaatgatccagatggacagaatgatatcttttgggatcagaattctccattgacaaagcagttaggtaaaggaagaaaaaaacagatttacaccacagatagtgatgagatttcacatattgttaatcgtattgctcctcaggatgaaaaaccaacaacaaattctatgctggacatgtggattggtgaaactgctattccttgtactcccagtgtagcaaaaggaaaatcaagagcaaaaatcagctgcacaaagttaaaaacacaaagtcaagaagaagaacttatgaaactggctaaacaatttgataaaaatatggaagagctagatgtgattcaagagcaaaacaagaggaattatgattttacccagatgatttcagaaacagagattttaagtaattataaagataatatacagatgtggtcattacataatatagttcccgaaatagataatgctacaaaaaagccaatcaaaggaaacaccaagatatctgtggcaaataatcaaaatagcagtcagaagccatttgaccaaattgctgaagcagcctttaatgctatttttgatggttctactcagaaatgttagcggacagttaagccaagaactgccagaggctttttggagcaccagtaatactacctttgtaaagacaaatgctttgaaagaggagaaaatcattactaatgaaactctggtcattgaaaaactgtcaaataaaaccccacgatcactttcttctcaagtagatacacccataatgacaaaatcatgtgtgacttcctgtactaaggagccagaaacttctaataagtacattgatgcatttactacaagtgattttgaggatgattgggaaaacttactaggtagtgaaccttttgctatgcaaaatatcgacatgcctgaactctttccttctaaaacagcccatgttactgatcaaaaggaaatttgtacctttaatagtaaaactgttaaaaatacgtcaagagcaaatacaagtccagatgccaggttaggagattcaaaagtattacaagatctttcttcaaagacatatgacagagaattaatagatgcagaatatagattttcaccaaattcaaataaatcaaacaaattatccactggaaataaaatgaaatttgagaactcttccaataaaattgttattcaagacgaaattcaaaattgtatagttacatctaatctgacaaaaataaaggaagatattcttactaactctactgaagcttctgaaaggaagtcagctttgaacacaaggtattctaatgaacagaaaaataagtgcattttaaatcagtctattaaagcccctgttaatactgatctttttggctctgcaaatctaggcagtaaaaccagtgttagtaacccaaatcagactagtgcatcaaaagtaggttctttctttgatgattggaatgatccctcatttgccaatgaaattattaaagcatgtcatcaattagataatacctgggaagcagatgatgtagatgatgatttgttgtaccaagcatgtgatgatattgaaagactaactcagcaacaagacattagaaaggacagtaagacatcagaaagtatatgtgagatcaataataattccgaacatggagccaaactaactcagcaacaagacattagaaaggacagtaagacatcagaaagtatatgtgagatcaataataattccgaacatggagccaaaaacatgtttgctatatctaaacaaggaagtaatttggtacaatcaaagcatttgaatccaggcagcatttcagtgcagacatctttgacaaatagctcacaaatagataagccaatgaagatggagaaaggggaaatgtatggaaattctccaagatttttaggtgccacaaatttgactatgtattctaagatctcaaactgtcagataaataatctgcatgtgtcttatactaacactgatgttccaatacaagtgaatagttccaaattggttcttccaggaagttcaagtttgaatgtaacttcagatcatatgaatacagaaattactacttataagaagaaattgagtactaatcagccatgccataagactgtaacagatgaagctcagagcaaccttaacacaacagttggattttcaaagtttacatttacaaggatgaaaaattctcagattctttctcagtttaatcaaaattgtataactggaagtatgtctgataccaaaattacacagggtgtggagaaaaagaaaggtgtcaacccattactggaggaagctgttggacagcaatctttggtgaaactttctgaatctttgaaacaatcttcaaaagaggaagaagagaaaaatagaaagtgttctcctgaagaaattcagagaaaaagacaagaagcactggttcggagaatggctaaagcacgagcctcatctgtaaatgcagctcccacttcatttctttaatgaaatattagttggaagacttcacaaagactgctgataactatctgtgattgataggaaattttttttcttgatttctctgtgagaaatgtaatgctgacttttataaagcctggacttctactttatttaataaatcaatgtttgcaatggtaaatgaaacatttccttggacatgtatttgaaagtcattaaatacaaaagttttggaaattcaggaaagttagcaattatgtacggatattatacagaggaaagtagttatatttttaaatgctattattgcagaggatcatcaaaaaagaggtaatctacgttatttcctattctaatgtcttttcctaataaaaaacttcaactttctaagtta

SEQ ID NO: 303664 - DNA, 3257 bp, Homo sapiens
cacgagggctaaacatatttaggtttctgttgggttactttggatttttgaatgtacctataaattacagatggttccccaaagcctccaagactcaatggtaataaatagaatgacttaggttatacagtattgtattatgcattcataaagcttctggattatctagaagtgtttgctatttacaatgtgaagtttgcgaagtgccgcgtggatttttatgtgaaacaagcatttctgttacggttcaggtaattatctctgggaaaaaaaattatcttggactataaaagttagtctcagctatttgaccttggggtcttacgaagtaaggtaatgctttaaaatgcaacaattgttattttactcatattttatatagaaaggtatgaaacaccaaagagagcgctgaaaatggactcactgtcatcttccttcagttctcctaatgatccagatggacagaatgatatcttttgggatcagaattctccattgacaaagcagttaggtaaaggaagaaaaaaacagatttacaccacagatagtgatgagatttcacatattgttaatcgtattgctcctcaggatgaaaaaccaacaacaaattctatgctggacatgtggattggtgaaactgctattccttgtactcccagtgtagcaaaaggaaaatcaagagcaaaaatcagctgcacaaagttaaaaacacaaagtcaagaagaagaacttatgaaactggctaaacaatttgataaaaatatggaagagctagatgtgattcaagagcaaaacaagaggaattatgattttacccagatgatttcagaaacagagattttaagtaattataaagataatatacagatgtggtcattacataatatagttcccgaaatagataatgctacaaaaaagccaatcaaaggaaacaccaagatatctgtggcaaataatcaaaatagcagtcagaagccatttgaccaaattgctgaagcagcctttaatgctatttttgatggttctactcagaaatgttagcggacagttaagccaagaactgccagaggctttttggagcaccagtaatactacctttgtaaagacaaatgctttgaaagaggagaaaatcattactaatgaaactctggtcattgaaaaactgtcaaataaaaccccacgatcactttcttctcaagtagatacacccataatgacaaaatcatgtgtgacttcctgtactaaggagccagaaacttctaataagtacattgatgcatttactacaagtgattttgaggatgattgggaaaacttactaggtagtgaaccttttgctatgcaaaatatcgacatgcctgaactctttccttctaaaacagcccatgttactgatcaaaaggaaatttgtacctttaatagtaaaactgttaaaaatacgtcaagagcaaatacaagtccagatgccaggttaggagattcaaaagtattacaagatctttcttcaaagacatatgacagagaattaatagatgcagaatatagattttcaccaaattcaaataaatcaaacaaattatccactggaaataaaatgaaatttgagaactcttccaataaaattgttattcaagacgaaattcaaaattgtatagttacatctaatctgacaaaaataaaggaagatattcttactaactctactgaagcttctgaaaggaagtcagctttgaacacaaggtattctaatgaacagaaaaataagtgcattttaaatcagtctattaaagcccctgttaatactgatctttttggctctgcaaatctaggcagtaaaaccagtgttagtaacccaaatcagactagtgcatcaaaagtaggttctttctttgatgattggaatgatccctcatttgccaatgaaattattaaagcatgtcatcaattagataatacctgggaagcagatgatgtagatgatgatttgttgtaccaagcatgtgatgatattgaaagactaactcagcaacaagacattagaaaggacagtaagacatcagaaagtatatgtgagatcaataataattccgaacatggagccaaactaactcagcaacaagacattagaaaggacagtaagacatcagaaagtatatgtgagatcaataataattccgaacatggagccatgaatccaggcagcatttcagtgcagacatctttgacaaatagctcacaaatagataagccaatgaagatggagaaaggggaaatgtatggaaattctccaagatttttaggtgccacaaatttgactatgtattctaagatctcaaactgtcagataaataatctgcatgtgtcttatactaacactgatgttccaatacaagtgaatagttccaaattggttcttccaggaagttcaagtttgaatgtaacttcagatcatatgaatacagaaattactacttataagaagaaattgagtactaatcagccatgccataagactgtaacagatgaagctcagagcaaccttaacacaacagttggattttcaaagtttacatttacaaggatgaaaaattctcagattctttctcagtttaatcaaaattgtataactggaagtatgtctgataccaaaattacacagggtgtggagaaaaagaaaggtgtcaacccattactggaggaagctgttggacagcaatctttggtgaaactttctgaatctttgaaacaatcttcaaaagaggaagaagagaaaaatagaaagtgttctcctgaagaaattcagagaaaaagacaagaagcactggttcggagaatggctaaagcacgagcctcatctgtaaatgcagctcccacttcatttctttaatgaaatattagttggaagacttcacaaagactgctgataactatctgtgattgataggaaattttttttcttgatttctctgtgagaaatgtaatgctgacttttataaagcctggacttctactttatttaataaatcaatgtttgcaatggtaaatgaaacatttccttggacatgtatttgaaagtcattaaatacaaaagttttggaaattcaggaaagttagcaattatgtacggatattatacagaggaaagtagttatatttttaaatgctattattgcagaggatcatcaaaaaagaggtaatctacgttatttcctattctaatgtcttttcctaataaaaaacttcaactttctaagtta

SEQ ID NO: 303665 - DNA, 1020 bp, Homo sapiens
tttgtttttttggaagacgggggatgctacactggtactttatacctctttttttccctatctgccaaaggatgaaaaaccaacaacaaattctatgctggacatgtggattggtgaaactgctattccttgtactcccagtgtagcaaaaggaaaatcaagagcaaaaatcagctgcacaaagaagttcaagtttgaatgtaacttcagatcatatgaatacagaaattactacttataagaagaaattgagtactaatcagccatgccataagactgtaacagatgaagctcagagcaaccttaacacaacagttggattttcaaagtttacatttacaaggatgaaaaattctcagattctttctcagtttaatcaaaattgtataactggaagtatgtctgataccaaaattacacagggtgtggagaaaaagaaaggtgtcaacccattactggaggaagctgttggacagcaatctttggtgaaactttctgaatctttgaaacaatcttcaaaagaggaagaagagaaaaatagaaagtgttctcctgaagaaattcagagaaaaagacaagaagcactggttcggagaatggctaaagcacgagcctcatctgtaaatgcagctcccacttcatttctttaatgaaatattagttggaagacttcacaaagactgctgataactatctgtgattgataggaaattttttttcttgatttctctgtgagaaatgtaatgctgacttttataaagcctggacttctactttatttaataaatcaatgtttgcaatggtaaatgaaacatttccttggacatgtatttgaaagtcattaaatacaaaagttttggaaattcaggaaagttagcaattatgtacggatattatacagaggaaagtagttatatttttaaatgctattattgcagaggatcatcaaaaaagaggtaatctacgttatttcctattctaatgtcttttcctaataaaaaacttcaactttctaagtta

SEQ ID NO: 303666 - DNA, 736 bp, Homo sapiens
atcacactgtgaaaagaatgtatcaaatagagacagatccatcagtgcttgattttcttttgaactggagcattatatctgtattatgtacttagaattttatattcagtagtttagtttgatttaatagccaactaatatggcaaatctgggtgattaaaaaaagcaaaaattaaagcacatattgaatgactttataggctataaaagtaaaactcatcttttgttgaatttttagaggaagaagagaaaaatagaaagtgttctcctgaagaaattcagagaaaaagacaagaagcactggttcggagaatggctaaagcacgagcctcatctgtaaatgcagctcccacttcatttctttaatgaaatattagttggaagacttcacaaagactgctgataactatctgtgattgataggaaattttttttcttgatttctctgtgagaaatgtaatgctgacttttataaagcctggacttctactttatttaataaatcaatgtttgcaatggtaaatgaaacatttccttggacatgtatttgaaagtcattaaatacaaaagttttggaaattcaggaaagttagcaattatgtacggatattatacagaggaaagtagttatatttttaaatgctattattgcagaggatcatcaaaaaagaggtaatctacgttatttcctattctaatgtcttttcctaataaaaaacttcaactttctaagtta

SEQ ID NO: 303667 - DNA, 3094 bp, Homo sapiens
cacgagggctaaacatatttaggtttctgttgggttactttggatttttgaatgtacctataaattacagatggttccccaaagcctccaagactcaatggtaataaatagaatgacttaggttatacagtattgtattatgcattcataaagcttctggattatctagaagtgtttgctatttacaatgtgaagtttgcgaagtgccgcgtggatttttatgtgaaacaagcatttctgttacggttcaggtaattatctctgggaaaaaaaattatcttggactataaaagttagtctcagctatttgaccttggggtcttacgaagtaaggtaatgctttaaaatgcaacaattgttattttactcatattttatatagaaaggtatgaaacaccaaagagagcgctgaaaatggactcactgtcatcttccttcagttctcctaatgatccagatggacagaatgatatcttttgggatcagaattctccattgacaaagcagttaggtaaaggaagaaaaaaacagatttacaccacagatagtgatgagatttcacatattgttaatcgtattgctcctcaggatgaaaaaccaacaacaaattctatgctggacatgtggattggtgaaactgctattccttgtactcccagtgtagcaaaaggaaaatcaagagcaaaaatcagctgcacaaagttaaaaacacaaagtcaagaagaagaacttatgaaactggctaaacaatttgataaaaatatggaagagctagatgtgattcaagagcaaaacaagaggaattatgattttacccagatgatttcagaaacagagattttaagtaattataaagataatatacagatgtggtcattacataatatagttcccgaaatagataatgctacaaaaaagccaatcaaaggaaacaccaagatatctgtggcaaataatcaaaatagcagtcagaagccatttgaccaaattgctgaagcagcctttaatgctatttttgatggttctactcagaaatgttagcggacagttaagccaagaactgccagaggctttttggagcaccagtaatactacctttgtaaagacaaatgctttgaaagaggagaaaatcattactaatgaaactctggtcattgaaaaactgtcaaataaaaccccacgatcactttcttctcaagtagatacacccataatgacaaaatcatgtgtgacttcctgtactaaggagccagaaacttctaataagtacattgatgcatttactacaagtgattttgaggatgattgggaaaacttactaggtagtgaaccttttgctatgcaaaatatcgacatgcctgaactctttccttctaaaacagcccatgttactgatcaaaaggaaatttgtacctttaatagtaaaactgttaaaaatacgtcaagagcaaatacaagtccagatgccaggttaggagattcaaaagtattacaagatctttcttcaaagacatatgacagagaattaatagatgcagaatatagattttcaccaaattcaaataaatcaaacaaattatccactggaaataaaatgaaatttgagaactcttccaataaaattgttattcaagacgaaattcaaaattgtatagttacatctaatctgacaaaaataaaggaagatattcttactaactctactgaagcttctgaaaggaagtcagctttgaacacaaggtattctaatgaacagaaaaataagtgcattttaaatcagtctattaaagcccctgttaatactgatctttttggctctgcaaatctaggcagtaaaaccagtgttagtaacccaaatcagactagtgcatcaaaagtaggttctttctttgatgattggaatgatccctcatttgccaatgaaattattaaagcatgtcatcaattagataatacctgggaagcagatgatgtagatgatgatttgttgtaccaagcatgtgatgatattgaaagactaactcagcaacaagacattagaaaggacagtaagacatcagaaagtatatgtgagatcaataataattccgaacatggagccaaactaactcagcaacaagacattagaaaggacagtaagacatcagaaagtatatgtgagatcaataataattccgaacatggagccaaaaacatgtttgctatatctaaacaaggaagtaatttggtacaatcaaagcatttgaatccaggcagcatttcagtgcagacatctttgacaaatagctcacaaatagataagccaatgaagatggagaaaggggaaatgtatggaaattctccaagatttttaggtgccacaaatttgactatgtattctaagatctcaaactgtcagataaataatctgcatgtgtcttatactaacactgatgttccaatacaagtgaatagttccaaattggttcttccaggaagttcaagtttgaatgtaacttcagatcatatgaatacagaaattactacttataagaagaaattgagtactaatcagccatgccataagactgtaacagatgaagctcagagcaaccttaacacaacagttggattttcaaagtttacatttacaaggatgaaaaattctcagattctttctcagtttaatcaaaattgtataactggaagtatgtctgataccaaaattacacagggtgtggagaaaaagaaaggtgtcaacccattactggaggaagctgttggacagcaatctttggtgaaactttctgaatctttgaaacaatcttcaaaagaggaagaagagaaaaatagaaagtgttctcctgaagaaattcagagaaaaagacaagaagcactggttcggagaatggctaaagcacgagcctcatctgtaaatgcagctcccacttcatttctttaatgaaatattagttggaagacttcacaaagactgctgataactatctgtgattgacccccccccttttatgttgatttggcgtgaggaaatgagagtgccctttgatgaagcgtggccttggtcttgatttaatagaccattgtttgcgatggt

SEQ ID NO: 303668 - DNA, 2848 bp, Homo sapiens
cacgagggctaaacatatttaggtttctgttgggttactttggatttttgaatgtacctataaattacagatggttccccaaagcctccaagactcaatggtaataaatagaatgacttaggttatacagtattgtattatgcattcataaagcttctggattatctagaagtgtttgctatttacaatgtgaagtttgcgaagtgccgcgtggatttttatgtgaaacaagcatttctgttacggttcaggtaattatctctgggaaaaaaaattatcttggactataaaagttagtctcagctatttgaccttggggtcttacgaagtaaggtaatgctttaaaatgcaacaattgttattttactcatattttatatagaaaggtatgaaacaccaaagagagcgctgaaaatggactcactgtcatcttccttcagttctcctaatgatccagatggacagaatgatatcttttgggatcagaattctccattgacaaagcagttaggtaaaggaagaaaaaaacagatttacaccacagatagtgatgagatttcacatattgttaatcgtattgctcctcaggatgaaaaaccaacaacaaattctatgctggacatgtggattggtgaaactgctattccttgtactcccagtgtagcaaaaggaaaatcaagagcaaaaatcagctgcacaaagttaaaaacacaaagtcaagaagaagaacttatgaaactggctaaacaatttgataaaaatatggaagagctagatgtgattcaagagcaaaacaagaggaattatgattttacccagatgatttcagaaacagagattttaagtaattataaagataatatacagatgtggtcattacataatatagttcccgaaatagataatgctacaaaaaagccaatcaaaggaaacaccaagatatctgtggcaaataatcaaaatagcagtcagaagccatttgaccaaattgctgaagcagcctttaatgctatttttgatggttctactcagaaatgttagcggacagttaagccaagaactgccagaggctttttggagcaccagtaatactacctttgtaaagacaaatgctttgaaagaggagaaaatcattactaatgaaactctggtcattgaaaaactgtcaaataaaaccccacgatcactttcttctcaagtagatacacccataatgacaaaatcatgtgtgacttcctgtactaaggagccagaaacttctaataagtacattgatgcatttactacaagtgattttgaggatgattgggaaaacttactaggtagtgaaccttttgctatgcaaaatatcgacatgcctgaactctttccttctaaaacagcccatgttactgatcaaaaggaaatttgtacctttaatagtaaaactgttaaaaatacgtcaagagcaaatacaagtccagatgccaggttaggagattcaaaagtattacaagatctttcttcaaagacatatgacagagaattaatagatgcagaatatagattttcaccaaattcaaataaatcaaacaaattatccactggaaataaaatgaaatttgagaactcttccaataaaattgttattcaagacgaaattcaaaattgtatagttacatctaatctgacaaaaataaaggaagatattcttactaactctactgaagcttctgaaaggaagtcagctttgaacacaaggtattctaatgaacagaaaaataagtgcattttaaatcagtctattaaagcccctgttaatactgatctttttggctctgcaaatctaggcagtaaaaccagtgttagtaacccaaatcagactagtgcatcaaaagtaggttctttctttgatgattggaatgatccctcatttgccaatgaaattattaaagcatgtcatcaattagataatacctgggaagcagatgatgtagatgatgatttgttgtaccaagcatgtgatgatattgaaagactaactcagcaacaagacattagaaaggacagtaagacatcagaaagtatatgtgagatcaataataattccgaacatggagccaaactaactcagcaacaagacattagaaaggacagtaagacatcagaaagtatatgtgagatcaataataattccgaacatggagccatgaatccaggcagcatttcagtgcagacatctttgacaaatagctcacaaatagataagccaatgaagatggagaaaggggaaatgtatggaaattctccaagatttttaggtgccacaaatttgactatgtattctaagatctcaaactgtcagataaataatctgcatgtgtcttatactaacactgatgttccaatacaagtgaatagttccaaattggttcttccaggaagttcaagtttgaatgtaacttcagatcatatgaatacagaaattactacttataagaagaaattgagtactaatcagccatgccataagactgtaacagatgaagctcagagcaaccttaacacaacagttggattttcaaagtttacatttacaaggatgaaaaattctcagattctttctcagtttaatcaaaattgtataactggaagtatgtctgataccgctgttccacagcactctttgctgaaactttctgaacttttgaaccaatcttaaacgagaagcatagttccttcgaaccccccccccccactctttcacctcctacgccgattgattgttctgcaacaggctaccgtccactcctatctgtactgcagctctacttcatttctttactcgcttctcctctgcttgctcccc

SEQ ID NO: 303669 - DNA, 380 bp, Homo sapiens
gtactacctatcgatttgctcctgcacgcgtatatcgtatgtagctaaacttgtcagtggaagggcggctgctttccaggctgctcctccagtcagcagcagtggtggagtgagaagaaacagctgataggcccgctaacctcagtttttgcccggagaagttatttctctttaaaccctttttttccctgtgacctgctttagagaagagttcataggaaaagttaaagtttgtctcaaagcctggtagatgtctcacctcattgtgaataaaccggaagttcctgtgtgtaacatccctccaaataagatactaaggatctctttcgtctcgatggtgtcaggggatcctcatagaatcgactatcacccaatcacga

SEQ ID NO: 303670 - DNA, 634 bp, Homo sapiens
gcggccgcctactactactactgctcgaattcaagcttctaacgatgtacggggacatgtcaggcattttgcaaggaaaagccacttggggaaagatggaaaaggacaaaaaaaattaataaatttccattggccctcgggtgagctgagggtttttgcaaggaaaaaaaaaaaaaaaaaaaaaaaaaaaaaaaaaaaaaaaaaaaaaaaaaaaaaaaaaaaaaaaaaaaaaaaaaaaaaaaaaaaaaaaaaaaaaaaaaaaaaaaaaaaaaaaaaaaaaaaaaaaaaaaaacgagggggggacggacgcgaagacacgaatcacctccgacgcgaggggcgccagactcgcaccgaccggcgcacccgagctatgctagaaatcaagagagggcggcgcacacacaagcacgatggatcgaacactaacacaacagcaacgcagggcgggcggggatcacagcaacacaaaagcagacggcgaagcaacaaacacggaggcgtaggacgcgacacggaaacgaacaaacacacatacggggcggagaagcaacaccgcaaggcaaccaccacccaccaagaggaaagtagaccacagagaggcggaaaacaaaaacccaccgtacgagcagtg

SEQ ID NO: 303671 - DNA, 880 bp, Homo sapiens
cctcggtctctggagcccaccagggaaggccctcatcccctgccgctacttctctggggaatgtgggttccatccaggattgggggcctctctgctcacccactctgcacccaggatcctagtcccctgccctctggcacagctgcttcctgcaagaaagcaagtctttggtctccctgagaagccatgtccctcgtgctgtctcttgcctgtcccacctgtgccctgccctccagcttgtatttaagtccctgggctgcccccttggggtgccccccgctcccaggttcccctctggtgtcatgtcaggcattttgcaaggaaaagccacttggggaaagatggaaaaggacaaaaaaaattaataaatttccattggccctcgggtgagctgagggtttttgcaaggaaaaaaaaaaaaaaaaaaaaaaaaaaaaaaaaaaaaaaaaaaaaaaaaaaaaaaaaaaaaaaaaaaaaaaaaaaaaaaaaaaaaaaaaaaaaaaaaaaaaaaaaaaaaaaaaaaaaaaaaaaaaaaaaacgagggggggacggacgcgaagacacgaatcacctccgacgcgaggggcgccagactcgcaccgaccggcgcacccgagctatgctagaaatcaagagagggcggcgcacacacaagcacgatggatcgaacactaacacaacagcaacgcagggcgggcggggatcacagcaacacaaaagcagacggcgaagcaacaaacacggaggcgtaggacgcgacacggaaacgaacaaacacacatacggggcggagaagcaacaccgcaaggcaaccaccacccaccaagaggaaagtagaccacagagaggcggaaaacaaaaacccaccgtacgagcagtg

SEQ ID NO: 303672 - DNA, 149 bp, Homo sapiens
ttgaagtaatgactgatggtggaacagatgcagagaggtcacacagccagtgcacagcaattcctggtgcgcacccgtggggcagcctgcccagagtgcagcagtcattgtagtactactcactgtccccacctgaatttgtggactgc

SEQ ID NO: 303673 - DNA, 168 bp, Homo sapiens
gcggccgcctactactactactactgctcgaattcaagcttctaacgatgtacggggcatgggactggcccaggcacacaggtcccggggcatcaggagaaaggctgggtcttgggaccttgtcctccccagttggcctactgttacacattaaaacgatttgcccag

SEQ ID NO: 303674 - DNA, 1775 bp, Homo sapiens
ggaaggcggacgactagagtcgttgggcccggcgcgacccgcaggagcgtagagagcgcgggactagagtgcagagctccgggacgtggatcggagccggcgcgatgggcggagagcaggaggaggagcggttcgacggcatgttgctggccatggctcagcagcacgagggcggcgtgcaggagcttgtgaacaccttcttcagcttccttcgacgcaaaacagactttttcattggaggagaagaagggatggcagagaagcttatcacacagactttcagccaccacaatcagctggcacagaagacccggcgggagaagagagcccggcaggaggccgagcggcgggagaaggcggagcgggcggccagactggccaaggaagccaagtcagagacctcagggccccagatcaaggagctaactgatgaagaggcagagaggctgcagctagagattgaccagaaaaaggatgcagagaatcatgaggcccagctcaagaacggcagccttgactccccagggaagcaggatactgaggaagatgaggaggaagatgagaaggacaaaggaaaactgaagcccaacctaggcaacggggcagacctgcccaattaccgctggacccagaccctgtcggagctggacctggcggtccctttctgtgtgaacttccggctgaaagggaaggacatggtggtggacatccagcggcggcacctccgggtggggctcaaggggcagccagcgatcattgatggggagctctacaatgaagtgaaggtggaggagagctcgtggctcattgaggacggcaaggtggtgactgtgcatctggagaagatcaataagatggagtggtggagccgcttggtgtccagtgaccctgagatcaacaccaagaagattaaccctgagaattccaagctgtcagacctggacagtgagactcgcagcatggtggaaaagatgatgtatgaccagcgacagaagtccatggggctgccaacttcagacgaacagaagaaacaggagattctgaagaagttcatggatcaacatccggagatggatttttccaaggctaaattcaactagcccctgttttttcctccctgaactcttggggctgagctgcaaccacccaactttctttcccactcttctctgggacttgtgggcctcagggcttggggcaggcatgggactggcccaggcacacaggtcccggggcatcaggagaaaggctgggtcttgggaccttgtcctccccagttggcctactgttacacattaaaacgatttgcccagctccttctgtgtcctctcttgcctctggcctttctctggggcacaggcctcttacggctgctgctgggaactgggagtttggcttctagcccagattctgccatgtgacctagggcacatccttgcccctctctgggcctcagtttctcattacttaaagattaaaacaaggcttggccgggtgtgatggttcatgtctgtaatcccagcactttgggaggctgaggggagcagatcacctgatgtcaggagtttgagaccagcttggccaacatggagaaacccagtctctactaaaaatacaaaaattagccgggtgtggtggtgcacacctgtaatcccagctactcgggaggctgaggcaggagaatcgcttgaacccgggtggcggaggttgcagtgagccgagattgcactacttcactccagcatgggtgacagagactccatctcaaaaaaata

SEQ ID NO: 303675 - DNA, 1313 bp, Homo sapiens
ggaaggcggacgactagagtcgttgggcccggcgcgacccgcaggagcgtagagagcgcgggactagagtgcagagctccgggacgtggatcggagccggcgcgatgggcggagagcaggaggaggagcggttcgacggcatgttgctggccatggctcagcagcacgagggcggcgtgcaggagcttgtgaacaccttcttcagcttccttcgacgcaaaacagactttttcattggaggagaagaagggatggcagagaagcttatcacacagactttcagccaccacaatcagctggcacagaagacccggcgggagaagagagcccggcaggaggccgagcggcgggagaaggcggagcgggcggccagactggccaaggaagccaagtcagagacctcagggccccagatcaaggagctaactgatgaagaggcagagaggctgcagctagagattgaccagaaaaaggatgcagagaatcatgaggcccagctcaagaacggcagccttgactccccagggaagcaggatactgaggaagatgaggaggaagatgagaaggacaaaggaaaactgaagcccaacctaggcaacggggcagacctgcccaattaccgctggacccagaccctgtcggagctggacctggcggtccctttctgtgtgaacttccggctgaaagggaaggacatggtggtggacatccagcggcggcacctccgggtggggctcaaggggcagccagcgatcattgatggggagctctacaatgaagtgaaggtggaggagagctcgtggctcattgaggacggcaaggtggtgactgtgcatctggagaagatcaataagatggagtggtggagccgcttggtgtccagtgaccctgagatcaacaccaagaagattaaccctgagaattccaagctgtcagacctggacagtgagactcgcagcatggtggaaaagatgatgtatgaccagcgacagaagtccatggggctgccaacttcagacgaacagaagaaacaggagattctgaagaagttcatggatcaacatccggagatggatttttccaaggctaaattcaactagcccctgttttttcctccctgaactcttggggctgagctgcaaccacccaactttctttcccactcttctctgggacttgtgggcctcagggcttggggcaggcatgggactggcccaggcacacaggtcccggggcatcaggagaaaggctgggtcttgggaccttgtcctccccagttggcctactgttacacattaaaacgatttgcccag

SEQ ID NO: 303676 - DNA, 948 bp, Homo sapiens
  misc_feature (864)..(864): n is a, c, g, or t
  misc_feature (866)..(867): n is a, c, g, or t
  misc_feature (871)..(871): n is a, c, g, or t
  misc_feature (879)..(879): n is a, c, g, or t
  misc_feature (881)..(882): n is a, c, g, or t
  misc_feature (890)..(890): n is a, c, g, or t
ggaaggcggacgactagagtcgttgggcccggcgcgacccgcaggagcgtagagagcgcgggactagagtgcagagctccgggacgtggatcggagccggcgcgatgggcggagagcaggaggaggagcggttcgacggcatgttgctggccatggctcagcagcacgagggcggcgtgcaggagcttgtgaacaccttcttcagcttccttcgacgcaaaacagactttttcattggaggagaagaagggatggcagagaagcttatcacacagactttcagccaccacaatcagctggcacagaagacccggcgggagaagagagcccggcaggaggccgagcggcgggagaaggcggagcgggcggccagactggccaaggaagccaagtcagagacctcagggccccagatcaaggagctaactgatgaagaggcagagaggctgcagctagagattgaccagaaaaaggatgcagagaatcatgaggcccagctcaagaacggcagccttgactccccagggaagcaggatactgaggaagatgaggaggaagatgagaaggacaaaggaaaactgaagcccaacctaggcaacggggcagacctgcccaattaccgctggacccagaccctgtcggagctggacctggcggtccctttctgtgtgaacttccggctgaaagggaaggacatggtggtggacatccagcggcggcacctccgggtggggctcaaggggcagccagcgatcattgatggggagctctacaatgaagtgaaggtggaggagagctcgtggctcattgaggacggcaaggtggtgactgtgcatctggagaagccaccagaggagtggggancnntggngtcatgancnngataaacnaaaattaccgaaatccatgtgccggcggaacccctgtggaaaattttttccgaatctg

SEQ ID NO: 303677 - DNA, 892 bp, Homo sapiens
cgggtgtgaatcggacgaggaaaagattaaccctgagaattccaagctgtcagacctggacagtgagactcgcagcatggtggaaaagatgatgtatgaccagcgacagaagtccatggggctgccaacttcagacgaacagaagaaacaggagattctgaagaagttcatggatcaacatccggagatggatttttccaaggctaaattcaactagcccctgttttttcctccctgaactcttggggctgagctgcaaccacccaactttctttcccactcttctctgggacttgtgggcctcagggcttggggcaggcatgggactggcccaggcacacaggtcccggggcatcaggagaaaggctgggtcttgggaccttgtcctccccagttggcctactgttacacattaaaacgatttgcccagctccttctgtgtcctctcttgcctctggcctttctctggggcacaggcctcttacggctgctgctgggaactgggagtttggcttctagcccagattctgccatgtgacctagggcacatccttgcccctctctgggcctcagtttctcattacttaaagattaaaacaaggcttggccgggtgtgatggttcatgtctgtaatcccagcactttgggaggctgaggggagcagatcacctgatgtcaggagtttgagaccagcttggccaacatggagaaacccagtctctactaaaaatacaaaaattagccgggtgtggtggtgcacacctgtaatcccagctactcgggaggctgaggcaggagaatcgcttgaacccgggtggcggaggttgcagtgagccgagattgcactacttcactccagcatgggtgacagagactccatctcaaaaaaata

SEQ ID NO: 303678 - DNA, 430 bp, Homo sapiens
cgggtgtgaatcggacgaggaaaagattaaccctgagaattccaagctgtcagacctggacagtgagactcgcagcatggtggaaaagatgatgtatgaccagcgacagaagtccatggggctgccaacttcagacgaacagaagaaacaggagattctgaagaagttcatggatcaacatccggagatggatttttccaaggctaaattcaactagcccctgttttttcctccctgaactcttggggctgagctgcaaccacccaactttctttcccactcttctctgggacttgtgggcctcagggcttggggcaggcatgggactggcccaggcacacaggtcccggggcatcaggagaaaggctgggtcttgggaccttgtcctccccagttggcctactgttacacattaaaacgatttgcccag

SEQ ID NO: 303679 - DNA, 315 bp, Homo sapiens
ctctatgtgcctgctctctatgaacagaagaaacaggagattctgaagaagttcatggatcaacatccggagatggatttttccaaggctaaattcaactagcccctgttttttcctccctgaactcttggggctgagctgcaaccacccaactttctttcccactcttctctgggacttgtgggcctcagggcttggggcaggcatgggactggcccaggcacacaggtcccggggcatcaggagaaaggctgggtcttgggaccttgtcctccccagttggcctactgttacacattaaaacgatttgcccag

SEQ ID NO: 303680 - DNA, 290 bp, Homo sapiens
ggaaggcggacgactagagtcgttgggcccggcgcgacccgcaggagcgtagagagcgcgggactagagtgcagagctccgggacgtggatcggagccggcgcgatgggcggagagcaggaggaggagcggttcgacggcatgttgctggccatggctcagcagcacgagggcggcgtgcaggagcttgtgaacaccttcttcagcttccttcgacgcaaaacagactttttcattggaggagaagaagggatggcagagaaggtaagtgttggaaaccactgtcctttg

SEQ ID NO: 303681 - DNA, 1618 bp, Homo sapiens
ggaaggcggacgactagagtcgttgggcccggcgcgacccgcaggagcgtagagagcgcgggactagagtgcagagctccgggacgtggatcggagccggcgcgatgggcggagagcaggaggaggagcggttcgacggcatgttgctggccatggctcagcagcacgagggcggcgtgcaggagcttgtgaacaccttcttcagcttccttcgacgcaaaacagactttttcattggaggagaagaagggatggcagagaagcttatcacacagactttcagccaccacaatcagctggcacagaagacccggcgggagaagagagcccggcaggaggccgagcggcgggagaaggcggagcgggcggccagactggccaaggaagccaagtcagagacctcagggccccagatcaaggagctaactgatgaagaggcagagaggctgcagctagagattgaccagaaaaaggatgcagagaatcatgaggcccagctcaagaacggcagccttgactccccagggaagcaggatactgaggaagatgaggaggaagatgagaaggacaaaggaaaactgaagcccaacctaggcaacggggcagacctgcccaattaccgctggacccagaccctgtcggagctggacctggcggtccctttctgtgtgaacttccggctgaaagggaaggacatggtggtggacatccagcggcggcacctccgggtggggctcaaggggcagccagcgatcattgatggggagctctacaatgaagtgaaggtggaggagagctcgtggctcattgaggacggcaaggtggtgactgtgcatctggagaagatcaataagatggagtggtggagccgcttggtgtccagtgaccctgagatcaacaccaagaagattaaccctgagaattccaagctgtcagacctggacagtgagactcgcagcatggtggaaaagatgatgtatgaccagcgacagaagtccatggggctgccaacttcagacgaacagaagaaacaggagattctgaagaagttcatggatcaacatccggagatggatttttccaaggctaaattcaactagcccctgttttttcctccctgaactcttggggctgagctgcaaccacccaactttctttcccactcttctctgggacttgtgggcctcagggcttggggcaggcatgggactggcccaggcacacaggtcccggggcatcaggagaaaggctgggtcttgggaccttgtcctccccagttggcctactgttacacattaaaacgatttgcccagaaaaaaaaaaaaaaataaaaaaaacaacaaaatttggtggggcgcgcagcgccccagaaagaaagttctaaaaaccatctgtgggaggcagggcccagagtgtaggcacctgcggcaagacgtgggacaagggaacacccgcgccagcgcctggggtcgggttctcaccataaaaaaccgcgcgacccggggcgtcggacacacccaagggggtctggcggcacgggtttacaggggcaggctacccccacccgccgcgacagagaaccgaaacacagcgaacacgcagaccacaacacaatgag

SEQ ID NO: 303682 - DNA, 1579 bp, Homo sapiens
ggaaggcggacgactagagtcgttgggcccggcgcgacccgcaggagcgtagagagcgcgggactagagtgcagagctccgggacgtggatcggagccggcgcgatgggcggagagcaggaggaggagcggttcgacggcatgttgctggccatggctcagcagcacgagggcggcgtgcaggagcttgtgaacaccttcttcagcttccttcgacgcaaaacagactttttcattggaggagaagaagggatggcagagaagcttatcacacagactttcagccaccacaatcagctggcacagaagacccggcgggagaagagagcccggcaggaggccgagcggcgggagaaggcggagcgggcggccagactggccaaggaagccaagtcagagacctcagggccccagatcaaggagctaactgatgaagaggcagagaggctgcagctagagattgaccagaaaaaggatgcagagaatcatgaggcccagctcaagaacggcagccttgactccccagggaagcaggatactgaggaagatgaggaggaagatgagaaggacaaaggaaaactgaagcccaacctaggcaacggggcagacctgcccaattaccgctggacccagaccctgtcggagctggacctggcggtccctttctgtgtgaacttccggctgaaagggaaggacatggtggtggacatccagcggcggcacctccgggtggggctcaaggggcagccagcgatcattgatggggagctctacaatgaagtgaaggtggaggagagctcgtggctcattgaggacggcaaggtggtgactgtgcatctggagaagatcaataagatggagtggtggagccgcttggtgtccagtgaccctgagatcaacaccaagaagattaaccctgagaattccaagctgtcagacctggacagtgagactcgcagcatggtggaaaagatgatgtatgaccagcgacagaagtccatggggctgccaacttcagacgaacagaagaaacaggagattctgaagaagttcatggatcaacatccggagatggatttttccaaggctaaattcaactagcccctgttttttcctccctgaactcttggggctgagctgcaaccacccaactttctttcccactcttctctgggacttgtgggcctcagggcttggggcaggcatgggactggcccaggcacacaggtcccggggcatcaggagaaaggctgggtcttgggaccttgtcctccccagttggcctactgttacacattaaaacgatttgcccagaaaaaaccagagccaaccgcacaccccagggacctactacacgcaccagacgggcccaaaccaggggcactggaaccgcggccagcggcaacacgcggcgcccggagcacccagcgctgcctgtgcaacaaagcgggaacaccgcgcggtcccccccaaaagcgcgccggcccgacgtcgccacccccggtaccccgcaaagggcgcgcacaccagccccctacccccgcgacccgcccccgcggccacacgaccccgccgtacca

SEQ ID NO: 303683 - DNA, 2218 bp, Homo sapiens
ggaaggcggacgactagagtcgttgggcccggcgcgacccgcaggagcgtagagagcgcgggactagagtgcagagctccgggacgtggatcggagccggcgcgatgggcggagagcaggaggaggagcggttcgacggcatgttgctggccatggctcagcagcacgagggcggcgtgcaggagcttgtgaacaccttcttcagcttccttcgacgcaaaacagactttttcattggaggagaagaagggatggcagagaagcttatcacacagactttcagccaccacaatcagctggcacagaagacccggcgggagaagagagcccggcaggaggccgagcggcgggagaaggcggagcgggcggccagactggccaaggaagccaagtcagagacctcagggccccagatcaaggagctaactgatgaagaggcagagaggctgcagctagagattgaccagaaaaaggatgcagagaatcatgaggcccagctcaagaacggcagccttgactccccagggaagcaggatactgaggaagatgaggaggaagatgagaaggacaaaggaaaactgaagcccaacctaggcaacggggcagacctgcccaattaccgctggacccagaccctgtcggagctggacctggcggtccctttctgtgtgaacttccggctgaaagggaaggacatggtggtggacatccagcggcggcacctccgggtggggctcaaggggcagccagcgatcattgatggggagctctacaatgaagtgaaggtggaggagagctcgtggctcattgaggacggcaaggtggtgactgtgcatctggagaagatcaataagatggagtggtggagccgcttggtgtccagtgaccctgagatcaacaccaagaagattaaccctgagaattccaagctgtcagacctggacagtgagactcgcagcatggtggaaaagatgatgtatgaccagcgacagaagtccatggggctgccaacttcagacgaacagaagaaacaggagattctgaagaagtgagcaattcagagacggggttgggggaccgtgggtgcctgggggcttagacttcggtgacagcagtgagtggatcactgcgctgcctcaggagctgccctgccccctttccagccatgtttatggctttatggctttggcttgcctactcttgtcatttgctgaggtcatcttgagggcaaggccggctcatggtgcatgataggagggaaggggtaacaggcggtcattgccacctacaggaaaacaatgccagtgttggtgcctcagcttccagcctcgggactcaaatgcgtctcagataccctgggccctgctcctgcccagcctggcttggtgttgctgaggtctaaagagattagacttgacacgggggtgctgggagaagggacagctttagaagagaaggatgagctgtttcatcttgcttccgtttctccaggttcatggatcaacatccggagatggatttttccaaggctaaattcaactagcccctgttttttcctccctgaactcttggggctgagctgcaaccacccaactttctttcccactcttctctgggacttgtgggcctcagggcttggggcaggcatgggactggcccaggcacacaggtcccggggcatcaggagaaaggctgggtcttgggaccttgtcctccccagttggcctactgttacacattaaaacgatttgcccagctccttctgtgtcctctcttgcctctggcctttctctggggcacaggcctcttacggctgctgctgggaactgggagtttggcttctagcccagattctgccatgtgacctagggcacatccttgcccctctctgggcctcagtttctcattacttaaagattaaaacaaggcttggccgggtgtgatggttcatgtctgtaatcccagcactttgggaggctgaggggagcagatcacctgatgtcaggagtttgagaccagcttggccaacatggagaaacccagtctctactaaaaatacaaaaattagccgggtgtggtggtgcacacctgtaatcccagctactcgggaggctgaggcaggagaatcgcttgaacccgggtggcggaggttgcagtgagccgagattgcactacttcactccagcatgggtgacagagactccatctcaaaaaaata

SEQ ID NO: 303684 - DNA, 1869 bp, Homo sapiens
ggaaggcggacgactagagtcgttgggcccggcgcgacccgcaggagcgtagagagcgcgggactagagtgcagagctccgggacgtggatcggagccggcgcgatgggcggagagcaggaggaggagcggttcgacggcatgttgctggccatggctcagcagcacgagggcggcgtgcaggagcttgtgaacaccttcttcagcttccttcgacgcaaaacagactttttcattggaggagaagaagggatggcagagaagcttatcacacagactttcagccaccacaatcagctggcacagaagacccggcgggagaagagagcccggcaggaggccgagcggcgggagaaggcggagcgggcggccagactggccaaggaagccaagtcagagacctcagggccccagatcaaggagctaactgatgaagaggcagagaggctgcagctagagattgaccagaaaaaggatgcagagaatcatgaggcccagctcaagaacggcagccttgactccccagggaagcaggatactgaggaagatgaggaggaagatgagaaggacaaaggaaaactgaagcccaacctaggcaacggggcagacctgcccaattaccgctggacccagaccctgtcggagctggacctggcggtccctttctgtgtgaacttccggctgaaagggaaggacatggtggtggacatccagcggcggcacctccgggtggggctcaaggggcagccagcgatcattgatggggagctctacaatgaagtgaaggtggaggagagctcgtggctcattgaggacggcaaggtggtgactgtgcatctggagaagatcaataagatggagtggtggagccgcttggtgtccagtgaccctgagatcaacaccaagaagattaaccctgagaattccaaggtgagccctggctggttgggggagcttcagcaggaaggtgaggggcctcgttgtttccagagcttcaccgattcctgtcactgcctgccctcagctgtcagacctggacagtgagactcgcagcatggtggaaaagatgatgtatgaccagcgacagaagtccatggggctgccaacttcagacgaacagaagaaacaggagattctgaagaagttcatggatcaacatccggagatggatttttccaaggctaaattcaactagcccctgttttttcctccctgaactcttggggctgagctgcaaccacccaactttctttcccactcttctctgggacttgtgggcctcagggcttggggcaggcatgggactggcccaggcacacaggtcccggggcatcaggagaaaggctgggtcttgggaccttgtcctccccagttggcctactgttacacattaaaacgatttgcccagctccttctgtgtcctctcttgcctctggcctttctctggggcacaggcctcttacggctgctgctgggaactgggagtttggcttctagcccagattctgccatgtgacctagggcacatccttgcccctctctgggcctcagtttctcattacttaaagattaaaacaaggcttggccgggtgtgatggttcatgtctgtaatcccagcactttgggaggctgaggggagcagatcacctgatgtcaggagtttgagaccagcttggccaacatggagaaacccagtctctactaaaaatacaaaaattagccgggtgtggtggtgcacacctgtaatcccagctactcgggaggctgaggcaggagaatcgcttgaacccgggtggcggaggttgcagtgagccgagattgcactacttcactccagcatgggtgacagagactccatctcaaaaaaata

SEQ ID NO: 303685 - DNA, 2312 bp, Homo sapiens
ggaaggcggacgactagagtcgttgggcccggcgcgacccgcaggagcgtagagagcgcgggactagagtgcagagctccgggacgtggatcggagccggcgcgatgggcggagagcaggaggaggagcggttcgacggcatgttgctggccatggctcagcagcacgagggcggcgtgcaggagcttgtgaacaccttcttcagcttccttcgacgcaaaacagactttttcattggaggagaagaagggatggcagagaagcttatcacacagactttcagccaccacaatcagctggcacagaagacccggcgggagaagagagcccggcaggaggccgagcggcgggagaaggcggagcgggcggccagactggccaaggaagccaagtcagagacctcagggccccagatcaaggagctaactgatgaagaggcagagaggctgcagctagagattgaccagaaaaaggatgcagagaatcatgaggcccagctcaagaacggcagccttgactccccagggaagcaggatactgaggaagatgaggaggaagatgagaaggacaaaggaaaactgaagcccaacctaggcaacggggcagacctgcccaattaccgctggacccagaccctgtcggagctggacctggcggtccctttctgtgtgaacttccggctgaaagggaaggacatggtggtggacatccagcggcggcacctccgggtggggctcaaggggcagccagcgatcattgatggggagctctacaatgaagtgaaggtggaggagagctcgtggctcattgaggacggcaaggtggtgactgtgcatctggagaagatcaataagatggagtggtggagccgcttggtgtccagtgaccctgagatcaacaccaagaagattaaccctgagaattccaaggtgagccctggctggttgggggagcttcagcaggaaggtgaggggcctcgttgtttccagagcttcaccgattcctgtcactgcctgccctcagctgtcagacctggacagtgagactcgcagcatggtggaaaagatgatgtatgaccagcgacagaagtccatggggctgccaacttcagacgaacagaagaaacaggagattctgaagaagtgagcaattcagagacggggttgggggaccgtgggtgcctgggggcttagacttcggtgacagcagtgagtggatcactgcgctgcctcaggagctgccctgccccctttccagccatgtttatggctttatggctttggcttgcctactcttgtcatttgctgaggtcatcttgagggcaaggccggctcatggtgcatgataggagggaaggggtaacaggcggtcattgccacctacaggaaaacaatgccagtgttggtgcctcagcttccagcctcgggactcaaatgcgtctcagataccctgggccctgctcctgcccagcctggcttggtgttgctgaggtctaaagagattagacttgacacgggggtgctgggagaagggacagctttagaagagaaggatgagctgtttcatcttgcttccgtttctccaggttcatggatcaacatccggagatggatttttccaaggctaaattcaactagcccctgttttttcctccctgaactcttggggctgagctgcaaccacccaactttctttcccactcttctctgggacttgtgggcctcagggcttggggcaggcatgggactggcccaggcacacaggtcccggggcatcaggagaaaggctgggtcttgggaccttgtcctccccagttggcctactgttacacattaaaacgatttgcccagctccttctgtgtcctctcttgcctctggcctttctctggggcacaggcctcttacggctgctgctgggaactgggagtttggcttctagcccagattctgccatgtgacctagggcacatccttgcccctctctgggcctcagtttctcattacttaaagattaaaacaaggcttggccgggtgtgatggttcatgtctgtaatcccagcactttgggaggctgaggggagcagatcacctgatgtcaggagtttgagaccagcttggccaacatggagaaacccagtctctactaaaaatacaaaaattagccgggtgtggtggtgcacacctgtaatcccagctactcgggaggctgaggcaggagaatcgcttgaacccgggtggcggaggttgcagtgagccgagattgcactacttcactccagcatgggtgacagagactccatctcaaaaaaata

SEQ ID NO: 303686 - DNA, 1764 bp, Homo sapiens
ggtatttcataccagggctagccttttgtatggttattagatgcgccggtgttcagctgtatgaactccgggacgtggatcggagccggcgcgatgggcggagagcaggaggaggagcggttcgacggcatgttgctggccatggctcagcagcacgagggcggcgtgcaggagcttgtgaacaccttcttcagcttccttcgacgcaaaacagactttttcattggaggagaagaagggatggcagagaagcttatcacacagactttcagccaccacaatcagctggcacagaagacccggcgggagaagagagcccggcaggaggccgagcggcgggagaaggcggagcgggcggccagactggccaaggaagccaagtcagagacctcagggccccagatcaaggagctaactgatgaagaggcagagaggctgcagctagagattgaccagaaaaaggatgcagagaatcatgaggcccagctcaagaacggcagccttgactccccagggaagcaggatactgaggaagatgaggaggaagatgagaaggacaaaggaaaactgaagcccaacctaggcaacggggcagacctgcccaattaccgctggacccagaccctgtcggagctggacctggcggtccctttctgtgtgaacttccggctgaaagggaaggacatggtggtggacatccagcggcggcacctccgggtggggctcaaggggcagccagcgatcattgatggggagctctacaatgaagtgaaggtggaggagagctcgtggctcattgaggacggcaaggtggtgactgtgcatctggagaagatcaataagatggagtggtggagccgcttggtgtccagtgaccctgagatcaacaccaagaagattaaccctgagaattccaagctgtcagacctggacagtgagactcgcagcatggtggaaaagatgatgtatgaccagcgacagaagtccatggggctgccaacttcagacgaacagaagaaacaggagattctgaagaagttcatggatcaacatccggagatggatttttccaaggctaaattcaactagcccctgttttttcctccctgaactcttggggctgagctgcaaccacccaactttctttcccactcttctctgggacttgtgggcctcagggcttggggcaggcatgggactggcccaggcacacaggtcccggggcatcaggagaaaggctgggtcttgggaccttgtcctccccagttggcctactgttacacattaaaacgatttgcccagctccttctgtgtcctctcttgcctctggcctttctctggggcacaggcctcttacggctgctgctgggaactgggagtttggcttctagcccagattctgccatgtgacctagggcacatccttgcccctctctgggcctcagtttctcattacttaaagattaaaacaaggcttggccgggtgtgatggttcatgtctgtaatcccagcactttgggaggctgaggggagcagatcacctgatgtcaggagtttgagaccagcttggccaacatggagaaacccagtctctactaaaaatacaaaaattagccgggtgtggtggtgcacacctgtaatcccagctactcgggaggctgaggcaggagaatcgcttgaacccgggtggcggaggttgcagtgagccgagattgcactacttcactccagcatgggtgacagagactccatctcaaaaaaata

SEQ ID NO: 303687 - DNA, 1946 bp, Homo sapiens
ggaaggcggacgactagagtcgttgggcccggcgcgacccgcaggagcgtagagagcgcgggactagagtgcagagctccgggacgtggatcggagccggcgcgatgggcggagagcaggaggaggagcggttcgacggcatgttgctggccatggctcagcagcacgagggcggcgtgcaggagcttgtgaacaccttcttcagcttccttcgacgcaaaacagactttttcattggaggagaagaagggatggcagagaagattggcaggagagagaatgagtgccagcagaagaaatgccagacgctaataaaaccatcagatcttgtgagaactcactcgtatcatgagaacagcatgggggaaaccatcctggtgattcagttacctccacctggtactgcctttgacatgtgggaattacaattcaagcttatcacacagactttcagccaccacaatcagctggcacagaagacccggcgggagaagagagcccggcaggaggccgagcggcgggagaaggcggagcgggcggccagactggccaaggaagccaagtcagagacctcagggccccagatcaaggagctaactgatgaagaggcagagaggctgcagctagagattgaccagaaaaaggatgcagagaatcatgaggcccagctcaagaacggcagccttgactccccagggaagcaggatactgaggaagatgaggaggaagatgagaaggacaaaggaaaactgaagcccaacctaggcaacggggcagacctgcccaattaccgctggacccagaccctgtcggagctggacctggcggtccctttctgtgtgaacttccggctgaaagggaaggacatggtggtggacatccagcggcggcacctccgggtggggctcaaggggcagccagcgatcattgatggggagctctacaatgaagtgaaggtggaggagagctcgtggctcattgaggacggcaaggtggtgactgtgcatctggagaagatcaataagatggagtggtggagccgcttggtgtccagtgaccctgagatcaacaccaagaagattaaccctgagaattccaagctgtcagacctggacagtgagactcgcagcatggtggaaaagatgatgtatgaccagcgacagaagtccatggggctgccaacttcagacgaacagaagaaacaggagattctgaagaagttcatggatcaacatccggagatggatttttccaaggctaaattcaactagcccctgttttttcctccctgaactcttggggctgagctgcaaccacccaactttctttcccactcttctctgggacttgtgggcctcagggcttggggcaggcatgggactggcccaggcacacaggtcccggggcatcaggagaaaggctgggtcttgggaccttgtcctccccagttggcctactgttacacattaaaacgatttgcccagctccttctgtgtcctctcttgcctctggcctttctctggggcacaggcctcttacggctgctgctgggaactgggagtttggcttctagcccagattctgccatgtgacctagggcacatccttgcccctctctgggcctcagtttctcattacttaaagattaaaacaaggcttggccgggtgtgatggttcatgtctgtaatcccagcactttgggaggctgaggggagcagatcacctgatgtcaggagtttgagaccagcttggccaacatggagaaacccagtctctactaaaaatacaaaaattagccgggtgtggtggtgcacacctgtaatcccagctactcgggaggctgaggcaggagaatcgcttgaacccgggtggcggaggttgcagtgagccgagattgcactacttcactccagcatgggtgacagagactccatctcaaaaaaata

SEQ ID NO: 303688 - DNA, 1869 bp, Homo sapiens
ggaaggcggacgactagagtcgttgggcccggcgcgacccgcaggagcgtagagagcgcgggactagagtgcagagctccgggacgtggatcggagccggcgcgatgggcggagagcaggaggaggagcggttcgacggcatgttgctggccatggctcagcagcacgagggcggcgtgcaggagcttgtgaacaccttcttcagcttccttcgacgcaaaacagactttttcattggaggagaagaagggatggcagagaagcttatcacacagactttcagccaccacaatcagctggcacagaagacccggcgggagaagagagcccggcaggaggccgagcggcgggagaaggcggagcgggcggccagactggccaaggaagccaagtcagagacctcagggccccagatcaaggagctaactgatgaagaggcagagaggctgcagctagagattgaccagaaaaaggatgcagagaatcatgaggcccagctcaagaacggcagccttgactccccagggaagcaggatactgaggaagatgaggaggaagatgagaaggacaaaggaaaactgaagcccaacctaggcaacggggcagacctgcccaattaccgctggacccagaccctgtcggagctggacgtgagtgtcagggaccagaggtaaagcttagggggccagcctggggtaccagcagcacttagtggcctcttctgactgcctctgccctatgcagctggcggtccctttctgtgtgaacttccggctgaaagggaaggacatggtggtggacatccagcggcggcacctccgggtggggctcaaggggcagccagcgatcattgatggggagctctacaatgaagtgaaggtggaggagagctcgtggctcattgaggacggcaaggtggtgactgtgcatctggagaagatcaataagatggagtggtggagccgcttggtgtccagtgaccctgagatcaacaccaagaagattaaccctgagaattccaagctgtcagacctggacagtgagactcgcagcatggtggaaaagatgatgtatgaccagcgacagaagtccatggggctgccaacttcagacgaacagaagaaacaggagattctgaagaagttcatggatcaacatccggagatggatttttccaaggctaaattcaactagcccctgttttttcctccctgaactcttggggctgagctgcaaccacccaactttctttcccactcttctctgggacttgtgggcctcagggcttggggcaggcatgggactggcccaggcacacaggtcccggggcatcaggagaaaggctgggtcttgggaccttgtcctccccagttggcctactgttacacattaaaacgatttgcccagctccttctgtgtcctctcttgcctctggcctttctctggggcacaggcctcttacggctgctgctgggaactgggagtttggcttctagcccagattctgccatgtgacctagggcacatccttgcccctctctgggcctcagtttctcattacttaaagattaaaacaaggcttggccgggtgtgatggttcatgtctgtaatcccagcactttgggaggctgaggggagcagatcacctgatgtcaggagtttgagaccagcttggccaacatggagaaacccagtctctactaaaaatacaaaaattagccgggtgtggtggtgcacacctgtaatcccagctactcgggaggctgaggcaggagaatcgcttgaacccgggtggcggaggttgcagtgagccgagattgcactacttcactccagcatgggtgacagagactccatctcaaaaaaata

SEQ ID NO: 303689 - DNA, 1709 bp, Homo sapiens
ggaaggcggacgactagagtcgttgggcccggcgcgacccgcaggagcgtagagagcgcgggactagagtgcagagctccgggacgtggatcggagccggcgcgatgggcggagagcaggaggaggagcggttcgacggcatgttgctggccatggctcagcagcacgagggcggcgtgcaggagcttgtgaacaccttcttcagcttccttcgacgcaaaacagactttttcattggaggagaagaagggatggcagagaagcttatcacacagactttcagccaccacaatcagctggcacagaagacccggcgggagaagagagcccggcaggaggccgagcggcgggagaaggcggagcgggcggccagactggccaaggaagccaagtcagagacctcagggccccagatcaaggagctaactgatgaagaggcagagaggctgcagctagagattgaccaggatactgaggaagatgaggaggaagatgagaaggacaaaggaaaactgaagcccaacctaggcaacggggcagacctgcccaattaccgctggacccagaccctgtcggagctggacctggcggtccctttctgtgtgaacttccggctgaaagggaaggacatggtggtggacatccagcggcggcacctccgggtggggctcaaggggcagccagcgatcattgatggggagctctacaatgaagtgaaggtggaggagagctcgtggctcattgaggacggcaaggtggtgactgtgcatctggagaagatcaataagatggagtggtggagccgcttggtgtccagtgaccctgagatcaacaccaagaagattaaccctgagaattccaagctgtcagacctggacagtgagactcgcagcatggtggaaaagatgatgtatgaccagcgacagaagtccatggggctgccaacttcagacgaacagaagaaacaggagattctgaagaagttcatggatcaacatccggagatggatttttccaaggctaaattcaactagcccctgttttttcctccctgaactcttggggctgagctgcaaccacccaactttctttcccactcttctctgggacttgtgggcctcagggcttggggcaggcatgggactggcccaggcacacaggtcccggggcatcaggagaaaggctgggtcttgggaccttgtcctccccagttggcctactgttacacattaaaacgatttgcccagctccttctgtgtcctctcttgcctctggcctttctctggggcacaggcctcttacggctgctgctgggaactgggagtttggcttctagcccagattctgccatgtgacctagggcacatccttgcccctctctgggcctcagtttctcattacttaaagattaaaacaaggcttggccgggtgtgatggttcatgtctgtaatcccagcactttgggaggctgaggggagcagatcacctgatgtcaggagtttgagaccagcttggccaacatggagaaacccagtctctactaaaaatacaaaaattagccgggtgtggtggtgcacacctgtaatcccagctactcgggaggctgaggcaggagaatcgcttgaacccgggtggcggaggttgcagtgagccgagattgcactacttcactccagcatgggtgacagagactccatctcaaaaaaata

SEQ ID NO: 303690 - DNA, 1225 bp, Homo sapiens
tgcaggtactctagacgatcccgtttggcgtgaggccaaccctagcaacggggcagacctgcccaattaccgctggacccagaccctgtcggagctggacctggcggtccctttctgtgtgaacttccggctgaaagggaaggacatggtggtggacatccagcggcggcacctccgggtggggctcaaggggcagccagcgatcattgatggggagctctacaatgaagtgaaggtggaggagagctcgtggctcattgaggacggcaaggtggtgactgtgcatctggagaagatcaataagatggagtggtggagccgcttggtgtccagtgaccctgagatcaacaccaagaagattaaccctgagaattccaagctgtcagacctggacagtgagactcgcagcatggtggaaaagatgatgtatgaccagcgacagaagtccatggggctgccaacttcagacgaacagaagaaacaggagattctgaagaagttcatggatcaacatccggagatggatttttccaaggctaaattcaactagcccctgttttttcctccctgaactcttggggctgagctgcaaccacccaactttctttcccactcttctctgggacttgtgggcctcagggcttggggcaggcatgggactggcccaggcacacaggtcccggggcatcaggagaaaggctgggtcttgggaccttgtcctccccagttggcctactgttacacattaaaacgatttgcccagctccttctgtgtcctctcttgcctctggcctttctctggggcacaggcctcttacggctgctgctgggaactgggagtttggcttctagcccagattctgccatgtgacctagggcacatccttgcccctctctgggcctcagtttctcattacttaaagattaaaacaaggcttggccgggtgtgatggttcatgtctgtaatcccagcactttgggaggctgaggggagcagatcacctgatgtcaggagtttgagaccagcttggccaacatggagaaacccagtctctactaaaaatacaaaaattagccgggtgtggtggtgcacacctgtaatcccagctactcgggaggctgaggcaggagaatcgcttgaacccgggtggcggaggttgcagtgagccgagattgcactacttcactccagcatgggtgacagagactccatctcaaaaaaata

SEQ ID NO: 303691 - DNA, 1087 bp, Homo sapiens
ggtggtgccggaatccgccgccgccgcctcccggaggtcctcctgatgccctaggaagacgcgactcagaattggggagctctacaatgaagtgaaggtggaggagagctcgtggctcattgaggacggcaaggtggtgactgtgcatctggagaagatcaataagatggagtggtggagccgcttggtgtccagtgaccctgagatcaacaccaagaagattaaccctgagaattccaagctgtcagacctggacagtgagactcgcagcatggtggaaaagatgatgtatgaccagcgacagaagtccatggggctgccaacttcagacgaacagaagaaacaggagattctgaagaagttcatggatcaacatccggagatggatttttccaaggctaaattcaactagcccctgttttttcctccctgaactcttggggctgagctgcaaccacccaactttctttcccactcttctctgggacttgtgggcctcagggcttggggcaggcatgggactggcccaggcacacaggtcccggggcatcaggagaaaggctgggtcttgggaccttgtcctccccagttggcctactgttacacattaaaacgatttgcccagctccttctgtgtcctctcttgcctctggcctttctctggggcacaggcctcttacggctgctgctgggaactgggagtttggcttctagcccagattctgccatgtgacctagggcacatccttgcccctctctgggcctcagtttctcattacttaaagattaaaacaaggcttggccgggtgtgatggttcatgtctgtaatcccagcactttgggaggctgaggggagcagatcacctgatgtcaggagtttgagaccagcttggccaacatggagaaacccagtctctactaaaaatacaaaaattagccgggtgtggtggtgcacacctgtaatcccagctactcgggaggctgaggcaggagaatcgcttgaacccgggtggcggaggttgcagtgagccgagattgcactacttcactccagcatgggtgacagagactccatctcaaaaaaata

SEQ ID NO: 303692 - DNA, 1039 bp, Homo sapiens
tcccctcaacctctgatggggtcgctctacaagtaacgcttgcggtcgtgcgaggacctcgtggtgtccctttcgtacggcacggtcgtgactgggcatccccctcgcgatcaataagatggagtggtggagccgcttggtgtccagtgaccctgagatcaacaccaagaagattaaccctgagaattccaagctgtcagacctggacagtgagactcgcagcatggtggaaaagatgatgtatgaccagcgacagaagtccatggggctgccaacttcagacgaacagaagaaacaggagattctgaagaagttcatggatcaacatccggagatggatttttccaaggctaaattcaactagcccctgttttttcctccctgaactcttggggctgagctgcaaccacccaactttctttcccactcttctctgggacttgtgggcctcagggcttggggcaggcatgggactggcccaggcacacaggtcccggggcatcaggagaaaggctgggtcttgggaccttgtcctccccagttggcctactgttacacattaaaacgatttgcccagctccttctgtgtcctctcttgcctctggcctttctctggggcacaggcctcttacggctgctgctgggaactgggagtttggcttctagcccagattctgccatgtgacctagggcacatccttgcccctctctgggcctcagtttctcattacttaaagattaaaacaaggcttggccgggtgtgatggttcatgtctgtaatcccagcactttgggaggctgaggggagcagatcacctgatgtcaggagtttgagaccagcttggccaacatggagaaacccagtctctactaaaaatacaaaaattagccgggtgtggtggtgcacacctgtaatcccagctactcgggaggctgaggcaggagaatcgcttgaacccgggtggcggaggttgcagtgagccgagattgcactacttcactccagcatgggtgacagagactccatctcaaaaaaata

SEQ ID NO: 303693 - DNA, 1513 bp, Homo sapiens
gtgtggtggtgcatgcctataatcccagttactcgggaggctgaggccggagaattgcttgaacccgggaggcagaggttgcagtgagccgagatggtgccacagcactccagcctggacaagaagaacaagactccatctcaaaaaatatatatatttattttcttcccattttaaatctggaatactgctttgtgtcttaagactcagcccgagtgtcactttcaaacttttctccctccaccctggatgaatatctccctttctgctttcttctttcccttatcacactgatttgtaactctttgcctctgtgtctcccctagctgcaggaagggcacagtcttgtacctctggatccagtgtaggcctgcaagggtctcaggtgcaggatgtggatgggagagagtttggttgtgaaagggttaaggggtgattcctggtgcacagagcaggccacctcccaccctctggttgttctcttcacagatcaataagatggagtggtggagccgcttggtgtccagtgaccctgagatcaacaccaagaagattaaccctgagaattccaaggtgagccctggctggttgggggagcttcagcaggaaggtgaggggcctcgttgtttccagagcttcaccgattcctgtcactgcctgccctcagctgtcagacctggacagtgagactcgcagcatggtggaaaagatgatgtatgaccagcgacagaagtccatggggctgccaacttcagacgaacagaagaaacaggagattctgaagaagttcatggatcaacatccggagatggatttttccaaggctaaattcaactagcccctgttttttcctccctgaactcttggggctgagctgcaaccacccaactttctttcccactcttctctgggacttgtgggcctcagggcttggggcaggcatgggactggcccaggcacacaggtcccggggcatcaggagaaaggctgggtcttgggaccttgtcctccccagttggcctactgttacacattaaaacgatttgcccagctccttctgtgtcctctcttgcctctggcctttctctggggcacaggcctcttacggctgctgctgggaactgggagtttggcttctagcccagattctgccatgtgacctagggcacatccttgcccctctctgggcctcagtttctcattacttaaagattaaaacaaggcttggccgggtgtgatggttcatgtctgtaatcccagcactttgggaggctgaggggagcagatcacctgatgtcaggagtttgagaccagcttggccaacatggagaaacccagtctctactaaaaatacaaaaattagccgggtgtggtggtgcacacctgtaatcccagctactcgggaggctgaggcaggagaatcgcttgaacccgggtggcggaggttgcagtgagccgagattgcactacttcactccagcatgggtgacagagactccatctcaaaaaaata

SEQ ID NO: 303694 - DNA, 777 bp, Homo sapiens
ctctatgtgcctgctctctatgaacagaagaaacaggagattctgaagaagttcatggatcaacatccggagatggatttttccaaggctaaattcaactagcccctgttttttcctccctgaactcttggggctgagctgcaaccacccaactttctttcccactcttctctgggacttgtgggcctcagggcttggggcaggcatgggactggcccaggcacacaggtcccggggcatcaggagaaaggctgggtcttgggaccttgtcctccccagttggcctactgttacacattaaaacgatttgcccagctccttctgtgtcctctcttgcctctggcctttctctggggcacaggcctcttacggctgctgctgggaactgggagtttggcttctagcccagattctgccatgtgacctagggcacatccttgcccctctctgggcctcagtttctcattacttaaagattaaaacaaggcttggccgggtgtgatggttcatgtctgtaatcccagcactttgggaggctgaggggagcagatcacctgatgtcaggagtttgagaccagcttggccaacatggagaaacccagtctctactaaaaatacaaaaattagccgggtgtggtggtgcacacctgtaatcccagctactcgggaggctgaggcaggagaatcgcttgaacccgggtggcggaggttgcagtgagccgagattgcactacttcactccagcatgggtgacagagactccatctcaaaaaaata

SEQ ID NO: 303695 - DNA, 206 bp, Homo sapiens
ccatttgcctgaactttagttcagaaagactctttcaaatatctaagcaaacataatctagatagccaagaaatctattcatagaatggatgccaagcaatgttagagccaggcacggtgcctcatgcctgtaatcccagtgctttgggaggccaaggcaggtagatcagttgagttaaggagctcaggaccaccctgggcaacac

SEQ ID NO: 303696 - DNA, 4650 bp, Homo sapiens
gggaggcggtggccgaggcccaggcggtggcggcggcggcccaggaggcggcggacggggagctgcgggagcaggcccgggcctggctctctagcggccgcctggctgcagcatgcgcgcccgccgggggctgctgcggctgccgcgccgctcgctgctcgccgcgctcttcttcttttctctctcgtcctcgctgctgtacttcgtctatgtggcgcccggcatagtgaacacctacctcttcatgatgcaagcccaaggcattctgatccgggacaacgtgagaacaatcggtgctcaggtttatgagcaggtgcttcggagtgcttatgccaagaggaacagcagtgtaaatgactcagattatcctcttgacttgaaccacagtgaaaccttcctgcaaactacaacatttcttcctgaagacttcacctactttgcaaaccatacctgccctgaaagactcccttccatgaagggcccaatagacataaacatgagtgaaattggaatggattacattcatgaactcttctccaaagacccaaccatcaagctcggaggtcactggaagccttctgattgcatgcctcggtggaaggtggcgatccttatccccttccggaaccgccacgagcacctcccagtcctgttcagacacctgcttcccatgctccagcgccagcgcctgcagtttgcattttatgtggttgaacaagttggtacccaaccctttaatcgagccatgcttttcaacgttggctttcaagaagcaatgaaagacttggattgggactgtttgatttttcatgatgtagatcacataccggaaagtgatcgcaactattatggatgtggacagatgccgaggcattttgcaaccaaattggataagtatatgtatctgcttccttataccgagttctttggcggagtgagtggcttaacagtggaacaatttcggaaaatcaatggctttcctaatgctttctggggttggggtggagaagatgacgacctctggaacagagtacagaatgcaggctattctgtgagccggccagagggtgacacaggaaagtacaagtccattcctcatcaccatcgaggagaagtccagtttcttggaaggtatgctctgctgaggaagtcaaaagaacggcaagggctggatggcctcaacaacctgaactactttgcaaacatcacatacgacgccttgtataaaaacataactgtcaacctgacacccgagctggctcaggtgaacgagtactgagaggagagaatgtacgtttgctttacccaccgccaccaagaaagcagtccgatgagatttttttttggaggggggagggtctacacagcaagagaacagaaatactgtgtctcatgaaggatcacagagttcagggggaaaatgtgacagcacacgcacaaacgccttcactggatcagccgctggaactgagggagtgagcttggggacttccttcgtcagcactggctttctgttttcacaagacagacgtctgtcccgctgctctctccccatctcctaccccacatcctgtcttagccgcagtctccagaacccatgatgaactgtgatctgccgtggtcctgccgtggtcctgccgtggagcctgtccctacacatgaccttggagcctcttggccttcagagcagaggcaaacccaccacagggcagctgcgttttaggaagagcaaatgaaactccacaccattcttctagatctctggtgttctctttggtttcatttttttaaaaaattaccttctttgggtggggattgagggtggaggggagggtgtttgggaaagataaatagacataaatatataacaatcacttcttgaagaagtataattgtaaataagccatgtaaaatgcctttttaaaatttaattttctagctggctccaattcaaattgaggatttatgtattaggccacttacttggttggcaagtgcaggaactcagttaaaatgcagttgaagaatgtcatctcccgaattgctgtcactttggcgagggagtggatatagggcatgtcacaaaagaacaaaataacccgacctttattgctgggagctggcttctgtccctttcttcccccccccacgagtcttgcccttgacttctgctctggattcactcttccctgtcggccgcgcatgtgctcatcccactctccgctaagcgggaggctgctgttagagcaggctgcttcctgcctaaagcaggcccttcggggctcgctgcacacacatctctggctctccaggcttcgtgttctgtcttttcatcagcatggcggggcggggggcggggggcgggggtgtgtatgggaatccctccccctcttactttttctcttgtggaacttggccacagtttctgaacaatgtgcctacattaccagctggcttcagtgattcctctgtgtcccttttggtttctggaaagattctttgtcaacattagtaactgatacatagaaccaaggagcactcaaatagggagccaggagccagggagctggtgacacttgtgtgctgtggggcagctgggatccaggtaagaccggattgaagctttgaaattagactaacaaagctccagacagcaagagcccaggtgcactgctcacacccccacctgcattttgaagtcatattattttttgttttgttttttaagacggtctggctctgtcgcctaagctggagtgtggtggcacgatcacagctcactgcagcctccatctcctaggctcaagccattttcccacctcagcctcccgagtagctgggactacaggtgcacaccaccacacctggctaattttttgtatttttagtagagacgggggtttcttccatgttgcccaggctggtctcgaactcctggactcaagcaatccgcccaccttgacttcccaaagtgctgggattatgggcgggtgtgagccattgcgcccagccttgaagtcatgttctaaattgtatttgaatttgtgcctctttgtttttccccaaaccaaagccctcaaattgtagtctctgtcggcttctgcagaattctggaaaatgccagttttcctcccccgcccttgttttccataaaacatatttatatattgtgatgaggagtactttctgaagagtacttcgtatttttttttaattgccttgtttgccttcaacttccttgattttcatagtttacatgggtgtgtgtaggggtgtgtgtgtgtatgtgtgtgggttagggcttttttcgttgcatgtgatggttctgtggacatatgatccccacaaactgtgggagtgattggccaggccttgttttgtttgtttgtttgtttgtgtttttgttcttttgaagaatagagtggtatttagaaaataaattgcattgcaaagctcttatcggctcatatgagagagcaggttcctgcccttgaaaatgccggtaagctatagcatatgttttttaagacttaagcatttcatgctttaaaataccttcacaagtgaacattacacacagaagttcatttggttttcctttgttttatggtgcatatagcaataaagacccccctccaccctgcaacccccatcccccaccgggcctttgtccctgccttggcttttctccccttctcattctcctctcccctttcctcactgaaggctgtgagttgctttcaatgtgacaacactatgatgtcatttggaaggatttgccaggacagactgattctgagtcctgggtgccgtatgtgtatgcggcagtgttgtcaggcgatcttgtttgaagctctatgttgccataattaccatcaagtacacactgttggcaaaaggctaacacctgactttagaaaatgctgatttgagaacaaaaggaaaggtcttttttcactgcttaaagtggggtcactttgatacctttgcggtcatgtctgtgtctgatgagtgtagaatctctggatgtgcactgtcagtcatgtgtccaccaggcctcgaatatcatatgggaaatgtcatagttaaaaacgtacagccaggcccgtgtgctgttaatagtgtgaaattgtcatgttaaaaaaaaaaacaaaacaggaaccaaatgtgaccttgtgcatatattggtagctgaaaatcttcaaggctactgatgggtggccccttaatcttgtctttgattgctgtgtgcagggaaaggtgtccccgtttgttcatgctgttttggggggtgggggggtatttgcaagaatactcattttgacataataggtcctcttgtcagagatcctctaccacagacattaatagctgagcaggagccacatggattgattgtatccactcaccattgacgatggcattgagcgtagctagcttatttccatcactacgtgtttttgagcttgctcttacgttttaagaggtgccaggggtacatttttgcactgaaatctaaagatgttttaaaaaacacttttcacaaaaatagtcctttgtcattacattatttactcatgtgtttgtacatttttgtatgttaatttatgaatgattttttcagtaaaaaatacatattcaagaaccaaa

SEQ ID NO: 303697 - DNA, 5061 bp, Homo sapiens
gggaggcggtggccgaggcccaggcggtggcggcggcggcccaggaggcggcggacggggagctgcgggagcaggcccgggcctggctctctagcggccgcctggctgcagcatgcgcgcccgccgggggctgctgcggctgccgcgccgctcgctgctcgccgcgctcttcttcttttctctctcgtcctcgctgctgtacttcgtctatgtggcgcccggcatagtgaacacctacctcttcatgatgcaagcccaaggcattctgatccgggacaacgtgagaacaatcggtgctcaggtttatgagcaggtgcttcggagtgcttatgccaagaggaacagcagtgtaaatgactcagattatcctcttgacttgaaccacagtgaaaccttcctgcaaactacaacatttcttcctgaagacttcacctactttgcaaaccatacctgccctgaaagactcccttccatgaagggcccaatagacataaacatgagtgaaattggaatggattacattcatgaactcttctccaaagacccaaccatcaagctcggaggtcactggaagccttctgattgcatgcctcggtggaaggtggcgatccttatccccttccggaaccgccacgagcacctcccagtcctgttcagacacctgcttcccatgctccagcgccagcgcctgcagtttgcattttatgtggttgaacaagttggtacccaaccctttaatcgagccatgcttttcaacgttggctttcaagaagcaatgaaagacttggattgggactgtttgatttttcatgatgtagatcacataccggaaagtgatcgcaactattatggatgtggacagatgccgaggcattttgcaaccaaattggataagtatatgtatctgcttccttataccgagttctttggcggagtgagtggcttaacagtggaacaatttcggaaaatcaatggctttcctaatgctttctggggttggggtggagaagatgacgacctctggaacagagtacagaatgcaggctattctgtgagccggccagagggtgacacaggaaagtacaagtccattcctcatcaccatcgaggagaagtccagtttcttggaaggtatgctctgctgaggaagtcaaaagaacggcaagggctggatggcctcaacaacctgaactactttgcaaacatcacatacgacgccttgtataaaaacataactgtcaacctgacacccgagctggctcaggtgaacgagtactgagaggagagaatgtacgtttgctttacccaccgccaccaagaaagcagtccgatgagatttttttttggaggggggagggtctacacagcaagagaacagaaatactgtgtctcatgaaggatcacagagttcagggggaaaatgtgacagcacacgcacaaacgccttcactggatcagccgctggaactgagggagtgagcttggggacttccttcgtcagcactggctttctgttttcacaagacagacgtctgtcccgctgctctctccccatctcctaccccacatcctgtcttagccgcagtctccagaacccatgatgaactgtgatctgccgtggtcctgccgtggtcctgccgtggagcctgtccctacacatgaccttggagcctcttggccttcagagcagaggcaaacccaccacagggcagctgcgttttaggaagagcaaatgaaactccacaccattcttctagatctctggtgttctctttggtttcatttttttaaaaaattaccttctttgggtggggattgagggtggaggggagggtgtttgggaaagataaatagacataaatatataacaatcacttcttgaagaagtataattgtaaataagccatgtaaaatgcctttttaaaatttaattttctagctggctccaattcaaattgaggatttatgtattaggccacttacttggttggcaagtgcaggaactcagttaaaatgcagttgaagaatgtcatctcccgaattgctgtcactttggcgagggagtggatatagggcatgtcacaaaagaacaaaataacccgacctttattgctgggagctggcttctgtccctttcttcccccccccacgagtcttgcccttgacttctgctctggattcactcttccctgtcggccgcgcatgtgctcatcccactctccgctaagcgggaggctgctgttagagcaggctgcttcctgcctaaagcaggcccttcggggctcgctgcacacacatctctggctctccaggcttcgtgttctgtcttttcatcagcatggcggggcggggggcggggggcgggggtgtgtatgggaatccctccccctcttactttttctcttgtggaacttggccacagtttctgaacaatgtgcctacattaccagctggcttcagtgattcctctgtgtcccttttggtttctggaaagattctttgtcaacattagtaactgatacatagaaccaaggagcactcaaatagggagccaggagccagggagctggtgacacttgtgtgctgtggggcagctgggatccaggtaagaccggattgaagctttgaaattagactaacaaagctccagacagcaagagcccaggtgcactgctcacacccccacctgcattttgaagtcatattattttttgttttgttttttaagacggtctggctctgtcgcctaagctggagtgtggtggcacgatcacagctcactgcagcctccatctcctaggctcaagccattttcccacctcagcctcccgagtagctgggactacaggtgcacaccaccacacctggctaattttttgtatttttagtagagacgggggtttcttccatgttgcccaggctggtctcgaactcctggactcaagcaatccgcccaccttgacttcccaaagtgctgggattatgggcgggtgtgagccattgcgcccagccttgaagtcatgttctaaattgtatttgaatttgtgcctctttgtttttccccaaaccaaagccctcaaattgtagtctctgtcggcttctgcagaattctggaaaatgccagttttcctcccccgcccttgttttccataaaacatatttatatattgtgatgaggagtactttctgaagagtacttcgtatttttttttaattgccttgtttgccttcaacttccttgattttcatagtttacatgggtgtgtgtaggggtgtgtgtgtgtatgtgtgtgggttagggcttttttcgttgcatgtgatggttctgtggacatatgatccccacaaactgtgggagtgattggccaggccttgttttgtttgtttgtttgtttgtgtttttgttcttttgaagaatagagtggtatttagaaaataaattgcattgcaaagctcttatcggctcatatgagagagcaggttcctgcccttgaaaatgccggtaagctatagcatatgttttttaagacttaagcatttcatgctttaaaataccttcacaagtgaacattacacacagaagttcatttggttttcctttgttttatggtgcatatagcaataaagacccccctccaccctgcaacccccatcccccaccgggcctttgtccctgccttggcttttctccccttctcattctcctctcccctttcctcactgaaggctgtgagttgctttcaatgtgacaacactatgatgtcatttggaaggatttgccaggacagactgattctgagtcctgggtgccgtatgtgtatgcggcagtgttgtcaggcgatcttgtttgaagctctatgttgccataattaccatcaagtacacactgttggcaaaaggctaacacctgactttagaaaatgctgatttgagaacaaaaggaaaggtcttttttcactgcttaaagtggggtcactttgatacctttgcggtcatgtctgtgtctgatgagtgtagaatctctggatgtgcactgtcagtcatgtgtccaccaggcctcgaatatcatatgggaaatgtcatagttaaaaacgtacagccaggcccgtgtgctgttaatagtgtgaaattgtcatgttaaaaaaaaaaacaaaacaggaaccaaatgtgaccttgtgcatatattggtagctgaaaatcttcaaggctactgatgggtggccccttaatcttgtctttgattgctgtgtgcagggaaaggtgtccccgtttgttcatgctgttttggggggtgggggggtatttgcaagaatactcattttgacataataggtcctcttgtcagagatcctctaccacagacattaatagctgagcaggagccacatggattgattgtatccactcaccattgacgatggcattgagcgtagctagcttatttccatcactacgtgtttttgagcttgctcttacgttttaagaggtgccaggggtacatttttgcactgaaatctaaagatgttttaaaaaacacttttcacaaaaatagtcctttgtcattacattatttactcatgtgtttgtacatttttgtatgttaatttatgaatgattttttcagtaaaaaatacatattcaagaaccaaaaaaaaaaaaaaaaaaaaaaaaaaaaaatttggggggggcatgggccccggaaaaagttttcaaaacaatcgggtgagggggacgggggccccaaagggaagagggaacagggggcaaaagggggtcccaagggaaaccggggacaaaaacaaagggcgggggaattccccccaattaaaaaagccacggggaaacacgaagcgtttctgacaaactccaaagggaaccagagaagcacaaaaggggactcaaaacacagcagggaattccaaagggagacggaaataacaaaaaaaaaccgcgagagcgggggggggtgtacagacagaggaagagacgaacccagcaacaaacagaacagaacgcagaccacacccaggacacaagaagcaggacacagacacacgaaat

SEQ ID NO: 303698 - DNA, 4548 bp, Homo sapiens
gggaggcggtggccgaggcccaggcggtggcggcggcggcccaggaggcggcggacggggagctgcgggagcaggcccgggcctggctctctagcggccgcctggctgcagcatgcgcgcccgccgggggctgctgcggctgccgcgccgctcgctgctcgccgcgctcttcttcttttctctctcgtcctcgctgctgtacttcgtctatgtggcgcccggcatagtgaacacctacctcttcatgatgcaagcccaaggcattctgatccgggacaacgtgagaacaatcggtgctcaggtttatgagcaggtgcttcggagtgcttatgccaagaggaacagcagtgtaaatgactcagattatcctcttgacttgaaccacagtgaaaccttcctgcaaactacaacatttcttcctgaagacttcacctactttgcaaaccatacctgccctgaaagactcccttccatgaagggcccaatagacataaacatgagtgaaattggaatggattacattcatgaactcttctccaaagacccaaccatcaagctcggaggtcactggaagccttctgattgcatgcctcggtggaaggtggcgatccttatccccttccggaaccgccacgagcacctcccagtcctgttcagacacctgcttcccatgctccagcgccagcgcctgcagtttgcattttatgtggttgaacaagttggtacccaaccctttaatcgagccatgcttttcaacgttggctttcaagaagcaatgaaagacttggattgggactgtttgatttttcatgatgtagatcacataccggaaagtgatcgcaactattatggatgtggacagatgccgaggcattttgcaaccaaattggataagtatatgtatctgcttccttataccgagttctttggcggagtgagtggcttaacagtggaacaatttcggaaaatcaatggctttcctaatgctttctggggttggggtggagaagatgacgacctctggaacagagtacagaatgcaggctattctgtgagccggccagagggtgacacaggaaagtacaagtccattcctcatcaccatcgaggagaagtccagtttcttggaaggtatgctctgctgaggaagtcaaaagaacggcaagggctggatggcctcaacaacctgaactactttgcaaacatcacatacgacgccttgtataaaaacataactgtcaacctgacacccgagctggctcaggtgaacgagtactgagaggagagaatgtacgtttgctttacccaccgccaccaagaaagcagtccgatgagatttttttttggaggggggagggtctacacagcaagagaacagaaatactgtgtctcatgaaggatcacagagttcagggggaaaatgtgacagcacacgcacaaacgccttcactggatcagccgctggaactgagggagtgagcttggggacttccttcgtcagcactggctttctgttttcacaagacagacgtctgtcccgctgctctctccccatctcctaccccacatcctgtcttagccgcagtctccagaacccatgatgaactgtgatctgccgtggtcctgccgtggtcctgccgtggagcctgtccctacacatgaccttggagcctcttggccttcagagcagaggcaaacccaccacagggcagctgcgttttaggaagagcaaatgaaactccacaccattcttctagatctctggtgttctctttggtttcatttttttaaaaaattaccttctttgggtggggattgagggtggaggggagggtgtttgggaaagataaatagacataaatatataacaatcacttcttgaagaagtataattgtaaataagccatgtaaaatgcctttttaaaatttaattttctagctggctccaattcaaattgaggatttatgtattaggccacttacttggttggcaagtgcaggaactcagttaaaatgcagttgaagaatgtcatctcccgaattgctgtcactttggcgagggagtggatatagggcatgtcacaaaagaacaaaataacccgacctttattgctgggagctggcttctgtccctttcttcccccccccacgagtcttgcccttgacttctgctctggattcactcttccctgtcggccgcgcatgtgctcatcccactctccgctaagcgggaggctgctgttagagcaggctgcttcctgcctaaagcaggcccttcggggctcgctgcacacacatctctggctctccaggcttcgtgttctgtcttttcatcagcatggcggggcggggggcggggggcgggggtgtgtatgggaatccctccccctcttactttttctcttgtggaacttggccacagtttctgaacaatgtgcctacattaccagctggcttcagtgattcctctgtgtcccttttggtttctggaaagattctttgtcaacattagtaactgatacatagaaccaaggagcactcaaatagggagccaggagccagggagctggtgacacttgtgtgctgtggggcagctgggatccaggtaagaccggattgaagctttgaaattagactaacaaagctccagacagcaagagcccaggtgcactgctcacacccccacctgcattttgaagtcatattattttttgttttgttttttaagacggtctggctctgtcgcctaagctggagtgtggtggcacgatcacagctcactgcagcctccatctcctaggctcaagccattttcccacctcagcctcccgagtagctgggactacaggtgcacaccaccacacctggctaattttttgtatttttagtagagacgggggtttcttccatgttgcccaggctggtctcgaactcctggactcaagcaatccgcccaccttgacttcccaaagtgctgggattatgggcgggtgtgagccattgcgcccagccttgaagtcatgttctaaattgtatttgaatttgtgcctctttgtttttccccaaaccaaagccctcaaattgtagtctctgtcggcttctgcagaattctggaaaatgccagttttcctcccccgcccttgttttccataaaacatatttatatattgtgatgaggagtactttctgaagagtacttcgtatttttttttaattgccttgtttgccttcaacttccttgattttcatagtttacatgggtgtgtgtaggggtgtgtgtgtgtatgtgtgtgggttagggcttttttcgttgcatgtgatggttctgtggacatatgatccccacaaactgtgggagtgattggccaggccttgttttgtttgtttgtttgtttgtgtttttgttcttttgaagaatagagtggtatttagaaaataaattgcattgcaaagctcttatcggctcatatgagagagcaggttcctgcccttgaaaatgccggtaagctatagcatatgttttttaagacttaagcatttcatgctttaaaataccttcacaagtgaacattacacacagaagttcatttggttttcctttgttttatggtgcatatagcaataaagacccccctccaccctgcaacccccatcccccaccgggcctttgtccctgccttggcttttctccccttctcattctcctctcccctttcctcactgaaggctgtgagttgctttcaatgtgacaacactatgatgtcatttggaaggatttgccaggacagactgattctgagtcctgggtgccgtatgtgtatgcggcagtgttgtcaggcgatcttgtttgaagctctatgttgccataattaccatcaagtacacactgttggcaaaaggctaacacctgactttagaaaatgctgatttgagaacaaaaggaaaggtcttttttcactgcttaaagtggggtcactttgatacctttgcggtcatgtctgtgtctgatgagtgtagaatctctggatgtgcactgtcagtcatgtgtccaccaggcctcgaatatcatatgggaaatgtcatagttaaaaacgtacagccaggcccgtgtgctgttaatagtgtgaaattgtcatgttaaaaaaaaaaacaaaacaggaaccaaatgtgaccttgtgcatatattggtagctgaaaatcttcaaggctactgatgggtggccccttaatcttgtctttgattgctgtgtgcagggaaaggtgtccccgtttgttcatgctgttttggggggtgggggggtatttgcaagaatactcattttgacataataggtcctcttgtcagagatcctctaccacagacattaatagctgagcaggagccacatggattgattgtatccactcaccattgacgatggcattgattgctgtgtgcagggaaaggtgtccccgtttgttcatgctgttttggggggtgggggggtatttgcaagaatactcattttgacataataggtcctcttgtcagagatcctctacccccca

SEQ ID NO: 303699 - DNA, 3423 bp, Homo sapiens
gcagctgtgggcgacagacacagggcctgcgagtccagacgggtagatccaggcaagttgcacgcggacgggtccggccccttcagtgtgcaaagtaaggaaatcaagcaggcggggagcaacacaagacggggtggcgcgccgtcattcaggaaggtttcccgacccgaccgaccgtcgagcgggagcctgaccggcaagccacacgcacaaacgccttcactggatcagccgctggaactgagggagtgagcttggggacttccttcgtcagcactggctttctgttttcacaagacagacgtctgtcccgctgctctctccccatctcctaccccacatcctgtcttagccgcagtctccagaacccatgatgaactgtgatctgccgtggtcctgccgtggtcctgccgtggagcctgtccctacacatgaccttggagcctcttggccttcagagcagaggcaaacccaccacagggcagctgcgttttaggaagagcaaatgaaactccacaccattcttctagatctctggtgttctctttggtttcatttttttaaaaaattaccttctttgggtggggattgagggtggaggggagggtgtttgggaaagataaatagacataaatatataacaatcacttcttgaagaagtataattgtaaataagccatgtaaaatgcctttttaaaatttaattttctagctggctccaattcaaattgaggatttatgtattaggccacttacttggttggcaagtgcaggaactcagttaaaatgcagttgaagaatgtcatctcccgaattgctgtcactttggcgagggagtggatatagggcatgtcacaaaagaacaaaataacccgacctttattgctgggagctggcttctgtccctttcttcccccccccacgagtcttgcccttgacttctgctctggattcactcttccctgtcggccgcgcatgtgctcatcccactctccgctaagcgggaggctgctgttagagcaggctgcttcctgcctaaagcaggcccttcggggctcgctgcacacacatctctggctctccaggcttcgtgttctgtcttttcatcagcatggcggggcggggggcggggggcgggggtgtgtatgggaatccctccccctcttactttttctcttgtggaacttggccacagtttctgaacaatgtgcctacattaccagctggcttcagtgattcctctgtgtcccttttggtttctggaaagattctttgtcaacattagtaactgatacatagaaccaaggagcactcaaatagggagccaggagccagggagctggtgacacttgtgtgctgtggggcagctgggatccaggtaagaccggattgaagctttgaaattagactaacaaagctccagacagcaagagcccaggtgcactgctcacacccccacctgcattttgaagtcatattattttttgttttgttttttaagacggtctggctctgtcgcctaagctggagtgtggtggcacgatcacagctcactgcagcctccatctcctaggctcaagccattttcccacctcagcctcccgagtagctgggactacaggtgcacaccaccacacctggctaattttttgtatttttagtagagacgggggtttcttccatgttgcccaggctggtctcgaactcctggactcaagcaatccgcccaccttgacttcccaaagtgctgggattatgggcgggtgtgagccattgcgcccagccttgaagtcatgttctaaattgtatttgaatttgtgcctctttgtttttccccaaaccaaagccctcaaattgtagtctctgtcggcttctgcagaattctggaaaatgccagttttcctcccccgcccttgttttccataaaacatatttatatattgtgatgaggagtactttctgaagagtacttcgtatttttttttaattgccttgtttgccttcaacttccttgattttcatagtttacatgggtgtgtgtaggggtgtgtgtgtgtatgtgtgtgggttagggcttttttcgttgcatgtgatggttctgtggacatatgatccccacaaactgtgggagtgattggccaggccttgttttgtttgtttgtttgtttgtgtttttgttcttttgaagaatagagtggtatttagaaaataaattgcattgcaaagctcttatcggctcatatgagagagcaggttcctgcccttgaaaatgccggtaagctatagcatatgttttttaagacttaagcatttcatgctttaaaataccttcacaagtgaacattacacacagaagttcatttggttttcctttgttttatggtgcatatagcaataaagacccccctccaccctgcaacccccatcccccaccgggcctttgtccctgccttggcttttctccccttctcattctcctctcccctttcctcactgaaggctgtgagttgctttcaatgtgacaacactatgatgtcatttggaaggatttgccaggacagactgattctgagtcctgggtgccgtatgtgtatgcggcagtgttgtcaggcgatcttgtttgaagctctatgttgccataattaccatcaagtacacactgttggcaaaaggctaacacctgactttagaaaatgctgatttgagaacaaaaggaaaggtcttttttcactgcttaaagtggggtcactttgatacctttgcggtcatgtctgtgtctgatgagtgtagaatctctggatgtgcactgtcagtcatgtgtccaccaggcctcgaatatcatatgggaaatgtcatagttaaaaacgtacagccaggcccgtgtgctgttaatagtgtgaaattgtcatgttaaaaaaaaaaacaaaacaggaaccaaatgtgaccttgtgcatatattggtagctgaaaatcttcaaggctactgatgggtggccccttaatcttgtctttgattgctgtgtgcagggaaaggtgtccccgtttgttcatgctgttttggggggtgggggggtatttgcaagaatactcattttgacataataggtcctcttgtcagagatcctctaccacagacattaatagctgagcaggagccacatggattgattgtatccactcaccattgacgatggcattgagcgtagctagcttatttccatcactacgtgtttttgagcttgctcttacgttttaagaggtgccaggggtacatttttgcactgaaatctaaagatgttttaaaaaacacttttcacaaaaatagtcctttgtcattacattatttactcatgtgtttgtacatttttgtatgttaatttatgaatgattttttcagtaaaaaatacatattcaagaaccaaa

SEQ ID NO: 303700 - DNA, 1987 bp, Homo sapiens
aaaaaagcagaacatgataatagatattagttagtaagtaagcatatagtatgttattaaatagagacagagtctcgatcagattaccaggctggagtgcagtggtgccgtctccgctcactgcaacctctgcctcccaggttcaagtgattctcctgcctcagcctcccgagtagctgggattataggcatctgccaccacgcctggctaatttttgtatttttagtagagatgggaattcaccatgttggccaggctggtctcgaactcctggactcaagcaatccgcccaccttgacttcccaaagtgctgggattatgggcgggtgtgagccattgcgcccagccttgaagtcatgttctaaattgtatttgaatttgtgcctctttgtttttccccaaaccaaagccctcaaattgtagtctctgtcggcttctgcagaattctggaaaatgccagttttcctcccccgcccttgttttccataaaacatatttatatattgtgatgaggagtactttctgaagagtacttcgtatttttttttaattgccttgtttgccttcaacttccttgattttcatagtttacatgggtgtgtgtaggggtgtgtgtgtgtatgtgtgtgggttagggcttttttcgttgcatgtgatggttctgtggacatatgatccccacaaactgtgggagtgattggccaggccttgttttgtttgtttgtttgtttgtgtttttgttcttttgaagaatagagtggtatttagaaaataaattgcattgcaaagctcttatcggctcatatgagagagcaggttcctgcccttgaaaatgccggtaagctatagcatatgttttttaagacttaagcatttcatgctttaaaataccttcacaagtgaacattacacacagaagttcatttggttttcctttgttttatggtgcatatagcaataaagacccccctccaccctgcaacccccatcccccaccgggcctttgtccctgccttggcttttctccccttctcattctcctctcccctttcctcactgaaggctgtgagttgctttcaatgtgacaacactatgatgtcatttggaaggatttgccaggacagactgattctgagtcctgggtgccgtatgtgtatgcggcagtgttgtcaggcgatcttgtttgaagctctatgttgccataattaccatcaagtacacactgttggcaaaaggctaacacctgactttagaaaatgctgatttgagaacaaaaggaaaggtcttttttcactgcttaaagtggggtcactttgatacctttgcggtcatgtctgtgtctgatgagtgtagaatctctggatgtgcactgtcagtcatgtgtccaccaggcctcgaatatcatatgggaaatgtcatagttaaaaacgtacagccaggcccgtgtgctgttaatagtgtgaaattgtcatgttaaaaaaaaaaacaaaacaggaaccaaatgtgaccttgtgcatatattggtagctgaaaatcttcaaggctactgatgggtggccccttaatcttgtctttgattgctgtgtgcagggaaaggtgtccccgtttgttcatgctgttttggggggtgggggggtatttgcaagaatactcattttgacataataggtcctcttgtcagagatcctctaccacagacattaatagctgagcaggagccacatggattgattgtatccactcaccattgacgatggcattgagcgtagctagcttatttccatcactacgtgtttttgagcttgctcttacgttttaagaggtgccaggggtacatttttgcactgaaatctaaagatgttttaaaaaacacttttcacaaaaatagtcctttgtcattacattatttactcatgtgtttgtacatttttgtatgttaatttatgaatgattttttcagtaaaaaatacatattcaagaaccaaa

SEQ ID NO: 303701 - DNA, 4056 bp, Homo sapiens
gggaggcggtggccgaggcccaggcggtggcggcggcggcccaggaggcggcggacggggagctgcgggagcaggcccgggcctggctctctagcggccgcctggctgcagcatgcgcgcccgccgggggctgctgcggctgccgcgccgctcgctgctcgccgcgctcttcttcttttctctctcgtcctcgctgctgtacttcgtctatgtggcgcccggcatagtgaacacctacctcttcatgatgcaagcccaaggcattctgatccgggacaacgtgagaacaatcggtgctcaggtttatgagcaggtgcttcggagtgcttatgccaagaggaacagcagtgtaaatgactcagattatcctcttgacttgaaccacagtgaaaccttcctgcaaactacaacatttcttcctgaagacttcacctactttgcaaaccatacctgccctgaaagactcccttccatgaagggcccaatagacataaacatgagtgaaattggaatggattacattcatgaactcttctccaaagacccaaccatcaagctcggaggtcactggaagccttctgattgcatgcctcggtggaaggtggcgatccttatccccttccggaaccgccacgagcacctcccagtcctgttcagacacctgcttcccatgctccagcgccagcgcctgcagtttgcattttatgtggttgaacaagttggtacccaaccctttaatcgagccatgcttttcaacgttggctttcaagaagcaatgaaagacttggattgggactgtttgatttttcatgatgtagatcacataccggaaagtgatcgcaactattatggatgtggacagatgccgaggcattttgcaaccaaattggataagtatatgtatctgcttccttataccgagttctttggcggagtgagtggcttaacagtggaacaatttcggaaaatcaatggctttcctaatgctttctggggttggggtggagaagatgacgacctctggaacagagtacagaatgcaggctattctgtgagccggccagagggtgacacaggaaagtacaagtccattcctcatcaccatcgaggagaagtccagtttcttggaaggtatgctctgctgaggaagtcaaaagaacggcaagggctggatggcctcaacaacctgaactactttgcaaacatcacatacgacgccttgtataaaaacataactgtcaacctgacacccgagctggctcaggtgaacgagtactgagaggagagaatgtacgtttgctttacccaccgccaccaagaaagcagtccgatgagatttttttttggaggggggagggtctacacagcaagagaacagaaatactgtgtctcatgaaggatcacagagttcagggggaaaatgtgacagcacacgcacaaacgccttcactggatcagccgctggaactgagggagtgagcttggggacttccttcgtcagcactggctttctgttttcacaagacagacgtctgtcccgctgctctctccccatctcctaccccacatcctgtcttagccgcagtctccagaacccatgatgaactgtgatctgccgtggtcctgccgtggtcctgccgtggagcctgtccctacacatgaccttggagcctcttggccttcagagcagaggcaaacccaccacagggcagctgcgttttaggaagagcaaatgaaactccacaccattcttctagatctctggtgttctctttggtttcatttttttaaaaaattaccttctttgggtggggattgagggtggaggggagggtgtttgggaaagataaatagacataaatatataacaatcacttcttgaagaagtataattgtaaataagccatgtaaaatgcctttttaaaatttaattttctagctggctccaattcaaattgaggatttatgtattaggccacttacttggttggcaagtgcaggaactcagttaaaatgcagttgaagaatgtcatctcccgaattgctgtcactttggcgagggagtggatatagggcatgtcacaaaagaacaaaataacccgacctttattgctgggagctggcttctgtccctttcttcccccccccacgagtcttgcccttgacttctgctctggattcactcttccctgtcggccgcgcatgtgctcatcccactctccgctaagcgggaggctgctgttagagcaggctgcttcctgcctaaagcaggcccttcggggctcgctgcacacacatctctggctctccaggcttcgtgttctgtcttttcatcagcatggcggggcggggggcggggggcgggggtgtgtatgggaatccctccccctcttactttttctcttgtggaacttggccacagtttctgaacaatgtgcctacattaccagctggcttcagtgattcctctgtgtcccttttggtttctggaaagattctttgtcaacattagtaactgatacatagaaccaaggagcactcaaatagggagccaggagccagggagctggtgacacttgtgtgctgtggggcagctgggatccaggtaagaccggattgaagctttgaaattagactaacaaagctccagacagcaagagcccaggtgcactgctcacacccccacctgcattttgaagtcatattattttttgttttgttttttaagacggtctggctctgtcgcctaagctggagtgtggtggcacgatcacagctcactgcagcctccatctcctaggctcaagccattttcccacctcagcctcccgagtagctgggactacaggtgcacaccaccacacctggctaattttttgtatttttagtagagacgggggtttcttccatgttgcccaggctggtctcgaactcctggactcaagcaatccgcccaccttgacttcccaaagtgctgggattatgggcgggtgtgagccattgcgcccagccttgaagtcatgttctaaattgtatttgaatttgtgcctctttgtttttccccaaaccaaagccctcaaattgtagtctctgtcggcttctgcagaattctggaaaatgccagttttcctcccccgcccttgttttccataaaacatatttatatattgtgatgaggagtactttctgaagagtacttcgtatttttttttaattgccttgtttgccttcaacttccttgattttcatagtttacatgggtgtgtgtaggggtgtgtgtgtgtatgtgtgtgggttagggcttttttcgttgcatgtgatggttctgtggacatatgatccccacaaactgtgggagtgattggccaggccttgttttgtttgtttgtttgtttgtgtttttgttcttttgaagaatagagtggtatttagaaaataaattgcattgcaaagctcttatcggctcatatgagagagcaggttcctgcccttgaaaatgccggtaagctatagcatatgttttttaagacttaagcatttcatgctttaaaataccttcacaagtgaacattacacacagaagttcatttggttttcctttgttttatggtgcatatagcaataaagacccccctccaccctgcaacccccatcccccaccgggcctttgtccctgccttggcttttctccccttctcattctcctctcccctttcctcactgaaggctgtgagttgctttcaatgtgacaacactatgatgtcatttggaaggatttgccaggacagactgattctgagtcctgggtgccgtatgtgtatgcggcagtgttgtcaggcgatcttgtttgaagctctatgttgccataattaccatcaagtacacactgttggcaaaaggctaacacctgactttagaaaatgctgatttgagaacaaaaggaaaggtcttttttcactgcttaaagtggggtcactttgagcagcgaaaaaatcccttttactgtacactctcaaagcaagaaagagaaacaacagttttgttttgtttttttct

SEQ ID NO: 303702 - DNA, 3764 bp, Homo sapiens
gggaggcggtggccgaggcccaggcggtggcggcggcggcccaggaggcggcggacggggagctgcgggagcaggcccgggcctggctctctagcggccgcctggctgcagcatgcgcgcccgccgggggctgctgcggctgccgcgccgctcgctgctcgccgcgctcttcttcttttctctctcgtcctcgctgctgtacttcgtctatgtggcgcccggcatagtgaacacctacctcttcatgatgcaagcccaaggcattctgatccgggacaacgtgagaacaatcggtgctcaggtttatgagcaggtgcttcggagtgcttatgccaagaggaacagcagtgtaaatgactcagattatcctcttgacttgaaccacagtgaaaccttcctgcaaactacaacatttcttcctgaagacttcacctactttgcaaaccatacctgccctgaaagactcccttccatgaagggcccaatagacataaacatgagtgaaattggaatggattacattcatgaactcttctccaaagacccaaccatcaagctcggaggtcactggaagccttctgattgcatgcctcggtggaaggtggcgatccttatccccttccggaaccgccacgagcacctcccagtcctgttcagacacctgcttcccatgctccagcgccagcgcctgcagtttgcattttatgtggttgaacaagttggtacccaaccctttaatcgagccatgcttttcaacgttggctttcaagaagcaatgaaagacttggattgggactgtttgatttttcatgatgtagatcacataccggaaagtgatcgcaactattatggatgtggacagatgccgaggcattttgcaaccaaattggataagtatatgtatctgcttccttataccgagttctttggcggagtgagtggcttaacagtggaacaatttcggaaaatcaatggctttcctaatgctttctggggttggggtggagaagatgacgacctctggaacagagtacagaatgcaggctattctgtgagccggccagagggtgacacaggaaagtacaagtccattcctcatcaccatcgaggagaagtccagtttcttggaaggtatgctctgctgaggaagtcaaaagaacggcaagggctggatggcctcaacaacctgaactactttgcaaacatcacatacgacgccttgtataaaaacataactgtcaacctgacacccgagctggctcaggtgaacgagtactgagaggagagaatgtacgtttgctttacccaccgccaccaagaaagcagtccgatgagatttttttttggaggggggagggtctacacagcaagagaacagaaatactgtgtctcatgaaggatcacagagttcagggggaaaatgtgacagcacacgcacaaacgccttcactggatcagccgctggaactgagggagtgagcttggggacttccttcgtcagcactggctttctgttttcacaagacagacgtctgtcccgctgctctctccccatctcctaccccacatcctgtcttagccgcagtctccagaacccatgatgaactgtgatctgccgtggtcctgccgtggtcctgccgtggagcctgtccctacacatgaccttggagcctcttggccttcagagcagaggcaaacccaccacagggcagctgcgttttaggaagagcaaatgaaactccacaccattcttctagatctctggtgttctctttggtttcatttttttaaaaaattaccttctttgggtggggattgagggtggaggggagggtgtttgggaaagataaatagacataaatatataacaatcacttcttgaagaagtataattgtaaataagccatgtaaaatgcctttttaaaatttaattttctagctggctccaattcaaattgaggatttatgtattaggccacttacttggttggcaagtgcaggaactcagttaaaatgcagttgaagaatgtcatctcccgaattgctgtcactttggcgagggagtggatatagggcatgtcacaaaagaacaaaataacccgacctttattgctgggagctggcttctgtccctttcttcccccccccacgagtcttgcccttgacttctgctctggattcactcttccctgtcggccgcgcatgtgctcatcccactctccgctaagcgggaggctgctgttagagcaggctgcttcctgcctaaagcaggcccttcggggctcgctgcacacacatctctggctctccaggcttcgtgttctgtcttttcatcagcatggcggggcggggggcggggggcgggggtgtgtatgggaatccctccccctcttactttttctcttgtggaacttggccacagtttctgaacaatgtgcctacattaccagctggcttcagtgattcctctgtgtcccttttggtttctggaaagattctttgtcaacattagtaactgatacatagaaccaaggagcactcaaatagggagccaggagccagggagctggtgacacttgtgtgctgtggggcagctgggatccaggtaagaccggattgaagctttgaaattagactaacaaagctccagacagcaagagcccaggtgcactgctcacacccccacctgcattttgaagtcatattattttttgttttgttttttaagacggtctggctctgtcgcctaagctggagtgtggtggcacgatcacagctcactgcagcctccatctcctaggctcaagccattttcccacctcagcctcccgagtagctgggactacaggtgcacaccaccacacctggctaattttttgtatttttagtagagacgggggtttcttccatgttgcccaggctggtctcgaactcctggactcaagcaatccgcccaccttgacttcccaaagtgctgggattatgggcgggtgtgagccattgcgcccagccttgaagtcatgttctaaattgtatttgaatttgtgcctctttgtttttccccaaaccaaagccctcaaattgtagtctctgtcggcttctgcagaattctggaaaatgccagttttcctcccccgcccttgttttccataaaacatatttatatattgtgatgaggagtactttctgaagagtacttcgtatttttttttaattgccttgtttgccttcaacttccttgattttcatagtttacatgggtgtgtgtaggggtgtgtgtgtgtatgtgtgtgggttagggcttttttcgttgcatgtgatggttctgtggacatatgatccccacaaactgtgggagtgattggccaggccttgttttgtttgtttgtttgtttgtgtttttgttcttttgaagaatagagtggtatttagaaaataaattgcattgcaaagctcttatcggctcatatgagagagcaggttcctgcccttgaaaatgccggtaagctatagcatatgttttttaagacttaagcatttcatgctttaaaataccttcacaagtgaacattacacacagaagttcatttggttttcctttgttttatggtacatttttgcactgaaatctaaagatgttttaaaaaacacttttcacaaaaatagtcctttgtcattacattatttactcatgtgtttgtacatttttgtatgttaatttatgaatgattttttcagtaaaaaatacatattcaagaaccaaa

SEQ ID NO: 303703 - DNA, 3455 bp, Homo sapiens
gggaggcggtggccgaggcccaggcggtggcggcggcggcccaggaggcggcggacggggagctgcgggagcaggcccgggcctggctctctagcggccgcctggctgcagcatgcgcgcccgccgggggctgctgcggctgccgcgccgctcgctgctcgccgcgctcttcttcttttctctctcgtcctcgctgctgtacttcgtctatgtggcgcccggcatagtgaacacctacctcttcatgatgcaagcccaaggcattctgatccgggacaacgtgagaacaatcggtgctcaggtttatgagcaggtgcttcggagtgcttatgccaagaggaacagcagtgtaaatgactcagattatcctcttgacttgaaccacagtgaaaccttcctgcaaactacaacatttcttcctgaagacttcacctactttgcaaaccatacctgccctgaaagactcccttccatgaagggcccaatagacataaacatgagtgaaattggaatggattacattcatgaactcttctccaaagacccaaccatcaagctcggaggtcactggaagccttctgattgcatgcctcggtggaaggtggcgatccttatccccttccggaaccgccacgagcacctcccagtcctgttcagacacctgcttcccatgctccagcgccagcgcctgcagtttgcattttatgtggttgaacaagttggtacccaaccctttaatcgagccatgcttttcaacgttggctttcaagaagcaatgaaagacttggattgggactgtttgatttttcatgatgtagatcacataccggaaagtgatcgcaactattatggatgtggacagatgccgaggcattttgcaaccaaattggataagtatatgtatctgcttccttataccgagttctttggcggagtgagtggcttaacagtggaacaatttcggaaaatcaatggctttcctaatgctttctggggttggggtggagaagatgacgacctctggaacagagtacagaatgcaggctattctgtgagccggccagagggtgacacaggaaagtacaagtccattcctcatcaccatcgaggagaagtccagtttcttggaaggtatgctctgctgaggaagtcaaaagaacggcaagggctggatggcctcaacaacctgaactactttgcaaacatcacatacgacgccttgtataaaaacataactgtcaacctgacacccgagctggctcaggtgaacgagtactgagaggagagaatgtacgtttgctttacccaccgccaccaagaaagcagtccgatgagatttttttttggaggggggagggtctacacagcaagagaacagaaatactgtgtctcatgaaggatcacagagttcagggggaaaatgtgacagcacacgcacaaacgccttcactggatcagccgctggaactgagggagtgagcttggggacttccttcgtcagcactggctttctgttttcacaagacagacgtctgtcccgctgctctctccccatctcctaccccacatcctgtcttagccgcagtctccagaacccatgatgaactgtgatctgccgtggtcctgccgtggtcctgccgtggagcctgtccctacacatgaccttggagcctcttggccttcagagcagaggcaaacccaccacagggcagctgcgttttaggaagagcaaatgaaactccacaccattcttctagatctctggtgttctctttggtttcatttttttaaaaaattaccttctttgggtggggattgagggtggaggggagggtgtttgggaaagataaatagacataaatatataacaatcacttcttgaagaagtataattgtaaataagccatgtaaaatgcctttttaaaatttaattttctagctggctccaattcaaattgaggatttatgtattaggccacttacttggttggcaagtgcaggaactcagttaaaatgcagttgaagaatgtcatctcccgaattgctgtcactttggcgagggagtggatatagggcatgtcacaaaagaacaaaataacccgacctttattgctgggagctggcttctgtccctttcttcccccccccacgagtcttgcccttgacttctgctctggattcactcttccctgtcggccgcgcatgtgctcatcccactctccgctaagcgggaggctgctgttagagcaggctgcttcctgcctaaagcaggcccttcggggctcgctgcacacacatctctggctctccaggcttcgtgttctgtcttttcatcagcatggcggggcggggggcggggggcgggggtgtgtatgggaatccctccccctcttactttttctcttgtggaacttggccacagtttctgaacaatgtgcctacattaccagctggcttcagtgattcctctgtgtcccttttggtttctggaaagattctttgtcaacattagtaactgatacatagaaccaaggagcactcaaatagggagccaggagccagggagctggtgacacttgtgtgctgtggggcagctgggatccaggtaagaccggattgaagctttgaaattagactaacaaagctccagacagcaagagcccaggtgcactgctcacacccccacctgcattttgaagtcatattattttttgttttgttttttaagacggtctggctctgtcgcctaagctggagtgtggtggcacgatcacagctcactgcagcctccatctcctaggctcaagccattttcccacctcagcctcccgagtagctgggactacaggtgcacaccaccacacctggctaattttttgtatttttagtagagacgggggtttcttccatgttgcccaggctggtctcgaactcctggactcaagcaatccgcccaccttgacttcccaaagtgctgggattatgggcgggtgtgagccattgcgcccagccttgaagtcatgttctaaattgtatttgaatttgtgcctctttgtttttccccaaaccaaagccctcaaattgtagtctctgtcggcttctgcagaattctggaaaatgccagttttcctcccccgcccttgttttccataaaacatatttatatattgtgatgaggagtactttctgaagagtacttcgtatttttttttaattgccttgtttgccttcaacttccttgattttcatagtttacatgggtgtgtgtaggggtgtgtgtgtgtatgtgtgtgggttagggcttttttcgttgcatgtgatggttctgtggacatatgatccccacaaactgtgggagtgattggagcggcccttgctgcgcatcgtgcgcgagcattgaaataatgtcctgtgtgaaaaatttgaacgcgccgcgtgaaaaatcaatctggact

SEQ ID NO: 303704 - DNA, 829 bp, Homo sapiens
cttgatggtaattaccatcaagtacacactgttagccttttgccaacagtgtgtacttgatggtaatgttggcaaaaggctaacacctgactttagaaaatgctgatttgagaacaaaaggaaaggtcttttttcactgcttaaagtggggtcactttgatacctttgcggtcatgtctgtgtctgatgagtgtagaatctctggatgtgcactgtcagtcatgtgtccaccaggcctcgaatatcatatgggaaatgtcatagttaaaaacgtacagccaggcccgtgtgctgttaatagtgtgaaattgtcatgttaaaaaaaaaaacaaaacaggaaccaaatgtgaccttgtgcatatattggtagctgaaaatcttcaaggctactgatgggtggccccttaatcttgtctttgattgctgtgtgcagggaaaggtgtccccgtttgttcatgctgttttggggggtgggggggtatttgcaagaatactcattttgacataataggtcctcttgtcagagatcctctaccacagacattaatagctgagcaggagccacatggattgattgtatccactcaccattgacgatggcattgagcgtagctagcttatttccatcactacgtgtttttgagcttgctcttacgttttaagaggtgccaggggtacatttttgcactgaaatctaaagatgttttaaaaaacacttttcacaaaaatagtcctttgtcattacattatttactcatgtgtttgtacatttttgtatgttaatttatgaatgattttttcagtaaaaaatacatattcaagaaccaaa

SEQ ID NO: 303705 - DNA, 114 bp, Homo sapiens
gtatatttttagtaaagaggtggtctgattagaatgtctcctcccaagagaggtaaattcggttgcaataattattttcaatgggaaaagcgcattgtaaaagagggatttggc

SEQ ID NO: 303706 - DNA, 419 bp, Homo sapiens
acctcagcctcccaagtagctgggattacaggcatgcgccactacgcctagctaatgtttttgtattttcagtagggatggggtttcaccatgttggccaggctggtctcgaactcctgatccgcccaccttggttttccaaagtgctgggattacaggcgtgagccactgtgcccatgccagaggtccagtgacttctgagccacactgtgagttgatttgtggtgttggacctggttacactagcccagtgatcttttccagttggttctaataaactcgtctttaggcacaggaaagacagcaaagattttccttcaagattcttttaaagataaagttctgtttcttttaggttggtacccaaccctttaatcgagccatgcttttcaacgttggctttcaagaagcaatgaaag

SEQ ID NO: 303707 - DNA, 4301 bp, Homo sapiens
cgacgtcggcggtgacaggccctgggactctgggaatacccagcttcctccccgcaacccggtgaaagccaacgcaatgttcggtgcgggggacgaggacgacaccgatttcctctcgccgagcggcggtgccagattggcctcactttttggactggatcaggcagctgctggccatggaaatgaatttttccagtacacagccccaaaacagcctaagaaaggccagggaacggcagcaacaggaaatcaggcaacaccaaaaacagcaccagccaccatgagcactcccacaatactggtcgcaacagcagtccatgcatatcgatacacaaatggtcaatatgtaaagcagggcaaatttggtgctgcagttctggggaaccacacagccagagagtataggattcttctttatatcagtcaacaacagccagttacggttgctaggattcatgtgaactttgagctaatggttcggcccaataactatagcaccttttatgatgaccagagacagaactggtccatcatgtttgagtcggaaaaggctgctgtggagttcaataagcaggtgtgcattgctaagtgcaacagtacctcttccctggatgcagtgctctcccaggacctcattgtggcagacggccctgctgtagaagttggagattctttggaagtggcctataccggctggctctttcagaatcatgtgctgggccaggttttcgactccactgctaacaaagataagttgcttcgcttgaagttaggatcaggaaaagtcatcaagggctgggaggatggaatgctgggcatgaaaaaaggaggaaagcgattgcttattgtccctccagcctgtgctgttggctcagaaggggtaataggctggactcaagcaacggactcgatcctggtgttcgaggtggaggttaggcgggtgaagtttgccagagattctggctctgatggtcacagtgttagttcccgcgattctgcagctccgtctcccatccctggtgctgacaacctctctgctgatcctgttgtgtcaccacccacatcaatacctttcaaatcaggggagccagctcttcgtaccaaatctaactccctcagtgaacaacttgcaataaatacaagtcccgatgcagtcaaagccaagttgatctctcggatggctaaaatgggccagcccatgctgcccatccttccaccacagctggattccaatgattcagaaatcgaagatgtgaacactctgcaaggaggtgggcagcctgtggtgactccgtccgtccagccctctcttcatccggcccatccagcgttaccacagatgacctcacaggcacctcagccatctgttactgggctccaggcaccttctgctgccttaatgcaagtgtcatctctcgattcccactcagctgtatctggaaatgcccaatcctttcagccctatgcaggtatgcaagcctacgcttatccccaggcatctgccgtcacctcccagctgcagcccgttcggcctttgtacccagcaccgctctctcagcctccccatttccaaggatcaggtgatatggcttcatttctcatgactgaagcccggcaacataacactgaaattcgaatggcagtcagcaaagtggctgataaaatggatcatctcatgactaaggttgaagagttacagaaacatagtgctggcaattccatgcttattcctagcatgtcagttacaatggaaacaagcatgattatgagcaacatccagcgaatcattcaggaaaatgaaagattgaagcaagagatccttgaaaagagcaatcggatagaagaacagaatgacaagattagtgaactaattgaacgaaatcagaggtatgttgagcagagtaacctgatgatggagaagaggaacaactcacttcagacagccacagaaaacacacaggcaagagtattgcatgctgaacaagagaaggccaaggtgacagaggagttagcagcggccactgcacaggtctctcatctgcagctgaaaatgactgctcaccaaaaaaaggaaacagagctgcagatgcagctgacagaaagcctgaaggagacagatcttctcaggggccagctcaccaaagtgcaggcaaagctctcagagctccaagaaacctctgagcaagcacagtccaaattcaaaagtgaaaagcagaaccggaaacaactggaactcaaggtgacatccctggaggaggaactgactgaccttcgagttgagaaggagtccttggaaaagaacctctcagaaaggaaaaagaagtcagctcaagagcgttctcaggccgaggaggagatagatgaaattcgcaagtcataccaggaggaattggacaaacttcgacagctcttgaaaaagactcgagtgtccacagaccaagcagctgcagagcagctgtctttagtacaggctgagctacagacccagtgggaagcaaaatgtgaacatttgttggcctccgccaaggatgagcacctgcagcagtaccaggaggtgtgcgcacagagagatgcctaccagcagaagctggtacaacttcaggaaaagtgtttagccctccaggcccaaatcacagctctcaccaagcaaaatgaacagcacatcaaggaactagagaagaacaagtcccagatgtctggggttgaagctgctgcatctgacccctcagagaaggtcaagaagatcatgaaccaggtgttccagtccttacggagagagtttgagctggaggaatcttacaatggcaggaccattctgggaaccatcatgaatacgatcaagatggtgactcttcagctgttaaaccaacaggagcaagagaaggaagagagcagcagtgaagaagaagaagaaaaagcagaagagcggccacgaagaccttcccaggagcagtcagcctcagccagttctgggcagcctcaagcacccctgaatagggagaggccagagtcccccatggtgccctcagagcaggtggtcgaggaagctgtcccgttgcctcctcaggccctcaccacttcccaggatggacacagaaggaaaggggactcagaagctgaggcactctcagagataaaagatggttcccttccacccgaactgtcttgcatcccatcccacagagttctagggcccccgacttcaattccacctgagcccctaggccctgtatccatggactctgagtgtgaggagtcacttgctgccagcccaatggcagctaagcccgacaacccatcaggaaaggtctgtgtcagggaagtagcaccagatggcccactacaagaaagctccacaagactgtccctgacttcagaccccgaggagggggacccactggccttagggcctgaaagcccaggagagcctcagcctccacagctcaagaaagatgatgtcactagctccaccggtccccacaaggagctgtcaagcacagaggcaggttccacagttgcaggagcagccctcagacccagccatcattcccagcgttccagtctctctggggatgaagaggatgaactgtttaaaggggcaactctgaaagctctgaggcccaaagcacagcctgaggaggaggatgaagacgaggtgagcatgaagggacgcccgcccccaacgcccctttttggagatgatgatgatgacgatgacattgactggctgggatgaagacccaggaaactggtgcaaaggtttctctgcaacccttccctaagcatgattttgcacagccaaccctgggtctaggcgagccacagggtgaggtcaaggtgagcattctgggaacaatatttgggctcagagggtgggttggccaccttctgagccccacccccgccagacctggtgaagaggatcataaccctgtcttcaagaacactgggatttcagcagcaagttggaagaaggactggtaggttcccctccaagccagtcacctgtaagagtcctgtcctctgccagactttttaatctcttcattaactctcagactgacctgggagccctcctctacctgaatccagtgctcaactgtgccccggcaacaagacctgggctgaggtctccctggtagaactaagggagattacaccatctaaatcccagtgcagtcaacagcctggcctatagtcctgggacatgtatcttcttctttgccttaaatctgatacaagaggtcaatgactttgaaaataaaactaaaataaatgtctataatgaaacttgatccaag

SEQ ID NO: 303708 - DNA, 466 bp, Homo sapiens
tcctgactttttcatctactgtctttcttctcagagggtgggttggccaccttctgagccccacccccgccagacctggtgaagaggatcataaccctgtcttcaagaacactgggatttcagcagcaagttggaagaaggactggtaggttcccctccaagccagtcacctgtaagagtcctgtcctctgccagactttttaatctcttcattaactctcagactgacctgggagccctcctctacctgaatccagtgctcaactgtgccccggcaacaagacctgggctgaggtctccctggtagaactaagggagattacaccatctaaatcccagtgcagtcaacagcctggcctatagtcctgggacatgtatcttcttctttgccttaaatctgatacaagaggtcaatgactttgaaaataaaactaaaataaatgtctataatgaaacttgatccaag

SEQ ID NO: 303709 - DNA, 3122 bp, Homo sapiens
cagacagtcagcctcagtcttcaatgagggaccccgtacagagtaacccaaacgcttgttcctgtttcaggatgtgaacactctgcaaggaggtgggcagcctgtggtgactccgtccgtccagccctctcttcatccggcccatccagcgttaccacagatgacctcacaggcacctcagccatctgttactgggctccaggcaccttctgctgccttaatgcaagtgtcatctctcgattcccactcagctgtatctggaaatgcccaatcctttcagccctatgcaggtatgcaagcctacgcttatccccaggcatctgccgtcacctcccagctgcagcccgttcggcctttgtacccagcaccgctctctcagcctccccatttccaaggatcaggtgatatggcttcatttctcatgactgaagcccggcaacataacactgaaattcgaatggcagtcagcaaagtggctgataaaatggatcatctcatgactaaggttgaagagttacagaaacatagtgctggcaattccatgcttattcctagcatgtcagttacaatggaaacaagcatgattatgagcaacatccagcgaatcattcaggaaaatgaaagattgaagcaagagatccttgaaaagagcaatcggatagaagaacagaatgacaagattagtgaactaattgaacgaaatcagaggtatgttgagcagagtaacctgatgatggagaagaggaacaactcacttcagacagccacagaaaacacacaggcaagagtattgcatgctgaacaagagaaggccaaggtgacagaggagttagcagcggccactgcacaggtctctcatctgcagctgaaaatgactgctcaccaaaaaaaggaaacagagctgcagatgcagctgacagaaagcctgaaggagacagatcttctcaggggccagctcaccaaagtgcaggcaaagctctcagagctccaagaaacctctgagcaagcacagtccaaattcaaaagtgaaaagcagaaccggaaacaactggaactcaaggtgacatccctggaggaggaactgactgaccttcgagttgagaaggagtccttggaaaagaacctctcagaaaggaaaaagaagtcagctcaagagcgttctcaggccgaggaggagatagatgaaattcgcaagtcataccaggaggaattggacaaacttcgacagctcttgaaaaagactcgagtgtccacagaccaagcagctgcagagcagctgtctttagtacaggctgagctacagacccagtgggaagcaaaatgtgaacatttgttggcctccgccaaggatgagcacctgcagcagtaccaggaggtgtgcgcacagagagatgcctaccagcagaagctggtacaacttcaggaaaagtgtttagccctccaggcccaaatcacagctctcaccaagcaaaatgaacagcacatcaaggaactagagaagaacaagtcccagatgtctggggttgaagctgctgcatctgacccctcagagaaggtcaagaagatcatgaaccaggtgttccagtccttacggagagagtttgagctggaggaatcttacaatggcaggaccattctgggaaccatcatgaatacgatcaagatggtgactcttcagctgttaaaccaacaggagcaagagaaggaagagagcagcagtgaagaagaagaagaaaaagcagaagagcggccacgaagaccttcccaggagcagtcagcctcagccagttctgggcagcctcaagcacccctgaatagggagaggccagagtcccccatggtgccctcagagcaggtggtcgaggaagctgtcccgttgcctcctcaggccctcaccacttcccaggatggacacagaaggaaaggggactcagaagctgaggcactctcagagataaaagatggttcccttccacccgaactgtcttgcatcccatcccacagagttctagggcccccgacttcaattccacctgagcccctaggccctgtatccatggactctgagtgtgaggagtcacttgctgccagcccaatggcagctaagcccgacaacccatcaggaaaggtctgtgtcagggaagtagcaccagatggcccactacaagaaagctccacaagactgtccctgacttcagaccccgaggagggggacccactggccttagggcctgaaagcccaggagagcctcagcctccacagctcaagaaagatgatgtcactagctccaccggtccccacaaggagctgtcaagcacagaggcaggttccacagttgcaggagcagccctcagacccagccatcattcccagcgttccagtctctctggggatgaagaggatgaactgtttaaaggggcaactctgaaagctctgaggcccaaagcacagcctgaggaggaggatgaagacgaggtgagcatgaagggacgcccgcccccaacgcccctttttggagatgatgatgatgacgatgacattgactggctgggatgaagacccaggaaactggtgcaaaggtttctctgcaacccttccctaagcatgattttgcacagccaaccctgggtctaggcgagccacagggtgaggtcaaggtgagcattctgggaacaatatttgggctcagagggtgggttggccaccttctgagccccacccccgccagacctggtgaagaggatcataaccctgtcttcaagaacactgggatttcagcagcaagttggaagaaggactggtaggttcccctccaagccagtcacctgtaagagtcctgtcctctgccagactttttaatctcttcattaactctcagactgacctgggagccctcctctacctgaatccagtgctcaactgtgccccggcaacaagacctgggctgaggtctccctggtagaactaagggagattacaccatctaaatcccagtgcagtcaacagcctggcctatagtcctgggacatgtatcttcttctttgccttaaatctgatacaagaggtcaatgactttgaaaataaaactaaaataaatgtctataatgaaacttgatccaag

SEQ ID NO: 303710 - DNA, 2771 bp, Homo sapiens
actgcaatctgtgcctctaatactggtgatgctagaggtgatgtttttggtaaacaggcggggtaagatttgccgagttccttttactttttttaacctttccttatgagcatgcctgtgttgggctgataaaatggatcatctcatgactaaggttgaagagttacagaaacatagtgctggcaattccatgcttattcctagcatgtcagttacaatggaaacaagcatgattatgagcaacatccagcgaatcattcaggaaaatgaaagattgaagcaagagatccttgaaaagagcaatcggatagaagaacagaatgacaagattagtgaactaattgaacgaaatcagaggtatgttgagcagagtaacctgatgatggagaagaggaacaactcacttcagacagccacagaaaacacacaggcaagagtattgcatgctgaacaagagaaggccaaggtgacagaggagttagcagcggccactgcacaggtctctcatctgcagctgaaaatgactgctcaccaaaaaaaggaaacagagctgcagatgcagctgacagaaagcctgaaggagacagatcttctcaggggccagctcaccaaagtgcaggcaaagctctcagagctccaagaaacctctgagcaagcacagtccaaattcaaaagtgaaaagcagaaccggaaacaactggaactcaaggtgacatccctggaggaggaactgactgaccttcgagttgagaaggagtccttggaaaagaacctctcagaaaggaaaaagaagtcagctcaagagcgttctcaggccgaggaggagatagatgaaattcgcaagtcataccaggaggaattggacaaacttcgacagctcttgaaaaagactcgagtgtccacagaccaagcagctgcagagcagctgtctttagtacaggctgagctacagacccagtgggaagcaaaatgtgaacatttgttggcctccgccaaggatgagcacctgcagcagtaccaggaggtgtgcgcacagagagatgcctaccagcagaagctggtacaacttcaggaaaagtgtttagccctccaggcccaaatcacagctctcaccaagcaaaatgaacagcacatcaaggaactagagaagaacaagtcccagatgtctggggttgaagctgctgcatctgacccctcagagaaggtcaagaagatcatgaaccaggtgttccagtccttacggagagagtttgagctggaggaatcttacaatggcaggaccattctgggaaccatcatgaatacgatcaagatggtgactcttcagctgttaaaccaacaggagcaagagaaggaagagagcagcagtgaagaagaagaagaaaaagcagaagagcggccacgaagaccttcccaggagcagtcagcctcagccagttctgggcagcctcaagcacccctgaatagggagaggccagagtcccccatggtgccctcagagcaggtggtcgaggaagctgtcccgttgcctcctcaggccctcaccacttcccaggatggacacagaaggaaaggggactcagaagctgaggcactctcagagataaaagatggttcccttccacccgaactgtcttgcatcccatcccacagagttctagggcccccgacttcaattccacctgagcccctaggccctgtatccatggactctgagtgtgaggagtcacttgctgccagcccaatggcagctaagcccgacaacccatcaggaaaggtctgtgtcagggaagtagcaccagatggcccactacaagaaagctccacaagactgtccctgacttcagaccccgaggagggggacccactggccttagggcctgaaagcccaggagagcctcagcctccacagctcaagaaagatgatgtcactagctccaccggtccccacaaggagctgtcaagcacagaggcaggttccacagttgcaggagcagccctcagacccagccatcattcccagcgttccagtctctctggggatgaagaggatgaactgtttaaaggggcaactctgaaagctctgaggcccaaagcacagcctgaggaggaggatgaagacgaggtgagcatgaagggacgcccgcccccaacgcccctttttggagatgatgatgatgacgatgacattgactggctgggatgaagacccaggaaactggtgcaaaggtttctctgcaacccttccctaagcatgattttgcacagccaaccctgggtctaggcgagccacagggtgaggtcaaggtgagcattctgggaacaatatttgggctcagagggtgggttggccaccttctgagccccacccccgccagacctggtgaagaggatcataaccctgtcttcaagaacactgggatttcagcagcaagttggaagaaggactggtaggttcccctccaagccagtcacctgtaagagtcctgtcctctgccagactttttaatctcttcattaactctcagactgacctgggagccctcctctacctgaatccagtgctcaactgtgccccggcaacaagacctgggctgaggtctccctggtagaactaagggagattacaccatctaaatcccagtgcagtcaacagcctggcctatagtcctgggacatgtatcttcttctttgccttaaatctgatacaagaggtcaatgactttgaaaataaaactaaaataaatgtctataatgaaacttgatccaag

SEQ ID NO: 303711 - DNA, 2498 bp, Homo sapiens
caacgatggtcctcagctataggagagatggtccaccccataatttgaatttggtttaatgcaggttgaaggcagccataactccctgtttactagttcagtctacatagagttatgtgaggttggttcatcacctgcatggagaacacctatgtttaaagtgacatcatactttgttattattcaggccaaggtgacagaggagttagcagcggccactgcacaggtctctcatctgcagctgaaaatgactgctcaccaaaaaaaggaaacagagctgcagatgcagctgacagaaagcctgaaggagacagatcttctcaggggccagctcaccaaagtgcaggcaaagctctcagagctccaagaaacctctgagcaagcacagtccaaattcaaaagtgaaaagcagaaccggaaacaactggaactcaaggtgacatccctggaggaggaactgactgaccttcgagttgagaaggagtccttggaaaagaacctctcagaaaggaaaaagaagtcagctcaagagcgttctcaggccgaggaggagatagatgaaattcgcaagtcataccaggaggaattggacaaacttcgacagctcttgaaaaagactcgagtgtccacagaccaagcagctgcagagcagctgtctttagtacaggctgagctacagacccagtgggaagcaaaatgtgaacatttgttggcctccgccaaggatgagcacctgcagcagtaccaggaggtgtgcgcacagagagatgcctaccagcagaagctggtacaacttcaggaaaagtgtttagccctccaggcccaaatcacagctctcaccaagcaaaatgaacagcacatcaaggaactagagaagaacaagtcccagatgtctggggttgaagctgctgcatctgacccctcagagaaggtcaagaagatcatgaaccaggtgttccagtccttacggagagagtttgagctggaggaatcttacaatggcaggaccattctgggaaccatcatgaatacgatcaagatggtgactcttcagctgttaaaccaacaggagcaagagaaggaagagagcagcagtgaagaagaagaagaaaaagcagaagagcggccacgaagaccttcccaggagcagtcagcctcagccagttctgggcagcctcaagcacccctgaatagggagaggccagagtcccccatggtgccctcagagcaggtggtcgaggaagctgtcccgttgcctcctcaggccctcaccacttcccaggatggacacagaaggaaaggggactcagaagctgaggcactctcagagataaaagatggttcccttccacccgaactgtcttgcatcccatcccacagagttctagggcccccgacttcaattccacctgagcccctaggccctgtatccatggactctgagtgtgaggagtcacttgctgccagcccaatggcagctaagcccgacaacccatcaggaaaggtctgtgtcagggaagtagcaccagatggcccactacaagaaagctccacaagactgtccctgacttcagaccccgaggagggggacccactggccttagggcctgaaagcccaggagagcctcagcctccacagctcaagaaagatgatgtcactagctccaccggtccccacaaggagctgtcaagcacagaggcaggttccacagttgcaggagcagccctcagacccagccatcattcccagcgttccagtctctctggggatgaagaggatgaactgtttaaaggggcaactctgaaagctctgaggcccaaagcacagcctgaggaggaggatgaagacgaggtgagcatgaagggacgcccgcccccaacgcccctttttggagatgatgatgatgacgatgacattgactggctgggatgaagacccaggaaactggtgcaaaggtttctctgcaacccttccctaagcatgattttgcacagccaaccctgggtctaggcgagccacagggtgaggtcaaggtgagcattctgggaacaatatttgggctcagagggtgggttggccaccttctgagccccacccccgccagacctggtgaagaggatcataaccctgtcttcaagaacactgggatttcagcagcaagttggaagaaggactggtaggttcccctccaagccagtcacctgtaagagtcctgtcctctgccagactttttaatctcttcattaactctcagactgacctgggagccctcctctacctgaatccagtgctcaactgtgccccggcaacaagacctgggctgaggtctccctggtagaactaagggagattacaccatctaaatcccagtgcagtcaacagcctggcctatagtcctgggacatgtatcttcttctttgccttaaatctgatacaagaggtcaatgactttgaaaataaaactaaaataaatgtctataatgaaacttgatccaag

SEQ ID NO: 303712 - DNA, 4261 bp, Homo sapiens
cgacgtcggcggtgacaggccctgggactctgggaatacccagcttcctccccgcaacccggtgaaagccaacgcaatgttcggtgcgggggacgaggacgacaccgatttcctctcgccgagcggcggtgccagattggcctcactttttggactggatcaggcagctgctggccatggaaatgaatttttccagtacacagccccaaaacagcctaagaaaggccagggaacggcagcaacaggaaatcaggcaacaccaaaaacagcaccagccaccatgagcactcccacaatactggtcgcaacagcagtccatgcatatcgatacacaaatggtcaatatgtaaagcagggcaaatttggtgctgcagttctggggaaccacacagccagagagtataggattcttctttatatcagtcaacaacagccagttacggttgctaggattcatgtgaactttgagctaatggttcggcccaataactatagcaccttttatgatgaccagagacagaactggtccatcatgtttgagtcggaaaaggctgctgtggagttcaataagcaggtgtgcattgctaagtgcaacagtacctcttccctggatgcagtgctctcccaggacctcattgtggcagacggccctgctgtagaagttggagattctttggaagtggcctataccggctggctctttcagaatcatgtgctgggccaggttttcgactccactgctaacaaagataagttgcttcgcttgaagttaggatcaggaaaagtcatcaagggctgggaggatggaatgctgggcatgaaaaaaggaggaaagcgattgcttattgtccctccagcctgtgctgttggctcagaaggggtaataggctggactcaagcaacggactcgatcctggtgttcgaggtggaggttaggcgggtgaagtttgccagagattctggctctgatggtcacagtgttagttcccgcgattctgcagctccgtctcccatccctggtgctgacaacctctctgctgatcctgttgtgtcaccacccacatcaatacctttcaaatcaggggagccagctcttcgtaccaaatctaactccctcagtgaacaacttgcaataaatacaagtcccgatgcagtcaaagccaagttgatctctcggatggctaaaatgggccagcccatgctgcccatccttccaccacagctggattccaatgattcagaaatcgaagatgtgaacactctgcaaggaggtgggcagcctgtggtgactccgtccgtccagccctctcttcatccggcccatccagcgttaccacagatgacctcacaggcacctcagccatctgttactgggctccaggcaccttctgctgccttaatgcaagtgtcatctctcgattcccactcagctgtatctggaaatgcccaatcctttcagccctatgcaggtatgcaagcctacgcttatccccaggcatctgccgtcacctcccagctgcagcccgttcggcctttgtacccagcaccgctctctcagcctccccatttccaaggatcaggtgatatggcttcatttctcatgactgaagcccggcaacataacactgaaattcgaatggcagtcagcaaagtggctgataaaatggatcatctcatgactaaggttgaagagttacagaaacatagtgctggcaattccatgcttattcctagcatgtcagttacaatggaaacaagcatgattatgagcaacatccagcgaatcattcaggaaaatgaaagattgaagcaagagatccttgaaaagagcaatcggatagaagaacagaatgacaagattagtgaactaattgaacgaaatcagaggtatgttgagcagagtaacctgatgatggagaagaggaacaactcacttcagacagccacagaaaacacacaggcaagagtattgcatgctgaacaagagaaggccaaggtgacagaggagttagcagcggccactgcacaggtctctcatctgcagctgaaaatgactgctcaccaaaaaaaggaaacagagctgcagatgcagctgacagaaagcctgaaggagacagatcttctcaggggccagctcaccaaagtgcaggcaaagctctcagagctccaagaaacctctgagcaagcacagtccaaattcaaaagtgaaaagcagaaccggaaacaactggaactcaaggtgacatccctggaggaggaactgactgaccttcgagttgagaaggagtccttggaaaagaacctctcagaaaggaaaaagaagtcagctcaagagcgttctcaggccgaggaggagatagatgaaattcgcaagtcataccaggaggaattggacaaacttcgacagctcttgaaaaagactcgagtgtccacagaccaagcagctgcagagcagctgtctttagtacaggctgagctacagacccagtgggaagcaaaatgtgaacatttgttggcctccgccaaggatgagcacctgcagcagtaccaggaggtgtgcgcacagagagatgcctaccagcagaagctggtacaacttcaggaaaagtgtttagccctccaggcccaaatcacagctctcaccaagcaaaatgaacagcacatcaaggaactagagaagaacaagtcccagatgtctggggttgaagctgctgcatctgacccctcagagaaggtcaagaagatcatgaaccaggtgttccagtccttacggagagagtttgagctggaggaatcttacaatggcaggaccattctgggaaccatcatgaatacgatcaagatggtgactcttcagctgttaaaccaacaggagcaagagaaggaagagagcagcagtgaagaagaagaagaaaaagcagaagagcggccacgaagaccttcccaggagcagtcagcctcagccagttctgggcagcctcaagcacccctgaatagggagaggccagagtcccccatggtgccctcagagcaggtggtcgaggaagctgtcccgttgcctcctcaggccctcaccacttcccaggatggacacagaaggaaaggggactcagaagctgaggcactctcagagataaaagatggttcccttccacccgaactgtcttgcatcccatcccacagagttctagggcccccgacttcaattccacctgagcccctaggccctgtatccatggactctgagtgtgaggagtcacttgctgccagcccaatggcagctaagcccgacaacccatcaggaaaggtctgtgtcagggaagtagcaccagatggcccactacaagaaagctccacaagactgtccctgacttcagaccccgaggagggggacccactggccttagggcctgaaagcccaggagagcctcagcctccacagctcaagaaagatgatgtcactagctccaccggtccccacaaggagctgtcaagcacagaggcaggttccacagttgcaggagcagccctcagacccagccatcattcccagcgttccagtctctctggggatgaagaggatgaactgtttaaaggggcaactctgaaagctctgaggcccaaagcacagcctgaggaggaggatgaagacgaggtgagcatgaagggacgcccgcccccaacgcccctttttggagatgatgatgatgacgatgacattgactggctgggatgaagacccaggaaactggtgcaaaggtttctctgcaacccttccctaagcatgattttgcacagccaaccctgggtctaggcgagccacagggtgaggtcaaggtgagcattctgggaacaatatttgggctcagagggtgggttggccaccttctgagccccacccccgccagacctggtgaagaggatcataaccctgtcttcaagaacactgggatttcagcagcaagttggaagaaggactggtaggttcccctccaagccagtcacctgtaagagtcctgtcctctgccagactttttaatctcttcattaactctcagactgacctgggagccctcctctacctgaatccagtgctcaactgtgccccggcaacaagacctgggctgaggtctccctggtagaactaagggagattacaccatctaaatcccagtgcagtcaacagcctggcctatagtcattgacctcttgtaccagatttaaggcaccgaagaagatacatgtcccaggactataggtc

SEQ ID NO: 303713 - DNA, 3813 bp, Homo sapiens
cgacgtcggcggtgacaggccctgggactctgggaatacccagcttcctccccgcaacccggtgaaagccaacgcaatgttcggtgcgggggacgaggacgacaccgatttcctctcgccgagcggcggtgccagattggcctcactttttggactggatcaggcagctgctggccatggaaatgaatttttccagtacacagccccaaaacagcctaagaaaggccagggaacggcagcaacaggaaatcaggcaacaccaaaaacagcaccagccaccatgagcactcccacaatactggtcgcaacagcagtccatgcatatcgatacacaaatggtcaatatgtaaagcagggcaaatttggtgctgcagttctggggaaccacacagccagagagtataggattcttctttatatcagtcaacaacagccagttacggttgctaggattcatgtgaactttgagctaatggttcggcccaataactatagcaccttttatgatgaccagagacagaactggtccatcatgtttgagtcggaaaaggctgctgtggagttcaataagcaggtgtgcattgctaagtgcaacagtacctcttccctggatgcagtgctctcccaggacctcattgtggcagacggccctgctgtagaagttggagattctttggaagtggcctataccggctggctctttcagaatcatgtgctgggccaggttttcgactccactgctaacaaagataagttgcttcgcttgaagttaggatcaggaaaagtcatcaagggctgggaggatggaatgctgggcatgaaaaaaggaggaaagcgattgcttattgtccctccagcctgtgctgttggctcagaaggggtaataggctggactcaagcaacggactcgatcctggtgttcgaggtggaggttaggcgggtgaagtttgccagagattctggctctgatggtcacagtgttagttcccgcgattctgcagctccgtctcccatccctggtgctgacaacctctctgctgatcctgttgtgtcaccacccacatcaatacctttcaaatcaggggagccagctcttcgtaccaaatctaactccctcagtgaacaacttgcaataaatacaagtcccgatgcagtcaaagccaagttgatctctcggatggctaaaatgggccagcccatgctgcccatccttccaccacagctggattccaatgattcagaaatcgaagatgtgaacactctgcaaggaggtgggcagcctgtggtgactccgtccgtccagccctctcttcatccggcccatccagcgttaccacagatgacctcacaggcacctcagccatctgttactgggctccaggcaccttctgctgccttaatgcaagtgtcatctctcgattcccactcagctgtatctggaaatgcccaatcctttcagccctatgcaggtatgcaagcctacgcttatccccaggcatctgccgtcacctcccagctgcagcccgttcggcctttgtacccagcaccgctctctcagcctccccatttccaaggatcaggtgatatggcttcatttctcatgactgaagcccggcaacataacactgaaattcgaatggcagtcagcaaagtggctgataaaatggatcatctcatgactaaggttgaagagttacagaaacatagtgctggcaattccatgcttattcctagcatgtcagttacaatggaaacaagcatgattatgagcaacatccagcgaatcattcaggaaaatgaaagattgaagcaagagatccttgaaaagagcaatcggatagaagaacagaatgacaagattagtgaactaattgaacgaaatcagaggtatgttgagcagagtaacctgatgatggagaagaggaacaactcacttcagacagccacagaaaacacacaggcaagagtattgcatgctgaacaagagaaggccaaggtgacagaggagttagcagcggccactgcacaggtctctcatctgcagctgaaaatgactgctcaccaaaaaaaggaaacagagctgcagatgcagctgacagaaagcctgaaggagacagatcttctcaggggccagctcaccaaagtgcaggcaaagctctcagagctccaagaaacctctgagcaagcacagtccaaattcaaaagtgaaaagcagaaccggaaacaactggaactcaaggtgacatccctggaggaggaactgactgaccttcgagttgagaaggagtccttggaaaagaacctctcagaaaggaaaaagaagtcagctcaagagcgttctcaggccgaggaggagatagatgaaattcgcaagtcataccaggaggaattggacaaacttcgacagctcttgaaaaagactcgagtgtccacagaccaagcagctgcagagcagctgtctttagtacaggctgagctacagacccagtgggaagcaaaatgtgaacatttgttggcctccgccaaggatgagcacctgcagcagtaccaggaggtgtgcgcacagagagatgcctaccagcagaagctggtacaacttcaggaaaagtgtttagccctccaggcccaaatcacagctctcaccaagcaaaatgaacagcacatcaaggaactagagaagaacaagtcccagatgtctggggttgaagctgctgcatctgacccctcagagaaggtcaagaagatcatgaaccaggtgttccagtccttacggagagagtttgagctggaggaatcttacaatggcaggaccattctgggaaccatcatgaatacgatcaagatggtgactcttcagctgttaaaccaacaggagcaagagaaggaagagagcagcagtgaagaagaagaagaaaaagcagaagagcggccacgaagaccttcccaggagcagtcagcctcagccagttctgggcagcctcaagcacccctgaatagggagaggccagagtcccccatggtgccctcagagcaggtggtcgaggaagctgtcccgttgcctcctcaggccctcaccacttcccaggatggacacagaaggaaaggggactcagaagctgaggcactctcagagataaaagatggttcccttccacccgaactgtcttgcatcccatcccacagagttctagggcccccgacttcaattccacctgagcccctaggccctgtatccatggactctgagtgtgaggagtcacttgctgccagcccaatggcagctaagcccgacaacccatcaggaaaggtctgtgtcagggaagtagcaccagatggcccactacaagaaagctccacaagactgtccctgacttcagaccccgaggagggggacccactggccttagggcctgaaagcccaggagagcctcagcctccacagctcaagaaagatgatgtcactagctccaccggtccccacaaggagctgtcaagcacagaggcaggttccacagttgcaggagcagccctcagacccagccatcattcccagcgttccagtctctctggggatgaagaggatgaactgtttaaaggggcaactctgaaagctctgaggcccaaagcacagcgacagttgtgatcgtggtgtgcgtcagcttcctggtgttcatgattatcctgggggtatttcggatccgggccgcacatcggcggaccagtgcgggatcaggacaccgggaaggagaacgagatggaactgggacgactcggccatgaccatctccgtgaacatccatggaggtacggaga

SEQ ID NO: 303714 - DNA, 2725 bp, Homo sapiens
cgacgtcggcggtgacaggccctgggactctgggaatacccagcttcctccccgcaacccggtgaaagccaacgcaatgttcggtgcgggggacgaggacgacaccgatttcctctcgccgagcggcggtgccagattggcctcactttttggactggatcaggcagctgctggccatggaaatgaatttttccagtacacagccccaaaacagcctaagaaaggccagggaacggcagcaacaggaaatcaggcaacaccaaaaacagcaccagccaccatgagcactcccacaatactggtcgcaacagcagtccatgcatatcgatacacaaatggtcaatatgtaaagcagggcaaatttggtgctgcagttctggggaaccacacagccagagagtataggattcttctttatatcagtcaacaacagccagttacggttgctaggattcatgtgaactttgagctaatggttcggcccaataactatagcaccttttatgatgaccagagacagaactggtccatcatgtttgagtcggaaaaggctgctgtggagttcaataagcaggtgtgcattgctaagtgcaacagtacctcttccctggatgcagtgctctcccaggacctcattgtggcagacggccctgctgtagaagttggagattctttggaagtggcctataccggctggctctttcagaatcatgtgctgggccaggttttcgactccactgctaacaaagataagttgcttcgcttgaagttaggatcaggaaaagtcatcaagggctgggaggatggaatgctgggcatgaaaaaaggaggaaagcgattgcttattgtccctccagcctgtgctgttggctcagaaggggtaataggctggactcaagcaacggactcgatcctggtgttcgaggtggaggttaggcgggtgaagtttgccagagattctggctctgatggtcacagtgttagttcccgcgattctgcagctccgtctcccatccctggtgctgacaacctctctgctgatcctgttgtgtcaccacccacatcaatacctttcaaatcaggggagccagctcttcgtaccaaatctaactccctcagtgaacaacttgcaataaatacaagtcccgatgcagtcaaagccaagttgatctctcggatggctaaaatgggccagcccatgctgcccatccttccaccacagctggattccaatgattcagaaatcgaagatgtgaacactctgcaaggaggtgggcagcctgtggtgactccgtccgtccagccctctcttcatccggcccatccagcgttaccacagatgacctcacaggcacctcagccatctgttactgggctccaggcaccttctgctgccttaatgcaagtgtcatctctcgattcccactcagctgtatctggaaatgcccaatcctttcagccctatgcaggtatgcaagcctacgcttatccccaggcatctgccgtcacctcccagctgcagcccgttcggcctttgtacccagcaccgctctctcagcctccccatttccaaggatcaggtgatatggcttcatttctcatgactgaagcccggcaacataacactgaaattcgaatggcagtcagcaaagtggctgataaaatggatcatctcatgactaaggttgaagagttacagaaacatagtgctggcaattccatgcttattcctagcatgtcagttacaatggaaacaagcatgattatgagcaacatccagcgaatcattcaggaaaatgaaagattgaagcaagagatccttgaaaagagcaatcggatagaagaacagaatgacaagattagtgaactaattgaacgaaatcagaggtatgttgagcagagtaacctgatgatggagaagaggaacaactcacttcagacagccacagaaaacacacaggcaagagtattgcatgctgaacaagagaaggccaaggtgacagaggagttagcagcggccactgcacaggtctctcatctgcagctgaaaatgactgctcaccaaaaaaaggaaacagagctgcagatgcagctgacagaaagcctgaaggagacagatcttctcaggggccagctcaccaaagtgcaggcaaagctctcagagctccaagaaacctctgagcaagcacagtccaaattcaaaagtgaaaagcagaaccggaaacaactggaactcaaggtgacatccctggaggaggaactgactgaccttcgagttgagaaggagtccttggaaaagaacctctcagaaaggaaaaagaagtcagctcaagagcgttctcaggccgaggaggagatagatgaaattcgcaagtcataccaggaggaattggacaaacttcgacagctcttgaaaaagactcgagtgtccacagaccaagcagctgcagagcagctgtctttagtacaggctgagctacagacccagtgggaagcaaaatgtgaacatttgttggcctccgccaaggatgagcacctgccagttcctgcttcttgaaagaaatgttgcaatcaagaagctaagccgaccatttcagaatcagactcatgccaagcgggcctacagagagctagttcttatgaaatgtgttaatcacaaaaatataattggccttttgaatgtttcacaccactgaatccctagaagatttcaagagcagacggg

SEQ ID NO: 303715 - DNA, 605 bp, Homo sapiens
cgacgtcggcggtgacaggccctgggactctgggaatacccagcttcctccccgcaacccggtgaaagccaacgcaatgttcggtgcgggggacgaggacgacaccgatttcctctcgccgagcggcggtgccagattggcctcactttttggactggatcaggcagctgctggccatggaaatgaatttttccagtacacagccccaaaacagcctaagaaaggccagggaacggcagcaacaggaaatcaggcaacaccaaaaacagcaccagccaccatgagcactcccacaatactggtcgcaacagcagtccatgcatatcgatacacaaatggtcaatatgtaaagcagggcaaatttggtgctgcagttctggggaaccacacagccagagaggtgagagtgctcccacatctcatgtatattcagatgtcccaaataataccaatgagctggcttttatctggcttgcctgatgtcttgtttatcagaagataaggatgattgtttgtattgaatgttaatttataacatcaagcatatagtaaatgatcacattttgcttactattgtgcattaaaacaaatccaaccattaaaaa

SEQ ID NO: 303716 - DNA, 705 bp, Homo sapiens
cgacgtcggcggtgacaggccctgggactctgggaatacccagcttcctccccgcaacccggtgaaagccaacgcaatgttcggtgcgggggacgaggacgacaccgatttcctctcgccgagcggcggtgccagattggcctcactttttggactggatcaggcagctgctggccatggaaatgaatttttccagtacacagccccaaaacagcctaagaaaggccagggaacggcagcaacaggaaatcaggcaacaccaaaaacagcaccagccaccatgagcactcccacaatactggtcgcaacagcagtccatgcatatcgatacacaaatggtcaatatgtaaagcagggcaaatttggtgctgcagttctggggaaccacacagccagagagtataggattcttctttatatcagtcaacaacagccagttacggttgctaggattcatgtgaactttgagctaatggttcggcccaataactatagcaccttttatgatgaccagagacagaactggtccatcatgtttgagtcggaaaaggctgctgtggagttcaataagcaggtgtgcattgctaagtgcaacagtacgaggcctgtctctggccctgagctttgtggcctgccgtaggaactggagcttcattttcaaagctccatactcgccttctccccaacgctatctcttaccggtcg

SEQ ID NO: 303717 - DNA, 202 bp, Homo sapiens
caccttctgctgccttaatgcaagtgtcatctctcgattcccactcagctgtatctggaaatgcccaatcctttcaggtaacattttataaccgtattaattatatcctataatttgctgtggttctagtcagtctcttttcttcttcctgtacatttcatacagtagcagttccccaaagtcagagtttgtaatttttttc

SEQ ID NO: 303718 - DNA, 367 bp, Homo sapiens
atctttactagcattcaaagattatgcaaactaaagaagagttaaaattctgttttacagtcattaaattggcacacatttaaaaaaacaatttgcttatccaatataatttggacttgtgattctggattttgttttcaatcttggaatatggtctatttgctttcagggagccagctcttcgtaccaaatctaactccctcagtgaacaacttgcaataaatacagtaagtataagagtcttggccaggcatggtggttcacacctgtaatcctaacactttgcgaagctgaggcaggaggatcactacagtgcaggagttcaagaccagcctaggcaacatagtgagacctcgtctctccttta

SEQ ID NO: 303719 - DNA, 451 bp, Homo sapiens
aagagccactggggccaggcgcaggggctcacgcctgtaatcctagcactctgggaggctgaggcaggaggactgcttgagcccaggagatggaggctatagtgagctatgatcacaccactgcactccagcctgagtgatggagcaaggctttgtctccaaaaaataatttaaaaaaagagctgctgggataacacatagcccattacagctttggttctgtagcgaagtctctctgctcctgtatcccagagctccaagaaacctctgagcaagcacagtccaaattcaaaagtgaaaagcagaaccggaaacaactggaactcaaggtgacatccctggaggaggaactgactgaccttcgagttgagaaggagtccttggaaaaggtaagctctacaacccagttggccagaattagctgtttaataaacatttttattttcctttt

SEQ ID NO: 303720 - DNA, 377 bp, Homo sapiens
agaatttgaaataaaattgtctttttattatatgcaaaaaaaaaaaaaagagacttgatgtttgggtggttctcctccccttgggttttctgaccttcacctggttcctgaggccacagccacagtctgtttgttttgcagtgtttagccctccaggcccaaatcacagctctcaccaagcaaaatgaacagcacatcaaggaactagagaagaacaagtcccagatgtctggggttgaagctgctgcatctgacccctcagagaaggtgagctggtatttcaaatgagaagcaagccatttatatcaagcattcagaaagaacatggccagtatgttgtgttaatagctctttttctaactttagtgatgttttac

SEQ ID NO: 303721 - DNA, 358 bp, Homo sapiens
  misc_feature (342)..(342): n is a, c, g, or t
ctgccctcatcatagcagtggaacaggaccagctgggacagggtccttctgtgacacctgctgtgtcaccaggctgtgcgaatggactcagctgccagaactcacagaatatcagtaacagcaccgaaacttcacaggaaaaatgctccacgaacttcagacttaaaaagcatcactggctcctgaccaggattccagctccatgaacctcaaactagaacaccagcccggcttctctgcaggtctccagctccaaaacctaagacatcagtggcagtacaaactcatcccaggggaggctgcagtgagccatgatcatgccattgcactccagcctgagtngcagagtgagattctg

SEQ ID NO: 303722 - DNA, 639 bp, Homo sapiens
ctgccctcatcatagcagtggaacaggaccagctgggacagggtccttctgtgacacctgctgtgtcaccaggctgtgcgaatggactcagctgccagaactcacagaatatcagtaacagcaccgaaacttcacaggaaaaatgctccacgaacttcagacttaaaaagcatcactggctcctgaccaggattccagctccatgaacctcaaactagaacaccagcccggcttctctgcaggtctccagctccaaaacctaagacatcagtggcagtacaaactcatcccaggggctccagctccaggaccctcagacttgaaccgcagcaccaactcttccctggatctccatctccatgaccctcagacttaaacagcagcagcaccagttcatctgtgaatctccagctccacaaccctccaactagaaacacaccagctcctccctgggtctccagctgcacgaccctcaaactacaacatcagctcctccccgggtctctaactccatgaccctcaaactaaaacaacactgctcacccctgggactccagatccacaaaccttacactagaacagaaacaccagctcctccacagatctccagctttacaatctaagacattagtggcagca

SEQ ID NO: 303723 - DNA, 493 bp, Homo sapiens
  misc_feature (3)..(3): n is a, c, g, or t
  misc_feature (33)..(33): n is a, c, g, or t
aanacatggcttgtgcccatcataaaaaaagantcagactgaaggcttagctttggttttttcaattaaattgttaaactgtgcacagtgatttttttttagaacttgagacatttgtgatgttggctgtttaaatctttgttaccttcgctgtgaattgaaattgtacatatttagtaaatcatgcagacaaaacaaactttttagacaatatttttattggagagttttcttttcctgtatccatgttaaaaaaaaaaaagacctcctttcccaaaataaaaatgtcaatactaaatttaaagaagtataaaggaatgattgcttcctttagagcaaaatatttaaataaacatggagataattggcaacatgttctttttgggctagtaggctgtgtccaattttttgggtctgatgtttcagagggcctctgtttcagggttgaagatgatatattaatctcggaattaaacaaatgctattaaataac

SEQ ID NO: 303724 - DNA, 1372 bp, Homo sapiens
cgtggaggccgccagtcgcggcgatcttctcctcgcttctggagtgttatcgtcaccatgtccctaatggtctcggctggccggggcctgggggccgtgtggtccccaacccacgtgcaggtgacggtgctgcaggcgcggggcctgcgggccaagggccccgggggcacgagcgacgcgtacgcggtgatccaggtgggcaaggagaagtacgccacctccgtgtcggagcgcagcctgggcgcgcccgtgtggcgcgaggaggccaccttcgagctgccatcgctgctgtcctccggacccgcggccgccgccaccctgcagctcaccgtgctgcaccgcgcgctgctcggcctcgacaagttcctgggccgcgccgaggtggacctgcgggattgcactccagcctgggcaagagtttttttaagactcttaaaaaaagagcctgggcaatttttttaagactctgtcttaaaaaaaactaaaaagaaaaaaagaagccccttcactctacaggggacaggagaccatggattggaccccaaagggattgaactgcatctgcatgtctgtcctttgaacactttctctccctgcccaaaaggaaacccaaattatttgtgggatactggggaaattgtagtgaagggcttaatgtagttaataaaagttaaaagtcagtagaaaacaggtgcctcagccttcaaatggttgctttttttccattttccctcatgaatagactcaccagcattttacccccttgttataaaactgtgcagagcaagaagatgatacttatttttgaatttgtatttttaaaactagatttatagactttttttttttttaactagggcacttgcttccttcttagctaaaagcaccagctgagatttttcaggtaattttgttgttactcacttaagactggaattagaatgtttctggtatttctcatttttttccctggctatgatagaatctcatctaatcttgacatctctcctaggggaagaatatcacaggctaatagcgtggttgggggtgaagatgatagcagttattaaatcaggaatctcttttatgtatgtccttgttacattgaggttaagagacaaaatcattggcagtgcaatctctttccaggatttcgtttgctgtggcattggttatatcagagcactttaatctgaaggatgatactgtaacttgatttatctaattagcttttaattatctacagctattttattttatttaattctctcctacagtactgggaccactgtaaacttctcagatgacttgtatttttgtagtgctatgaaatttatttacatacttataaagaaaactgtatgttcacttg

SEQ ID NO: 303725 - DNA, 1895 bp, Homo sapiens
aaagcttccagaatgtaaggtttagttcgactgcatacctcattacctccccttccctcctccctccccttactcccaggaagtttgcagggtaaataaaacatgcacatgataataaaacaaagtggaatgtactaaaataccaaaaggaaaatacagattaggtatactgagtaaatatgttacagagaaaacttcctgtatttaaaaagtaaggaacaatgggatgagatcatagataatcctggagcatttcctggtagtaaatttccagccaggtttatatcccaggtctggggattggaggttaagtttctgcatatacaatatttgtttacattcctctctgcctctaccagacagacagacagacacacacacacacacacacacacaccctctgtctctttctctctctttctctctctctctctctctctctctctctctcacttgagtgacagatgctggtgcagggtattctcaacaggagtagggaatttgaaataaggagttgagaggtcaaaggtaaggggctgaatgcaggaccagagagcttcagtagcatcttgatgggcagagtatgagatgaacagtggcaacgaggaggatagggaaaaatcacattttctgtttgtgttttgtttttgtctggtggttttcaacctctctctgtttcacttgactatgcttgattatgaaatcttttttttttctttttttaatttaaagatctcaactggctttgttgtgattctacattcaggcaacactattctgtaaaatagtataaatgttccgatgagttgaacagaggagattggctttgtagacagaaaagggctgaagaaaacagaaataaaaaaatcttttccttttcatagtgagagctcagatgcaaatgtatggagtggggatggatgggaaatgccgtcttttgcaaacccttggaaacgctgtcaccctgtgggtctcacagccagtgtacagataacaccctcatctgtacacagaagacagaaggtggcaggggaaggaatgagcacaccccagaatgagtagcaagtttaatcaataaaatatgtatttctttttttattgttgtataagaagaaaagcagacagaactcaaaccctgaagctgattttgcaagtgaaaagcttagtaaagggggaaatgttatgtaactattttttcagtttagtgtggatggcttaagaaataatcattactgtgaggacactagtatttttcttggaaaaaaaagtttggcaaattttcctctttagattaatcttggttatagattattattatgcttgagtggtacctcttcagaagtagaaatctggcaaaaactggagtacaatgattgctctaggaataaattcacatatttaaatttaaaagcctggatatgtgcatggtaattttgttgttactcacttaagactggaattagaatgtttctggtatttctcatttttttccctggctatgatagaatctcatctaatcttgacatctctcctaggggaagaatatcacaggctaatagcgtggttgggggtgaagatgatagcagttattaaatcaggaatctcttttatgtatgtccttgttacattgaggttaagagacaaaatcattggcagtgcaatctctttccaggatttcgtttgctgtggcattggttatatcagagcactttaatctgaaggatgatactgtaacttgatttatctaattagcttttaattatctacagctattttattttatttaattctctcctacagtactgggaccactgtaaacttctcagatgacttgtatttttgtagtgctatgaaatttatttacatacttataaagaaaactgtatgttcacttg

SEQ ID NO: 303726 - DNA, 4983 bp, Homo sapiens
cgtggaggccgccagtcgcggcgatcttctcctcgcttctggagtgttatcgtcaccatgtccctaatggtctcggctggccggggcctgggggccgtgtggtccccaacccacgtgcaggtgacggtgctgcaggcgcggggcctgcgggccaagggccccgggggcacgagcgacgcgtacgcggtgatccaggtgggcaaggagaagtacgccacctccgtgtcggagcgcagcctgggcgcgcccgtgtggcgcgaggaggccaccttcgagctgccatcgctgctgtcctccggacccgcggccgccgccaccctgcagctcaccgtgctgcaccgcgcgctgctcggcctcgacaagttcctgggccgcgccgaggtggacctgcgggatctgcaccgcgaccagggccgcagaagacgcatgaaggtgaaaaccctctcacggtcccagggagggagaaggaaggcatgctgatgggggttaagccgggggaggacgcatcggggcctgctgaagaccttgtgagaagatctgagaaagatactgcagctgttgtctccagacagggcagctccctgaacctctttgaagatgtgcagatcacagaaccagaagctgagccagagtccaagtctgaaccgagacctccaatttcctctccgagggctccccagaccagagctgtcaagccccgacttcatcctgtgaagccaatgaatgccacggccaccaaggttgctaactgcagcttgggaactgccaccatcatcagtgagaacttgaacaatgaggtcatgatgaagaaatacagcccctcggaccctgcatttgcatatgcgcagctgacccacgatgagctgattcagctggtcctcaaacagaaggaaacgataagcaagaaggagttccaggtccgcgagctggaagactacattgacaacctgcttgtcagggtcatggaagaaacccccaatatcctccgcatcccgactcaggttggcaaaaaagcaggaaagatgtaaatcagcagaaaaaaaacaccgagacgtttctgtgacttcactttcacctgctccaggggtcaaggacttgccttgcctgataaccagccagcaggctccgaatcaccatctccctcacatgttatccggcaagagtgaattctaccaatggaagccaggttaatgattacaattaatcttttactgtacattcccaaggctttagttttaaatgccactgtgcctttaacaaggttgtaaatattttatgcccaccagagatgtggtcataagatctgatcctgagccagagattcagatggcacaggaagtattcatgtattttaacactggggttttctttctttcatactgagattttttttcagtatgtatcctccagctcttaaagcttacctgagaaagctttaaatgagaaaaggaccatgcgattggtgctgtgttacatacacatactttcttggcttctgagtagctcaggtgtggcttttggctgcagatgttaaattttgataccatgtaaacctacccagcttctcagacttgggtcttgttttttgatgggaacagaggtgtttagagaaagcctctgagtatgcctttcagattttgaacaagcggccttttctaaacatcgacttctactactctctagccttaaaataccttctgcttagatccagggcccttctactggagataggaaaagtagaattcaggaattaaaagaattactctttattcaatttgaggaacttggtgaaagcccctcctcttatgacagccaggttcctgctggctagaccagcctattcagcgctttgctaggggattgggtggtccacgcactcgctaatacagttctccaggtgtggaatgatgtcaatacgattgcttggccttttccccctgtgcctttgctcggtgctctggtttcctcagcaacactccttgtaaggggcagagacagggtccaccaactccccaagatgaagaagccccttcaggccagtcgtggtggctcatgcctgtaatcccagcactttgcaaggccgaggagggtggatcacttgaggtcaggagttcgagaccagcctgaccaacatggcgaaaccccatctctactaaaaatacaaaaattagcttggcatggtggtgcgtgcctgtaatcccagctactcgggaggctggggcaggagaattgcttgaacttgggagatggaggctgcagcgagccaagatcgtgccactgcactccagcctgggcaagagtttttttaagactcttaaaaaaagagcctgggcaatttttttaagactctgtcttaaaaaaaactaaaaagaaaaaaagaagccccttcactctacaggggacaggagaccatggattggaccccaaagggattgaactgcatctgcatgtctgtcctttgaacactttctctccctgcccaaaaggaaacccaaattatttgtgggatactggggaaattgtagtgaagggcttaatgtagttaataaaagttaaaagtcagtagaaaacaggtgcctcagccttcaaatggttgctttttttccattttccctcatgaatagactcaccagcattttacccccttgttataaaactgtgcagagcaagaagatgatacttatttttgaatttgtatttttaaaactagatttatagactttttttttttttaactagggcacttgcttccttcttagctaaaagcaccagctgagatttttcaggtaattttgttgttactcacttaagactggaattagaatgtttctggtatttctcatttttttccctggctatgatagaatctcatctaatcttgacatctctcctaggggaagaatatcacaggctaatagcgtggttgggggtgaagatgatagcagttattaaatcaggaatctcttttatgtatgtccttgttacattgaggttaagagacaaaatcattggcagtgcaatctctttccaggatttcgtttgctgtggcattggttatatcagagcactttaatctgaaggatgatactgtaacttgatttatctaattagcttttaattatctacagctattttattttatttaattctctcctacagtactgggaccactgtaaacttctcagatgacttgtatttttgtagtgctatgaaatttatttacatacttataaagaaaactgtatgttcacttgaactctgaaaatgtacatgtatggctggacgcggtggctcacgcctgtaatcccagcactttgggaggctgaggcgggtgaatcacttgattgaggtcaggagttcgagaccagcctggccaacatggcaaaaccccgtctctactaaaaaatacagaaattagctgggtgtggtggcagacagctgtaatctcagctgctcgggaggctgaggcacaagaatcgcttgagccagggaggtggaggttgcagtgagctgagatcacatcattgcactccagcctgggcaacgggcgagactctgtctcaaaaaaaagaaagaaagaaaaggtacatgtatatatttgtcctgcattatgttttttacttgatataaatgtatttttactgtgatagtccaagtgccctggggggcaggtgtgctctatgtggttcttcttccattggagagctggcgtagagatctgcagtgttcacaaggatgttggtttggagatgtctgctgctaggacctggggtgtgtgactcagtccatatgagagggacatctgggtggaggagtaaattcctgtgctctgaaatgccacttggtagctctggacaatgaaggacaattgactcaagggtgcctggcttctgctgctgctgggaaaaaattcagtttatagcattcctgcacctcccaaagtagataacctggaggtcattcagttaacaactgtccctgaggactcagttttgggggaggggttatctgggagaagctttagcctgttctgagccattaggagacattagtgaattggagcactggagaatcctacaaatggcctatgtctcagaagagctgggacctccttccagctgctgcagatgctgacaggccctgggaggctgctgtgctctggagaagctggagcagctcatttcttggcctagcctggctgcctcagaaagagcagtcaggacttgagggaagcatcaaattctatacccataaactgcagttggaagtcagctttttgaaatgtccagcctttgcccaattgtttcagatcatctcatgcctcaggctttggcaggtatcctgccctccatcttattccagtgtgttcacctcatcaaggcagcagagtggatgaaggagtaagtctgccctttgccatactgaacagctgtggaccccgattggtgagggctctgcatatgcctgtatgaaggagatacaggtgtgtgtgcacatgccggtatgaagaagacacaggcatgtgcttctcagttttgctaacagtgggagctcaacggggcagagggaggaaggtccatgatgctcagccacatactgtagagagaggcaatttaatgttaaatgacgcaccatcctccctcccacccttctcccagtcaactttttttctttttctagaactactaattatctctcaaggctgaaaaattaattgccttaggtggagaacttaattcctagtatccaccaaacttaactccgtatctccatatggtgtctccatatctactgtgtgagctacttaactgacgccctcttcctccaactgaaggatcgcccaacgtttttggattatagaattattatttcctgctttctttctttgggacttttgaatttctttggtttcgtttttaagaagtaacccaacatttcctacaacactaaataaaatggtacttacctttcaaaaaaaaaaaa

SEQ ID NO: 303727 - DNA, 4522 bp, Homo sapiens
tgaagatatcaggacatctggacaaggacatgctttcctggcttgcatgtggcagccctgtcctgactgcttttgtttccacaggaactgagacattggagtgctttggcccagagatgagggcagcatgtgacccacctgccccttgtctggcttactggctgccgtctttgcagtgggcagttgctcagttttgccatgaccggagggtctaaagatccttttccccttctctttagacttcatcctgtgaagccaatgaatgccacggccaccaaggttgctaactgcagcttgggaactgccaccatcatcagtgagaacttgaacaatgaggtcatgatgaagaaatacagcccctcggaccctgcatttgcatatgcgcagctgacccacgatgagctgattcagctggtcctcaaacagaaggaaacgataagcaagaaggagttccaggtccgcgagctggaagactacattgacaacctgcttgtcagggtcatggaagaaacccccaatatcctccgcatcccgactcaggttggcaaaaaagcaggaaagatgtaaatcagcagaaaaaaaacaccgagacgtttctgtgacttcactttcacctgctccaggggtcaaggacttgccttgcctgataaccagccagcaggctccgaatcaccatctccctcacatgttatccggcaagagtgaattctaccaatggaagccaggttaatgattacaattaatcttttactgtacattcccaaggctttagttttaaatgccactgtgcctttaacaaggttgtaaatattttatgcccaccagagatgtggtcataagatctgatcctgagccagagattcagatggcacaggaagtattcatgtattttaacactggggttttctttctttcatactgagattttttttcagtatgtatcctccagctcttaaagcttacctgagaaagctttaaatgagaaaaggaccatgcgattggtgctgtgttacatacacatactttcttggcttctgagtagctcaggtgtggcttttggctgcagatgttaaattttgataccatgtaaacctacccagcttctcagacttgggtcttgttttttgatgggaacagaggtgtttagagaaagcctctgagtatgcctttcagattttgaacaagcggccttttctaaacatcgacttctactactctctagccttaaaataccttctgcttagatccagggcccttctactggagataggaaaagtagaattcaggaattaaaagaattactctttattcaatttgaggaacttggtgaaagcccctcctcttatgacagccaggttcctgctggctagaccagcctattcagcgctttgctaggggattgggtggtccacgcactcgctaatacagttctccaggtgtggaatgatgtcaatacgattgcttggccttttccccctgtgcctttgctcggtgctctggtttcctcagcaacactccttgtaaggggcagagacagggtccaccaactccccaagatgaagaagccccttcaggccagtcgtggtggctcatgcctgtaatcccagcactttgcaaggccgaggagggtggatcacttgaggtcaggagttcgagaccagcctgaccaacatggcgaaaccccatctctactaaaaatacaaaaattagcttggcatggtggtgcgtgcctgtaatcccagctactcgggaggctggggcaggagaattgcttgaacttgggagatggaggctgcagcgagccaagatcgtgccactgcactccagcctgggcaagagtttttttaagactcttaaaaaaagagcctgggcaatttttttaagactctgtcttaaaaaaaactaaaaagaaaaaaagaagccccttcactctacaggggacaggagaccatggattggaccccaaagggattgaactgcatctgcatgtctgtcctttgaacactttctctccctgcccaaaaggaaacccaaattatttgtgggatactggggaaattgtagtgaagggcttaatgtagttaataaaagttaaaagtcagtagaaaacaggtgcctcagccttcaaatggttgctttttttccattttccctcatgaatagactcaccagcattttacccccttgttataaaactgtgcagagcaagaagatgatacttatttttgaatttgtatttttaaaactagatttatagactttttttttttttaactagggcacttgcttccttcttagctaaaagcaccagctgagatttttcaggtaattttgttgttactcacttaagactggaattagaatgtttctggtatttctcatttttttccctggctatgatagaatctcatctaatcttgacatctctcctaggggaagaatatcacaggctaatagcgtggttgggggtgaagatgatagcagttattaaatcaggaatctcttttatgtatgtccttgttacattgaggttaagagacaaaatcattggcagtgcaatctctttccaggatttcgtttgctgtggcattggttatatcagagcactttaatctgaaggatgatactgtaacttgatttatctaattagcttttaattatctacagctattttattttatttaattctctcctacagtactgggaccactgtaaacttctcagatgacttgtatttttgtagtgctatgaaatttatttacatacttataaagaaaactgtatgttcacttgaactctgaaaatgtacatgtatggctggacgcggtggctcacgcctgtaatcccagcactttgggaggctgaggcgggtgaatcacttgattgaggtcaggagttcgagaccagcctggccaacatggcaaaaccccgtctctactaaaaaatacagaaattagctgggtgtggtggcagacagctgtaatctcagctgctcgggaggctgaggcacaagaatcgcttgagccagggaggtggaggttgcagtgagctgagatcacatcattgcactccagcctgggcaacgggcgagactctgtctcaaaaaaaagaaagaaagaaaaggtacatgtatatatttgtcctgcattatgttttttacttgatataaatgtatttttactgtgatagtccaagtgccctggggggcaggtgtgctctatgtggttcttcttccattggagagctggcgtagagatctgcagtgttcacaaggatgttggtttggagatgtctgctgctaggacctggggtgtgtgactcagtccatatgagagggacatctgggtggaggagtaaattcctgtgctctgaaatgccacttggtagctctggacaatgaaggacaattgactcaagggtgcctggcttctgctgctgctgggaaaaaattcagtttatagcattcctgcacctcccaaagtagataacctggaggtcattcagttaacaactgtccctgaggactcagttttgggggaggggttatctgggagaagctttagcctgttctgagccattaggagacattagtgaattggagcactggagaatcctacaaatggcctatgtctcagaagagctgggacctccttccagctgctgcagatgctgacaggccctgggaggctgctgtgctctggagaagctggagcagctcatttcttggcctagcctggctgcctcagaaagagcagtcaggacttgagggaagcatcaaattctatacccataaactgcagttggaagtcagctttttgaaatgtccagcctttgcccaattgtttcagatcatctcatgcctcaggctttggcaggtatcctgccctccatcttattccagtgtgttcacctcatcaaggcagcagagtggatgaaggagtaagtctgccctttgccatactgaacagctgtggaccccgattggtgagggctctgcatatgcctgtatgaaggagatacaggtgtgtgtgcacatgccggtatgaagaagacacaggcatgtgcttctcagttttgctaacagtgggagctcaacggggcagagggaggaaggtccatgatgctcagccacatactgtagagagaggcaatttaatgttaaatgacgcaccatcctccctcccacccttctcccagtcaactttttttctttttctagaactactaattatctctcaaggctgaaaaattaattgccttaggtggagaacttaattcctagtatccaccaaacttaactccgtatctccatatggtgtctccatatctactgtgtgagctacttaactgacgccctcttcctccaactgaaggatcgcccaacgtttttggattatagaattattatttcctgctttctttctttgggacttttgaatttctttggtttcgtttttaagaagtaacccaacatttcctacaacactaaataaaatggtacttacctttcaaaaaaaaaaaa

SEQ ID NO: 303728 - DNA, 1602 bp, Homo sapiens
gattatttatattctatagtcctgacctatgtcaggcactgtggatcacctgtgtggttacaatgggggtacactgttgtgccaccgggttttacatgtggagtaaccatggttttcagtgagcccagattgcgcccatgtcacttcagcctgggccacagagccaaaactttattccataaaaaaaaagaaagaaagaaaaggtacatgtatatatttgtcctgcattatgttttttacttgatataaatgtatttttactgtgatagtccaagtgccctggggggcaggtgtgctctatgtggttcttcttccattggagagctggcgtagagatctgcagtgttcacaaggatgttggtttggagatgtctgctgctaggacctggggtgtgtgactcagtccatatgagagggacatctgggtggaggagtaaattcctgtgctctgaaatgccacttggtagctctggacaatgaaggacaattgactcaagggtgcctggcttctgctgctgctgggaaaaaattcagtttatagcattcctgcacctcccaaagtagataacctggaggtcattcagttaacaactgtccctgaggactcagttttgggggaggggttatctgggagaagctttagcctgttctgagccattaggagacattagtgaattggagcactggagaatcctacaaatggcctatgtctcagaagagctgggacctccttccagctgctgcagatgctgacaggccctgggaggctgctgtgctctggagaagctggagcagctcatttcttggcctagcctggctgcctcagaaagagcagtcaggacttgagggaagcatcaaattctatacccataaactgcagttggaagtcagctttttgaaatgtccagcctttgcccaattgtttcagatcatctcatgcctcaggctttggcaggtatcctgccctccatcttattccagtgtgttcacctcatcaaggcagcagagtggatgaaggagtaagtctgccctttgccatactgaacagctgtggaccccgattggtgagggctctgcatatgcctgtatgaaggagatacaggtgtgtgtgcacatgccggtatgaagaagacacaggcatgtgcttctcagttttgctaacagtgggagctcaacggggcagagggaggaaggtccatgatgctcagccacatactgtagagagaggcaatttaatgttaaatgacgcaccatcctccctcccacccttctcccagtcaactttttttctttttctagaactactaattatctctcaaggctgaaaaattaattgccttaggtggagaacttaattcctagtatccaccaaacttaactccgtatctccatatggtgtctccatatctactgtgtgagctacttaactgacgccctcttcctccaactgaaggatcgcccaacgtttttggattatagaattattatttcctgctttctttctttgggacttttgaatttctttggtttcgtttttaagaagtaacccaacatttcctacaacactaaataaaatggtacttacctttcaaaaaaaaaaaa

SEQ ID NO: 303729 - DNA, 4232 bp, Homo sapiens
cgtggaggccgccagtcgcggcgatcttctcctcgcttctggagtgttatcgtcaccatgtccctaatggtctcggctggccggggcctgggggccgtgtggtccccaacccacgtgcaggtgacggtgctgcaggcgcggggcctgcgggccaagggccccgggggcacgagcgacgcgtacgcggtgatccaggtgggcaaggagaagtacgccacctccgtgtcggagcgcagcctgggcgcgcccgtgtggcgcgaggaggccaccttcgagctgccatcgctgctgtcctccggacccgcggccgccgccaccctgcagctcaccgtgctgcaccgcgcgctgctcggcctcgacaagttcctgggccgcgccgaggtggacctgcgggatctgcaccgcgaccagggccgcagaagacgcagtggtataagttgaaatccaaaccaggaaagaaggacaaggagcgaggagaaattgaggttgacatccagtttatgagaaacaacatgactgccagcatgtttgacctttctatgaaagacaagtctcggaatccatttggaaagctgaaggacaagatcaaggggaagaataaggacagtgggtcagacaccgcctccgccatcatccctagcacgacaccttcggtcgacagtgatgatgagtctgtggttaaagacaagaaaaagaaatcaaagatcaagaccttactttccaagtcaaatttgcagaagacgcctctttcccagtccatgtctgtcctgccgacttcaaagccagaaaaagtgctgcttcgtcccggagactttcagtcccagtgggatgaagatgacaatgaggatgagtcctcctcggcctcggatgtcatgtctcacaagagaacagcgagtacggatcttaagcaactgaaccaggtcaactttacccttcccaagaaggaaggactttcctttcttggtggccttcggtctaagaatgatgtcctttcccgctctaatgtctgcatcaatgggaaccatgtttacctggagcagccagaagccaagggtgagatcaaggatagcagcccgtcctcctccccatcccccaagggcttcagaaagaagcatttgttctcttctacagagaacctggcggctgggtcttggaaggagcctgctgaaggaggtgggctgtcttctgacaggcagctctccgaatcttccaccaaggactccttgaagtctatgaccctgccgtcctaccgacctgccccactggtcagtggggacctcagggaaaacatggcccccgcaaactcagaggccacaaaagaagctaaggagagcaagaagccagagagcaggaggtcctctttgctgtctctgatgacggggaagaaggatgtggctaagggcagtgaaggtgaaaaccctctcacggtcccagggagggagaaggaaggcatgctgatgggggttaagccgggggaggacgcatcggggcctgctgaagaccttgtgagaagatctgagaaagatactgcagctgttgtctccagacagggcagctccctgaacctctttgaagatgtgcagatcacagaaccagaagctgagccagagtccaagtctgaaccgagacctccaatttcctctccgagggctccccagaccagagctgtcaagccccgacttcatcctgtgaagccaatgaatgccacggccaccaaggttgctaactgcagcttgggaactgccaccatcatcagtgagaacttgaacaatgaggtcatgatgaagaaatacagcccctcggaccctgcatttgcatatgcgcagctgacccacgatgagctgattcagctggtcctcaaacagaaggaaacgataagcaagaaggagttccaggtccgcgagctggaagactacattgacaacctgcttgtcagggtcatggaagaaacccccaatatcctccgcatcccgactcaggttggcaaaaaagcaggaaagatgtaaatcagcagaaaaaaaacaccgagacgtttctgtgacttcactttcacctgctccaggggtcaaggacttgccttgcctgataaccagccagcaggctccgaatcaccatctccctcacatgttatccggcaagagtgaattctaccaatggaagccaggttaatgattacaattaatcttttactgtacattcccaaggctttagttttaaatgccactgtgcctttaacaaggttgtaaatattttatgcccaccagagatgtggtcataagatctgatcctgagccagagattcagatggcacaggaagtattcatgtattttaacactggggttttctttctttcatactgagattttttttcagtatgtatcctccagctcttaaagcttacctgagaaagctttaaatgagaaaaggaccatgcgattggtgctgtgttacatacacatactttcttggcttctgagtagctcaggtgtggcttttggctgcagatgttaaattttgataccatgtaaacctacccagcttctcagacttgggtcttgttttttgatgggaacagaggtgtttagagaaagcctctgagtatgcctttcagattttgaacaagcggccttttctaaacatcgacttctactactctctagccttaaaataccttctgcttagatccagggcccttctactggagataggaaaagtagaattcaggaattaaaagaattactctttattcaatttgaggaacttggtgaaagcccctcctcttatgacagccaggttcctgctggctagaccagcctattcagcgctttgctaggggattgggtggtccacgcactcgctaatacagttctccaggtgtggaatgatgtcaatacgattgcttggccttttccccctgtgcctttgctcggtgctctggtttcctcagcaacactccttgtaaggggcagagacagggtccaccaactccccaagatgaagaagccccttcaggccagtcgtggtggctcatgcctgtaatcccagcactttgcaaggccgaggagggtggatcacttgaggtcaggagttcgagaccagcctgaccaacatggcgaaaccccatctctactaaaaatacaaaaattagcttggcatggtggtgcgtgcctgtaatcccagctactcgggaggctggggcaggagaattgcttgaacttgggagatggaggctgcagcgagccaagatcgtgccactgcactccagcctgggcaagagtttttttaagactcttaaaaaaagagcctgggcaatttttttaagactctgtcttaaaaaaaactaaaaagaaaaaaagaagccccttcactctacaggggacaggagaccatggattggaccccaaagggattgaactgcatctgcatgtctgtcctttgaacactttctctccctgcccaaaaggaaacccaaattatttgtgggatactggggaaattgtagtgaagggcttaatgtagttaataaaagttaaaagtcagtagaaaacaggtgcctcagccttcaaatggttgctttttttccattttccctcatgaatagactcaccagcattttacccccttgttataaaactgtgcagagcaagaagatgatacttatttttgaatttgtatttttaaaactagatttatagactttttttttttttaactagggcacttgcttccttcttagctaaaagcaccagctgagatttttcaggtaattttgttgttactcacttaagactggaattagaatgtttctggtatttctcatttttttccctggctatgatagaatctcatctaatcttgacatctctcctaggggaagaatatcacaggctaatagcgtggttgggggtgaagatgatagcagttattaaatcaggaatctcttttatgtatgtccttgttacattgaggttaagagacaaaatcattggcagtgcaatctctttccaggatttcgtttgctgtggcattggttatatcagagcactttaatctgaaggatgatactgtaacttgatttatctaattagcttttaattatctacagctattttattttatttaattctctcctacagtactgggaccactgtaaacttctcagatgacttgtatttttgtagtgctatgaaatttatttacatacttataaagaaaactgtatgttcacttg

SEQ ID NO: 303730 - DNA, 232 bp, Homo sapiens
aaagaaagaaagaaagaaagaaaatggattcccaagagacccagatcactagtcactttttcctcctttgtacttcttttaggttttaggtttctgtgctaattttataactcctttttcccaactatttccccccctccaaagaaatacagcccctcggaccctgcatttgcatatgcgcagctgacccacgatgagctgattcagctggtcctcaaacagaaggaaacga

SEQ ID NO: 303731 - DNA, 315 bp, Homo sapiens
aaggtgaaaaccctctcacggtcccagggagggagaaggaaggcatgctgatgggggttaagccgggggaggacgcatcggggcctgctgaagaccttgtgagaagatctgagaaagatactgcagctgttgtctccagacagggcagctccctgaacctctttgaagatgtgcagatcacagaaccagaagctgagccagagtccaagtctgaaccgagacctccaatttcctctccgagggctccccagaccagagctgtcaagccccggtgagttttggctcttctagtgcagggcatttctgccttgccat

SEQ ID NO: 303732 - DNA, 5961 bp, Homo sapiens
cgtggaggccgccagtcgcggcgatcttctcctcgcttctggagtgttatcgtcaccatgtccctaatggtctcggctggccggggcctgggggccgtgtggtccccaacccacgtgcaggtgacggtgctgcaggcgcggggcctgcgggccaagggccccgggggcacgagcgacgcgtacgcggtgatccaggtgggcaaggagaagtacgccacctccgtgtcggagcgcagcctgggcgcgcccgtgtggcgcgaggaggccaccttcgagctgccatcgctgctgtcctccggacccgcggccgccgccaccctgcagctcaccgtgctgcaccgcgcgctgctcggcctcgacaagttcctgggccgcgccgaggtggacctgcgggatctgcaccgcgaccagggccgcagaagacgcagtggtataagttgaaatccaaaccaggaaagaaggacaaggagcgaggagaaattgaggttgacatccagtttatgagaaacaacatgactgccagcatgtttgacctttctatgaaagacaagtctcggaatccatttggaaagctgaaggacaagatcaaggggaagaataaggacagtgggtcagacaccgcctccgccatcatccctagcacgacaccttcggtcgacagtgatgatgagtctgtggttaaagacaagaaaaagaaatcaaagatcaagaccttactttccaagtcaaatttgcagaagacgcctctttcccagtccatgtctgtcctgccgacttcaaagccagaaaaagtgctgcttcgtcccggagactttcagtcccagtgggatgaagatgacaatgaggatgagtcctcctcggcctcggatgtcatgtctcacaagagaacagcgagtacggatcttaagcaactgaaccaggtcaactttacccttcccaagaaggaaggactttcctttcttggtggccttcggtctaagaatgatgtcctttcccgctctaatgtctgcatcaatgggaaccatgtttacctggagcagccagaagccaagggtgagatcaaggatagcagcccgtcctcctccccatcccccaagggcttcagaaagaagcatttgttctcttctacagagaacctggcggctgggtcttggaaggagcctgctgaaggaggtgggctgtcttctgacaggcagctctccgaatcttccaccaaggactccttgaagtctatgaccctgccgtcctaccgacctgccccactggtcagtggggacctcagggaaaacatggcccccgcaaactcagaggccacaaaagaagctaaggagagcaagaagccagagagcaggaggtcctctttgctgtctctgatgacggggaagaaggatgtggctaagggcagtgaaggtgaaaaccctctcacggtcccagggagggagaaggaaggcatgctgatgggggttaagccgggggaggacgcatcggggcctgctgaagaccttgtgagaagatctgagaaagatactgcagctgttgtctccagacagggcagctccctgaacctctttgaagatgtgcagatcacagaaccagaagctgagccagagtccaagtctgaaccgagacctccaatttcctctccgagggctccccagaccagagctgtcaagccccgacttcatcctgtgaagccaatgaatgccacggccaccaaggttgctaactgcagcttgggaactgccaccatcatcagtgagaacttgaacaatgaggtcatgatgaagaaatacagcccctcggaccctgcatttgcatatgcgcagctgacccacgatgagctgattcagctggtcctcaaacagaaggaaacgataagcaagaaggagttccaggtccgcgagctggaagactacattgacaacctgcttgtcagggtcatggaagaaacccccaatatcctccgcatcccgactcaggttggcaaaaaagcaggaaagatgtaaatcagcagaaaaaaaacaccgagacgtttctgtgacttcactttcacctgctccaggggtcaaggacttgccttgcctgataaccagccagcaggctccgaatcaccatctccctcacatgttatccggcaagagtgaattctaccaatggaagccaggttaatgattacaattaatcttttactgtacattcccaaggctttagttttaaatgccactgtgcctttaacaaggttgtaaatattttatgcccaccagagatgtggtcataagatctgatcctgagccagagattcagatggcacaggaagtattcatgtattttaacactggggttttctttctttcatactgagattttttttcagtatgtatcctccagctcttaaagcttacctgagaaagctttaaatgagaaaaggaccatgcgattggtgctgtgttacatacacatactttcttggcttctgagtagctcaggtgtggcttttggctgcagatgttaaattttgataccatgtaaacctacccagcttctcagacttgggtcttgttttttgatgggaacagaggtgtttagagaaagcctctgagtatgcctttcagattttgaacaagcggccttttctaaacatcgacttctactactctctagccttaaaataccttctgcttagatccagggcccttctactggagataggaaaagtagaattcaggaattaaaagaattactctttattcaatttgaggaacttggtgaaagcccctcctcttatgacagccaggttcctgctggctagaccagcctattcagcgctttgctaggggattgggtggtccacgcactcgctaatacagttctccaggtgtggaatgatgtcaatacgattgcttggccttttccccctgtgcctttgctcggtgctctggtttcctcagcaacactccttgtaaggggcagagacagggtccaccaactccccaagatgaagaagccccttcaggccagtcgtggtggctcatgcctgtaatcccagcactttgcaaggccgaggagggtggatcacttgaggtcaggagttcgagaccagcctgaccaacatggcgaaaccccatctctactaaaaatacaaaaattagcttggcatggtggtgcgtgcctgtaatcccagctactcgggaggctggggcaggagaattgcttgaacttgggagatggaggctgcagcgagccaagatcgtgccactgcactccagcctgggcaagagtttttttaagactcttaaaaaaagagcctgggcaatttttttaagactctgtcttaaaaaaaactaaaaagaaaaaaagaagccccttcactctacaggggacaggagaccatggattggaccccaaagggattgaactgcatctgcatgtctgtcctttgaacactttctctccctgcccaaaaggaaacccaaattatttgtgggatactggggaaattgtagtgaagggcttaatgtagttaataaaagttaaaagtcagtagaaaacaggtgcctcagccttcaaatggttgctttttttccattttccctcatgaatagactcaccagcattttacccccttgttataaaactgtgcagagcaagaagatgatacttatttttgaatttgtatttttaaaactagatttatagactttttttttttttaactagggcacttgcttccttcttagctaaaagcaccagctgagatttttcaggtaattttgttgttactcacttaagactggaattagaatgtttctggtatttctcatttttttccctggctatgatagaatctcatctaatcttgacatctctcctaggggaagaatatcacaggctaatagcgtggttgggggtgaagatgatagcagttattaaatcaggaatctcttttatgtatgtccttgttacattgaggttaagagacaaaatcattggcagtgcaatctctttccaggatttcgtttgctgtggcattggttatatcagagcactttaatctgaaggatgatactgtaacttgatttatctaattagcttttaattatctacagctattttattttatttaattctctcctacagtactgggaccactgtaaacttctcagatgacttgtatttttgtagtgctatgaaatttatttacatacttataaagaaaactgtatgttcacttgaactctgaaaatgtacatgtatggctggacgcggtggctcacgcctgtaatcccagcactttgggaggctgaggcgggtgaatcacttgattgaggtcaggagttcgagaccagcctggccaacatggcaaaaccccgtctctactaaaaaatacagaaattagctgggtgtggtggcagacagctgtaatctcagctgctcgggaggctgaggcacaagaatcgcttgagccagggaggtggaggttgcagtgagctgagatcacatcattgcactccagcctgggcaacgggcgagactctgtctcaaaaaaaagaaagaaagaaaaggtacatgtatatatttgtcctgcattatgttttttacttgatataaatgtatttttactgtgatagtccaagtgccctggggggcaggtgtgctctatgtggttcttcttccattggagagctggcgtagagatctgcagtgttcacaaggatgttggtttggagatgtctgctgctaggacctggggtgtgtgactcagtccatatgagagggacatctgggtggaggagtaaattcctgtgctctgaaatgccacttggtagctctggacaatgaaggacaattgactcaagggtgcctggcttctgctgctgctgggaaaaaattcagtttatagcattcctgcacctcccaaagtagataacctggaggtcattcagttaacaactgtccctgaggactcagttttgggggaggggttatctgggagaagctttagcctgttctgagccattaggagacattagtgaattggagcactggagaatcctacaaatggcctatgtctcagaagagctgggacctccttccagctgctgcagatgctgacaggccctgggaggctgctgtgctctggagaagctggagcagctcatttcttggcctagcctggctgcctcagaaagagcagtcaggacttgagggaagcatcaaattctatacccataaactgcagttggaagtcagctttttgaaatgtccagcctttgcccaattgtttcagatcatctcatgcctcaggctttggcaggtatcctgccctccatcttattccagtgtgttcacctcatcaaggcagcagagtggatgaaggagtaagtctgccctttgccatactgaacagctgtggaccccgattggtgagggctctgcatatgcctgtatgaaggagatacaggtgtgtgtgcacatgccggtatgaagaagacacaggcatgtgcttctcagttttgctaacagtgggagctcaacggggcagagggaggaaggtccatgatgctcagccacatactgtagagagaggcaatttaatgttaaatgacgcaccatcctccctcccacccttctcccagtcaactttttttctttttctagaactactaattatctctcaaggctgaaaaattaattgccttaggtggagaacttaattcctagtatccaccaaacttaactccgtatctccatatggtgtctccatatctactgtgtgagctacttaactgacgccctcttcctccaactgaaggatcgcccaacgtttttggattatagaattattatttcctgctttctttctttgggacttttgaatttctttggtttcgtttttaagaagtaacccaacatttcctacaacactaaataaaatggtacttacctttcaaaaaaaaaaaa

SEQ ID NO: 303733 - DNA, 5907 bp, Homo sapiens
cgtggaggccgccagtcgcggcgatcttctcctcgcttctggagtgttatcgtcaccatgtccctaatggtctcggctggccggggcctgggggccgtgtggtccccaacccacgtgcaggtgacggtgctgcaggcgcggggcctgcgggccaagggccccgggggcacgagcgacgcgtacgcggtgatccaggtgggcaaggagaagtacgccacctccgtgtcggagcgcagcctgggcgcgcccgtgtggcgcgaggaggccaccttcgagctgccatcgctgctgtcctccggacccgcggccgccgccaccctgcagctcaccgtgctgcaccgcgcgctgctcggcctcgacaagttcctgggccgcgccgaggtggacctgcgggatctgcaccgcgaccagggccgcagaagacgcagtggtataagttgaaatccaaaccaggaaagaaggacaaggagcgaggagaaattgaggttgacatccagtttatgagaaacaacatgactgccagcatgtttgacctttctatgaaagacaagtctcggaatccatttggaaagctgaaggacaagatcaaggggaagaataaggacagtgggtcagacaccgcctccgccatcatccctagcacgacaccttcggtcgacagtgatgatgagtctgtggttaaagacaagaaaaagaaatcaaagatcaagaccttactttccaagtcaaatttgcagaagacgcctctttcccagtccatgtctgtcctgccgacttcaaagccagaaaaagtgctgcttcgtcccggagactttcagtcccagtgggatgaagatgacaatgaggatgagtcctcctcggcctcggatgtcatgtctcacaagagaacagcgagtacggatcttaagcaactgaaccaggtcaactttacccttcccaagaaggaaggactttcctttcttggtggccttcggtctaagaatgatgtcctttcccgctctaatgtctgcatcaatgggaaccatgtttacctggagcagccagaagccaagggtgagatcaaggatagcagcccgtcctcctccccatcccccaagggcttcagaaagaagcatttgttctcttctacagagaacctggcggctgggtcttggaaggagcctgctgaaggaggtgggctgtcttctgacaggcagctctccgaatcttccaccaaggactccttgaagtctatgaccctgccgtcctaccgacctgccccactggtcagtggggacctcagggaaaacatggcccccgcaaactcagaggccacaaaagaagctaaggagagcaagaagccagagagcaggaggtcctctttgctgtctctgatgacggggaagaaggatgtggctaagggcagtgaaggtgaaaaccctctcacggtcccagggagggagaaggaaggcatgctgatgggggttaagccgggggaggacgcatcggggcctgctgaagaccttgtgagaagatctgagaaagatactgcagctgttgtctccagacagggcagctccctgaacctctttgaagatgtgcagatcacagaaccagaagctgagccagagtccaagtctgaaccgagacctccaatttcctctccgagggctccccagaccagagctgtcaagccccgacttcatcctgtgaagccaatgaatgccacggccaccaaggttgctaactgcagcttgggaactgccaccatcatcagtgagaacttgaacaatgaggtcatgatgaagaaatacagcccctcggaccctgcatttgcatatgcgcagctgacccacgatgagctgattcagctggtcctcaaacagaaggaaacgataagcaagaaggagttccaggtccgcgagctggaagactacattgacaacctgcttgtcagggtcatggaagaaacccccaatatcctccgcatcccgactcaggttggcaaaaaagcaggaaagatgtaaatcagcagaaaaaaaacaccgagacgtttctgtgacttcactttcacctgctccaggggtcaaggacttgccttgcctgataaccagccagcaggctccgaatcaccatctccctcacatgttatccggcaagagtgaattctaccaatggaagccaggttaatgattacaattaatcttttactgtacattcccaaggctttagttttaaatgccactgtgcctttaacaaggttgtaaatattttatgcccaccagagatgtggtcataagatctgatcctgagccagagattcagatggcacaggaagtattcatgtattttaacactggggttttctttctttcatactgagattttttttcagtatgtatcctccagctcttaaagcttacctgagaaagctttaaatgagaaaaggaccatgcgattggtgctgtgttacatacacatactttcttggcttctgagtagctcaggtgtggcttttggctgcagatgttaaattttgataccatgtaaacctacccagcttctcagacttgggtcttgttttttgatgggaacagaggtgtttagagaaagcctctgagtatgcctttcagattttgaacaagcggccttttctaaacatcgacttctactactctctagccttaaaataccttctgcttagatccagggcccttctactggagataggaaaagtagaattcaggaattaaaagaattactctttattcaatttgaggaacttggtgaaagcccctcctcttatgacagccaggttcctgctggctagaccagcctattcagcgctttgctaggggattgggtggtccacgcactcgctaatacagttctccaggtgtggaatgatgtcaatacgattgcttggccttttccccctgtgcctttgctcggtgctctggtttcctcagcaacactccttgtaaggggcagagacagggtccaccaactccccaagatgaagaagccccttcaggccagtcgtggtggctcatgcctgtaatcccagcactttgcaaggccgaggagggtggatcacttgaggtcaggagttcgagaccagcctgaccaacatggcgaaaccccatctctactaaaaatacaaaaattagcttggcatggtggtgcgtgcctgtaatcccagctactcgggaggctggggcaggagaattgcttgaacttgggagatggaggctgcagcgagccaagatcgtgccactgcactccagcctgggcaagagtttttttaagactcttaaaaaaagagcctgggcaatttttttaagactctgtcttaaaaaaaactaaaaagaaaaaaagaagccccttcactctacaggggacaggagaccatggattggaccccaaagggattgaactgcatctgcatgtctgtcctttgaacactttctctccctgcccaaaaggaaacccaaattatttgtgggatactggggaaattgtagtgaagggcttaatgtagttaataaaagttaaaagtcagtagaaaacaggtgcctcagccttcaaatggttgctttttttccattttccctcatgaatagactcaccagcattttacccccttgttataaaactgtgcagagcaagaagatgatacttatttttgaatttgtatttttaaaactagatttatagactttttttttttttaactagggcacttgcttccttcttagctaaaagcaccagctgagatttttcaggtaattttgttgttactcacttaagactggaattagaatgtttctggtatttctcatttttttccctggctatgatagaatctcatctaatcttgacatctctcctaggggaagaatatcacaggctaatagcgtggttgggggtgaagatgatagcagttattaaatcaggaatctcttttatgtatgtccttgttacattgaggttaagagacaaaatcattggcagtgcaatctctttccaggatttcgtttgctgtggcattggttatatcagagcactttaatctgaaggatgatactgtaacttgatttatctaattagcttttaattatctacagctattttattttatttaattctctcctacagtactgggaccactgtaaacttctcagatgacttgtatttttgtagtgctatgaaatttatttacatacttataaagaaaactgtatgttcacttgaactctgaaaatgtacatgtatggctggacgcggtggctcacgcctgtaatcccagcactttgggaggctgaggcgggtgaatcacttgattgaggtcaggagttcgagaccagcctggccaacatggcaaaaccccgtctctactaaaaaatacagaaattagctgggtgtggtggcagacagctgtaatctcagctgctcgggaggctgaggcacaagaatcgcttgagccagggaggtggaggttgcagtgagctgagatcacatcattgcactccagcctgggcaacgggcgagactctgtctcaaaaaaaagaaagaaagaaaaggtacatgtatatatttgtcctgcattatgttttttacttgatataaatgtatttttactgtgatagtccaagtgccctggggggcaggtgtgctctatgtggttcttcttccattggagagctggcgtagagatctgcagtgttcacaaggatgttggtttggagatgtctgctgctaggacctggggtgtgtgactcagtccatatgagagggacatctgggtggaggagtaaattcctgtgctctgaaatgccacttggtagctctggacaatgaaggacaattgactcaagggtgcctggcttctgctgctgctgggaattcagttaacaactgtccctgaggactcagttttgggggaggggttatctgggagaagctttagcctgttctgagccattaggagacattagtgaattggagcactggagaatcctacaaatggcctatgtctcagaagagctgggacctccttccagctgctgcagatgctgacaggccctgggaggctgctgtgctctggagaagctggagcagctcatttcttggcctagcctggctgcctcagaaagagcagtcaggacttgagggaagcatcaaattctatacccataaactgcagttggaagtcagctttttgaaatgtccagcctttgcccaattgtttcagatcatctcatgcctcaggctttggcaggtatcctgccctccatcttattccagtgtgttcacctcatcaaggcagcagagtggatgaaggagtaagtctgccctttgccatactgaacagctgtggaccccgattggtgagggctctgcatatgcctgtatgaaggagatacaggtgtgtgtgcacatgccggtatgaagaagacacaggcatgtgcttctcagttttgctaacagtgggagctcaacggggcagagggaggaaggtccatgatgctcagccacatactgtagagagaggcaatttaatgttaaatgacgcaccatcctccctcccacccttctcccagtcaactttttttctttttctagaactactaattatctctcaaggctgaaaaattaattgccttaggtggagaacttaattcctagtatccaccaaacttaactccgtatctccatatggtgtctccatatctactgtgtgagctacttaactgacgccctcttcctccaactgaaggatcgcccaacgtttttggattatagaattattatttcctgctttctttctttgggacttttgaatttctttggtttcgtttttaagaagtaacccaacatttcctacaacactaaataaaatggtacttacctttcaaaaaaaaaaaa

SEQ ID NO: 303734 - DNA, 2046 bp, Homo sapiens
cgtggaggccgccagtcgcggcgatcttctcctcgcttctggagtgttatcgtcaccatgtccctaatggtctcggctggccggggcctgggggccgtgtggtccccaacccacgtgcaggtgacggtgctgcaggcgcggggcctgcgggccaagggccccgggggcacgagcgacgcgtacgcggtgatccaggtgggcaaggagaagtacgccacctccgtgtcggagcgcagcctgggcgcgcccgtgtggcgcgaggaggccaccttcgagctgccatcgctgctgtcctccggacccgcggccgccgccaccctgcagctcaccgtgctgcaccgcgcgctgctcggcctcgacaagttcctgggccgcgccgaggtggacctgcgggatctgcaccgcgaccagggccgcagaagacgcagtggtataagttgaaatccaaaccaggaaagaaggacaaggagcgaggagaaattgaggttgacatccagtttatgagaaacaacatgactgccagcatgtttgacctttctatgaaagacaagtctcggaatccatttggaaagctgaaggacaagatcaaggggaagaataaggacagtgggtcagacaccgcctccgccatcatccctagcacgacaccttcggtcgacagtgatgatgagtctgtggttaaagacaagaaaaagaaatcaaagatcaagaccttactttccaagtcaaatttgcagaagacgcctctttcccagtccatgtctgtcctgccgacttcaaagccagaaaaagtgctgcttcgtcccggagactttcagtcccagtgggatgaagatgacaatgaggatgagtcctcctcggcctcggatgtcatgtctcacaagagaacagcgagtacggatcttaagcaactgaaccaggtcaactttacccttcccaagaaggaaggactttcctttcttggtggccttcggtctaagaatgatgtcctttcccgctctaatgtctgcatcaatgggaaccatgtttacctggagcagccagaagccaagggtgagatcaaggatagcagcccgtcctcctccccatcccccaagggcttcagaaagaagcatttgttctcttctacagagaacctggcggctgggtcttggaaggagcctgctgaaggaggtgggctgtcttctgacaggcagctctccgaatcttccaccaaggactccttgaagtctatgaccctgccgtcctaccgacctgccccactggtcagtggggacctcagggaaaacatggcccccgcaaactcagaggccacaaaagaagctaaggagagcaagaagccagagagcaggaggtcctctttgctgtctctgatgacggggaagaaggatgtggctaagggcagtgaaggtgaaaaccctctcacggtcccagggagggagaaggaaggcatgctgatgggggttaagccgggggaggacgcatcggggcctgctgaagaccttgtgagaagatctgagaaagatactgcagctgttgtctccagacagggcagctccctgaacctctttgaagatgtgcagatcacagaaccagaagctgagccagagtccaagtctgaaccgagacctccaatttcctctccgagggctccccagaccagagctgtcaagccccgacttcatcctgtgaagccaatgaatgccacggccaccaaggttgctaactgcagcttgggaactgccaccatcatcagtgagaacttgaacaatgaggtcatgatgaaggtatgtcctctgagaagctggtgtgttcgttagggattgacagaacacccgtttccatagtcaccatcgtatacctctccctgggcagccggtggtgcaggaacacttagtcatacatcttgagtctttgagtaaactttggaagcccccagacattccattggataattactttattcccttatacttgtttagttatggtaaatttttttttttgtctcaagcaacatagagagatcccgtctctatggggaaaaaa

SEQ ID NO: 303735 - DNA, 397 bp, Homo sapiens
ttcccgaagagaaagcatgagaatgcatgcattgaagaggctgctggtagcagagaggagaggccagttcatggggattgtgaacattgttgcagttgcttccattcaaaggtaactcctcagcctttctcctttcaggtggtataagttgaaatccaaaccaggaaagaaggacaaggagcgaggagaaattgaggttgacatccagtttatgagaaacaacatgactgccagcatgtttgacctttctatgaaagacaagtctcggaatccatttggaaagctgaaggacaagatcaaggggaagaataaggacagtgggtcagacaccgcctccgccatcatccctagcacgacaccttcggtcgacagtgatgatgagtctgtggttaaagac

SEQ ID NO: 303736 - DNA, 984 bp, Homo sapiens
gtttgtgttgctccttttcgtctgcttctggccttttgaagatgattatatttatttttttgtggactacttgactgtgaggacccacaggtggacaaaagcaggcttgtaaatcgtcggcagtaattacggtctaggtacgaggctgggtgttcgggtgaacaggacccgtcgccatgggccgtgtgatccgtggacagaggaagggcgccgggtctgtgttccgcgcgcacgtgaagcaccgtaaaggcgctgcgcgcctgcgcgccgtggatttcgctgagcggcacggctacatcaagggcatcgtcaaggacatcatccacgacccgggccgcggcgcgcccctcgccaaggtggtcttccgggatccgtatcggtttaagaagcggacggagctgttcattgccgccgagggcattcacacgggccagtttgtgtattgcggcaagaaggcccagctcaacattggcaatgtgctccctgtgggcaccatgcctgagggtacaatcgtgtgctgcctggaggagaagcctggagaccgtggcaagctggcccgggcatcagggaactatgccaccgttatctcccacaaccctgagaccaagaagacccgtgtgaagctgccctccggctccaagaaggttatctcctcagccaacagagctgtggttggtgtggtggctggaggtggccgaattgacaaacccatcttgaaggctggccgggcgtaccacaaatataaggcaaagaggaactgctggccacgagtacggggtgtggccatgaatcctgtggagcatccttttggaggtggcaaccaccagcacatcggcaagccctccaccatccgcagagatgcccctgctggccgcaaagtgggtctcattgctgcccgccggactggacgtctccggggaaccaagactgtgcaggagaaagagaactagtgctgagggcctcaataaagtttgtgtttatgcc

SEQ ID NO: 303737 - DNA, 1051 bp, Homo sapiens
gtttgtgttgctccttttcgtctgcttctggccttttgaagatgattatatttatttttttgtggactacttgactgtgaggacccacaggtggacaaaagcaggcttgtaaatcgtcggcagtaattacggtctaggtacgaggctgggtgttcgggtgaacaggacccgtcgccatgggccgtgtgatccgtggacagaggaagggcgccgggtctgtgttccgcgcgcacgtgaagcaccgtaaaggcgctgcgcgcctgcgcgccgtggatttcgctgagcggcacggctacatcaagggcatcgtcaaggacatcatccacgacccgggccgcggcgcgcccctcgccaaggtggtcttccgggatccgtatcggtttaagaagcggacggagctgttcattgccgccgagggcattcacacgggccagtttgtgtattgcggcaagaaggcccagctcaacattggcaatgtgctccctgtgggcaccatgcctgagggtacaatcgtgtgctgcctggaggagaagcctggagaccgtggcaagctggcccgggcatcagggaactatgccaccgttatctcccacaaccctgagaccaagaagacccgtgtgaagctgccctccggctccaagaaggttatctcctcagccaacagagctgtggttggtgtggtggctggaggtggccgaattgacaaacccatcttgaaggctggccgggcgtaccacaaatataaggcaaagaggaactgctggccacgagtacggggtgtggccatgaatcctgtggagcatccttttggaggtggcaaccaccagcacatcggcaagccctccaccatccgcagagatgcccctgctggccgcaaagtgggtctcattgctgcccgccggactggacgtctccggggaaccaagactgtgcaggagaaagagaactagtgctgagggcctcaataaagtttgtgtttatgccaaaacaaccaaaccctaccaaagtcacacaccaaacagtaccgcagcctgcaaaagaggggcggcgc

SEQ ID NO: 303738 - DNA, 1064 bp, Homo sapiens
gtttgtgttgctccttttcgtctgcttctggccttttgaagatgattatatttatttttttgtggactacttgactgtgaggacccacaggtggacaaaagcaggcttgtaaatcgtcggcagtaattacggtctaggtacgaggctgggtgttcgggtgaacaggacccgtcgccatgggccgtgtgatccgtggacagaggaagggcgccgggtctgtgttccgcgcgcacgtgaagcaccgtaaaggcgctgcgcgcctgcgcgccgtggatttcgctgagcggcacggctacatcaagggcatcgtcaaggacatcatccacgacccgggccgcggcgcgcccctcgccaaggtggtcttccgggatccgtatcggtttaagaagcggacggagctgttcattgccgccgagggcattcacacgggccagtttgtgtattgcggcaagaaggcccagctcaacattggcaatgtgctccctgtgggcaccatgcctgagggtacaatcgtgtgctgcctggaggagaagcctggagaccgtggcaagctggcccgggcatcagggaactatgccaccgttatctcccacaaccctgagaccaagaagacccgtgtgaagctgccctccggctccaagaaggttatctcctcagccaacagagctgtggttggtgtggtggctggaggtggccgaattgacaaacccatcttgaaggctggccgggcgtaccacaaatataaggcaaagaggaactgctggccacgagtacggggtgtggccatgaatcctgtggagcatccttttggaggtggcaaccaccagcacatcggcaagccctccaccatccgcagagatgcccctgctggccgcaaagtgggtctcattgctgcccgccggactggacgtctccggggaaccaagactgtgcaggagaaagagaactagtgctgagggctcaataagttgggttatgccaaaaaaaacaaaagacaaaacaaaaaggggcgcggaaagatacccgagggcaagacaccgctccccggtcggacaggggcccag

SEQ ID NO: 303739 - DNA, 1089 bp, Homo sapiens
gtttgtgttgctccttttcgtctgcttctggccttttgaagatgattatatttatttttttgtggactacttgactgtgaggacccacaggtggacaaaagcaggcttgtaaatcgtcggcagtaattacggtctaggtacgaggctgggtgttcgggtgaacaggacccgtcgccatgggccgtgtgatccgtggacagaggaagggcgccgggtctgtgttccgcgcgcacgtgaagcaccgtaaaggcgctgcgcgcctgcgcgccgtggatttcgctgagcggcacggctacatcaagggcatcgtcaaggacatcatccacgacccgggccgcggcgcgcccctcgccaaggtggtcttccgggatccgtatcggtttaagaagcggacggagctgttcattgccgccgagggcattcacacgggccagtttgtgtattgcggcaagaaggcccagctcaacattggcaatgtgctccctgtgggcaccatgcctgagggtacaatcgtgtgctgcctggaggagaagcctggagaccgtggcaagctggcccgggcatcagggaactatgccaccgttatctcccacaaccctgagaccaagaagacccgtgtgaagctgccctccggctccaagaaggttatctcctcagccaacagagctgtggttggtgtggtggctggaggtggccgaattgacaaacccatcttgaaggctggccgggcgtaccacaaatataaggcaaagaggaactgctggccacgagtacggggtgtggccatgaatcctgtggagcatccttttggaggtggcaaccaccagcacatcggcaagccctccaccatccgcagagatgcccctgctggccgcaaagtgggtctcattgctgcccgccggactggacgtctccggggaaccaagactgtgcaggagaaagagaactagtgctgagggcctcaataaagtttgtgtttatgcccaaaaaaaaaacaaaaaacaacccggttcttgggcggaaagaatcaagggctgtctctgtccccccctttcaaggaaaccgcgccacagggtttcagcaacacac

SEQ ID NO: 303740 - DNA, 1018 bp, Homo sapiens
  misc_feature (5)..(6): n is a, c, g, or t
  misc_feature (22)..(22): n is a, c, g, or t
aaatnnggctaggtacgaggcngggtgttgaatcggccgaggcaggacccgtcgccatgggccgtgtgatccgtggacagaggaagggcgccgggtctgtgttccgcgcgcacgtgaagcaccgtaaaggcgctgcgcgcctgcgcgccgtggatttcgctgagcggcacggctacatcaagggcatcgtcaaggacatcatccacgacccgggccgcggcgcgcccctcgccaaggtggtcttccgggatccgtatcggtttaagaagcggacggagctgttcattgccgccgagggcattcacacgggccagtttgtgtattgcggcaagaaggcccagctcaacattggcaatgtgctccctgtgggcaccatgcctgagggtacaatcgtgtgctgcctggaggagaagcctggagaccgtggcaagctggcccgggcatcagggaactatgccaccgttatctcccacaaccctgagaccaagaagacccgtgtgaagctgccctccggctccaagaaggttatctcctcagccaacagagctgtggttggtgtggtggctggaggtggccgaattgacaaacccatcttgaaggctggccgggcgtaccacaaatataaggcaaagaggaactgctggccacgagtacggggtgtggccatgaatcctgtggagcatccttttggaggtggcaaccaccagcacatcggcaagccctccaccatccgcagagatgcccctgctggccgcaaagtgggtctcattgctgcccgccggactggacgtctccggggaaccaagactgtgcaggagaaagagaactagtgctgagggcctcaataagttggtgtttatgccagaaagaaaaaaaaaaaaaaaaaccgggggacacatcaatgggggggggaaaaagggtaaaaaaggcgccacgtgcaaaggggtccggcaccccttttttgtcacacaggggagaatcggagcgccccaaaaggggcgaaaatcaaagccggacc

SEQ ID NO: 303741 - DNA, 1006 bp, Homo sapiens
  misc_feature (865)..(865): n is a, c, g, or t
accacgcgtcgcggacgcgtgggtcgacccacgcgtccggaacaggacccgtcgccatgggccgtgtgatccgtggacagaggaagggcgccgggtctgtgttccgcgcgcacgtgaagcaccgtaaaggcgctgcgcgcctgcgcgccgtggatttcgctgagcggcacggctacatcaagggcatcgtcaaggacatcatccacgacccgggccgcggcgcgcccctcgccaaggtggtcttccgggatccgtatcggtttaagaagcggacggagctgttcattgccgccgagggcattcacacgggccagtttgtgtattgcggcaagaaggcccagctcaacattggcaatgtgctccctgtgggcaccatgcctgagggtacaatcgtgtgctgcctggaggagaagcctggagaccgtggcaagctggcccgggcatcagggaactatgccaccgttatctcccacaaccctgagaccaagaagacccgtgtgaagctgccctccggctccaagaaggttatctcctcagccaacagagctgtggttggtgtggtggctggaggtggccgaattgacaaacccatcttgaaggctggccgggcgtaccacaaatataaggcaaagaggaactgctggccacgagtacggggtgtggccatgaatcctgtggagcatccttttggaggtggcaaccaccagcacatcggcaagccctccaccatccgcagagatgcccctgctggccgcaaagtgggtctcattgctgcccgccggactggacgtctccggggaaccaagactgtgcggagaagagaactagtgctgagggcctcataaagttgggttatgcccaaaanaaaaacatacaacacaacaaaaaacggggggcgcaaaaacacaagggccaccagcccctctcttagggccaaggggacataacaggcggggaacagcggaccgggtgttgcaccaccggggggacccgacgcacaaacagg

SEQ ID NO: 303742 - DNA, 926 bp, Homo sapiens
gtgcagggccggagaccttaggctaggtacgaggcctgggtgttgcgctgacgccgtgtttcctctttcggccgcgctggtgaacaggacccgtcgccatgggccgtgtgatccgtggacagaggaagggcgccgggtctgtgttccgcgcgcacgtgaagcaccgtaaaggcgctgcgcgcctgcgcgccgtggatttcgctgagcggcacggctacatcaagggcatcgtcaaggacatcatccacgacccgggccgcggcgcgcccctcgccaaggtggtcttccgggatccgtatcggtttaagaagcggacggagctgttcattgccgccgagggcattcacacgggccagtttgtgtattgcggcaagaaggcccagctcaacattggcaatgtgctccctgtgggcaccatgcctgagggtacaatcgtgtgctgcctggaggagaagcctggagaccgtggcaagctggcccgggcatcagggaactatgccaccgttatctcccacaaccctgagaccaagaagacccgtgtgaagctgccctccggctccaagaaggttatctcctcagccaacagagctgtggttggtgtggtggctggaggtggccgaattgacaaacccatcttgaaggctggccgggcgtaccacaaatataaggcaaagaggaactgctggccacgagtacggggtgtggccatgaatcctgtggagcatcctttggaggtggcaaccaccagcacatcggcaagcctccacatcggagagatgccctgttggcgaaagtgggtctcattgctgccgcggactggacgtctccgggaaccaagactgtgcggaagagacactgtggggcacaagtggtttgcaaaaccacaaccccccccaccacccaacaaccccctcttccgcgcacaa

SEQ ID NO: 303743 - DNA, 739 bp, Homo sapiens
  misc_feature (13)..(13): n is a, c, g, or t
  misc_feature (17)..(17): n is a, c, g, or t
  misc_feature (719)..(719): n is a, c, g, or t
gcctggtgtgaancggncgcaggcctctttcggccgcgctggtgaacaggacccgtcgccatgggccgtgtgatccgtggacagaggaagggcgccgggtctgtgttccgcgcgcacgtgaagcaccgtaaaggcgctgcgcgcctgcgcgccgtggatttcgctgagcggcacggctacatcaagggcaccacgacccgggccgcggcgcgcccctcgccaaggtggtcttccgggatccgtatcggtttaagaagcggacggagctgttcattgccgccgagggcattcacacgggcagtttgtgtattgcggcaagaaggcccagctcaacattggcaatgtgctccctgtgggcaccatgcctgagggtacaatcgtgtgctgcctggaggagaagcctggagaccgtggcaagctggcccgggcatcagggaactatgccaccgttatctcccacaaccctgagaccaagaagacccgtgtgaagctgccctccggctccaagaaggttatctcctcagccaacagagctgtggttggtgtggtggctggaggtggccgaattgacaaacccatcttgaaggctggccgggcgtaccacaaatataaggcacaccaaattacggggggttgttggcccatgaaatccctgttggaaccatccctttttcgggaaaggttgggcaaacccaaccaagcaacattccgggccaaanccccttcccaaccaattccc

SEQ ID NO: 303744 - DNA, 711 bp, Homo sapiens
  misc_feature (28)..(28): n is a, c, g, or t
acttacggctaggtacgaggctgggtgncgcacaaccctgagaccaagaagacccgtgtgaagctgccctccggctccaagaaggttatctcctcagccaacagagctgtggttggtgtggtggctggaggtggccgaattgacaaacccatcttgaaggctggccgggcgtaccacaaatataaggcaaagaggaactgctggccacgagtacggggtgtggccatgaatcctgtggagcatccttttggaggtggcaaccaccagcacatcggcaagccctccaccatccgcagagatgcccctgctggccgcaaagtgggtctcattgctgcccgccggactggacgtctccggggaaccaagactgtgcaggagaaagagaactagtgctgagggcctcaataaagtttgtgtttatgccaaaaaaaaaaaaaaaaaaaaaaacaaaaaaaaaaaaaaaaaacacaaacaagaaaaaaaaacacccgcagcggaggcactactcgaaccggtgtgcgccgaaagaaaaaaaacggggctgcgattaaataacgatgcgcccgcgggttgctacaagaggttatctccgttgagacccccatccttttttctaccagacgagggggcaaaaaacctgggggcgaccccccactataagagggggacgcataaaatcaccccgataacacagggtgcaccccggcataa

SEQ ID NO: 303745 - DNA, 941 bp, Homo sapiens
  misc_feature (31)..(32): n is a, c, g, or t
  misc_feature (39)..(39): n is a, c, g, or t
agcgggaaaaactgtaggctagtacgaggcnnggtgttncaggacccgtcgccatgggccgtgtgatccgtggacagaggaagggcgccgggtctgtgttccgcgcgcacgtgaagcaccgtaaaggcgctgcgcgcctgcgcgccgtggatttcgctgagcggcacggctacatcaagggcatcgtcaaggacatcatccacgacccgggccgcggcgcgcccctcgccaaggtggtcttccgggatccgtatcggtttaagaagcggacggagctgttcattgccgccgagggcattcacacgggccagtttgtgtattgcggcaagaaggcccagctcaacattggcaatgtgctccctgtgggcaccatgcctgagggtacaatcgtgtgctgcctggaggagaagcctggagaccgtggcaagctggcccgggcatcagggaactatgccaccgttatctcccacaaccctgagaccaagaagacccgtgtgaagctgccctccggctccaagaaggttatctcctcagccaacagagctgtggttggtgtggtggctggaggtggccgaattgacaaacccatcttgaaggctggccgggcgtaccacaaatataaggcaaagaggaactgctggccacgagtacggggtgtggccatgaatcctgtggagcatccttttggaggtggcaaccaccagcacatcggcaagccctccaccatccgcagagatgcccctgctggccgcaaagtgggtctcattgctgcccgccggactggacgtctccggggaaccaagactgtgcaggagaaagagaactagtgctgagggctcaataagttgggttatgccaaaaaaaacaaaagacaaaacaaaaaggggcgcggaaagatacccgagggcaagacaccgctccccggtcggacaggggcccag

SEQ ID NO: 303746 - DNA, 742 bp, Homo sapiens
  misc_feature (486)..(486): n is a, c, g, or t
  misc_feature (569)..(569): n is a, c, g, or t
  misc_feature (581)..(582): n is a, c, g, or t
agcggctttggccgcgctggtgaaaggcccagctcaacattggcaatgtgctccctgtgggcaccatgcctgagggtacaatcgtgtgctgcctggaggagaagcctggagaccgtggcaagctggcccgggcatcagggaactatgccaccgttatctcccacaaccctgagaccaagaagacccgtgtgaagctgccctccggctccaagaaggttatctcctcagccaacagagctgtggttggtgtggtggctggaggtggccgaattgacaaacccatcttgaaggctggccgggcgtaccacaaatataaggcaaagaggaactgctggccacgagtacggggtgtggccatgaatcctgtggagcatccttttggaggtggcaaccaccagcacatcggcaagccctccaccatccgcagagatgcccctgctggccgcaaagtgggtctcattgctgcccgccggactggacgtctcnggggaaaccaagactgtgcaggagaaagagaactagtgctgagggcctcaataaagttgtgtttatgccaaccgaaaaaaaanaacaaacacacnnaaaaacaaaactgttttgggggccccctgggcctcagaaaaagttttttaaaaccattcggtttggggcggggggcccatgggttcagtgacctgtgctcacgcggtgtcccaggagacacccgggccgaaaacggctgggttttctcccaattaaaagc

SEQ ID NO: 303747 - DNA, 1019 bp, Homo sapiens
  misc_feature (856)..(856): n is a, c, g, or t
  misc_feature (861)..(862): n is a, c, g, or t
  misc_feature (865)..(865): n is a, c, g, or t
tctctctctctctctctctctctggtgaacaggacccgtcgccatgggccgtgtgatccgtggacagaggaagggcgccgggtctgtgttccgcgcgcacgtgaagcaccgtaaaggcgctgcgcgcctgcgcgccgtggatttcgctgagcggcacggctacatcaagggcatcgtcaaggacatcatccacgacccgggccgcggcgcgcccctcgccaaggtggtcttccgggatccgtatcggtttaagaagcggacggagctgttcattgccgccgagggcattcacacgggccagtttgtgtattgcggcaagaaggcccagctcaacattggcaatgtgctccctgtgggcaccatgcctgagggtacaatcgtgtgctgcctggaggagaagcctggagaccgtggcaagctggcccgggcatcagggaactatgccaccgttatctcccacaaccctgagaccaagaagacccgtgtgaagctgccctccggctccaagaaggttatctcctcagccaacagagctgtggttggtgtggtggctggaggtggccgaattgacaaacccatcttgaaggctggccgggcgtaccacaaatataaggcaaagaggaactgctggccacgagtacggggtgtggccatgaatcctgtggagcatccttttggaggtggcaaccaccagcacatcggcaagccctccaccatccgcagagatgcccctgctggccgcaaagtgggtctcattgctgcccgccggactggacgtctccggggaaccaagactgtgcaggagaaagagaactagtgctgagggcctcaataaaggtttgtgtttatgccaaanaaaannaanaaaaactccggggcactcaatcggggtgcggaaacagcgcgctctgagatgggccaatggtgtccataccgtgttccggacccccttttcttggcacacggcggtaacttcccggccccctataagggggccaataaattccgaagcgggtacg

SEQ ID NO: 303748 - DNA, 890 bp, Homo sapiens
cgcgaacaggtttacacagcgagcaactaattccgtcgaccacgcgtctacgttatctcccacaaaaccctgagaccaagaagacccgtgtgaagctgccctccggctccaagaaggttatctcctcagccaacagagctgtggttggtgtggtggctggaggtggccgaattgacaaacccatcttgaaggctggccgggcgtaccacaaatataaggcaaagaggaactgctggccacgagtacggggtgtggccatgaatcctgtggagcatccttttggaggtggcaaccaccagcacatcggcaagccctccaccatccgcagagatgcccctgctggccgcaaagtgggtctcattgctgcccgccggactggacgtctccggggaaccaagactgtgcaggagaaagagaactagtgctgagggcctcaataaagtttgtgtttatgccaaaaaaaaaaaaaaaaaaaaaaggaaaaaaatacacaaataaatagaaaaagaaaaaaaaggggggcggcgcgcgcgcgcacctaaaaagatcttccccgggagggggcccgaaaggtatgtcggcgatccagccagcggtttggtgtgcgcagcaagcgggggcgcccccaaatgaagggggcggtcgctatatatataagaacgcaatacggcgacccgcgcggcggcggggtataacaaaccagcggacgaggacgaggcggaggaaacccagcgcggcgaccacgcgggcagacccctagtggggagagagagagcgccccctcaaactactccgggggcggggcgagcacaaatagtggggggcagcacaacccctccctcacaagaaggaattagtaacccgccccacgaagggacggaacaactagt

SEQ ID NO: 303749 - DNA, 1059 bp, Homo sapiens
  misc_feature (13)..(13): n is a, c, g, or t
  misc_feature (17)..(17): n is a, c, g, or t
gcctggtgtgaancggncgcaggcctctttcggccgcgctggtgaacagcaggacccgtcgccatgggccgtgtgatccgtggacagaggaagggcgccgggtctgtgttccgcgcgcacgtgaagcaccgtaaaggcgctgcgcgcctgcgcgccgtggatttcgctgagcggcacggctacatcaagggcaaagaagcggacggagctgttcattgccgccgagggcattcacacgggccagtttgtgtattgcggcaagatgctccctgtgggcaccatgcctgagggtacaatcgtgtgctgcctggaggagaagcctggagaccgtggcaagctggcccgggcatcagggaactatgccaccgttatctcccacaaccctgagaccaagaagacccgtgtgaagctgccctccggctccaagaaggttatctcctcagccaacagagctgtggttggtgtggtggctggaggtggccgaattgacaaacccatcttgaaggctggccgggcgtaccacaaatataaggcaaagaggaactgctggccacgagtacggggtgtggccatgaatcctgtggagcatccttttggaggtggcaaccaccagcacatcggcaagccctccaccatccgcagagatgcccctgctggccgcaaagtgggtctcattgctgcccgccggactggacgtctccggggaaccaagactgtgcaggagaaaagagaactagtgctgagggcctcaataaaggctttggtgttttatgccccaaaaaaaaaaaatctaaactcaacccagctgaatcgacgagaacggaacgacaccgctgagtactcacgaaaccactcaaccaacacgaaaaaaagggggcgggggccataatattccccgggagggacaatatcgtcgcaccctttttttgaaaggcgccagtggatgtctaataagacgggcggcgcgctaaaaaggtaggcaggaacagggctggttattggagaaccctggggtgagatggccccccgaagtgccgggaaaatagtgtgggaccagct

SEQ ID NO: 303750 - DNA, 534 bp, Homo sapiens
  misc_feature (20)..(20): n is a, c, g, or t
  misc_feature (71)..(71): n is a, c, g, or t
cacgcgtcggacccacgcgntcgcccacgcgtccggacccacgctgtcgcccacgcgtccgcggacgcgtnggcgctggtgaacctggagaccgtggcaagctggcccgggcatcagggaactatgccaccgttatctcccacaaccctgagaccaagaagacccgtgtgaagctgccctccggctccaagaaggttatctcctcagccaacagagctgtggttggtgtggtggctggaggtggccgaattgacaaacccatcttgaaggctggccgggcgtaccacaaatataaggcaaagaggaactgctggccacgagtacggggtgtggccatgaatcctgtggagcatccttttggaggtggcaaccaccagcacatcggcaagccctccaccatccgcagagatgcccctgctggccgcaaagtgggtctcattgctgcccgccggactggacgtctccggggaaccaagactgtgcaggagaaagagaactagtgctgagggcctcaataaagtttgtgtttatgcc

SEQ ID NO: 303751 - DNA, 1148 bp, Homo sapiens
agcggctttggccgcgctggtgaacaggacccgtcgccatgggccgtgtgatccgtggacagaggaagggcgccgggtctgtgttccgcgcgcacgtgaagcaccgtaaaggcgctgcgcgcctgcgcgccgtggatttcgctgagcggcacggctacatcaagggcatcgtcaaggacatcatccacgacccgggccgcggcgcgcccctcgccaaggtggtcttccgggatccgtatcggtttaggcccagctcaacattggcaatgtgctccctgtgggcaccatgcctgagggtacaatcgtgtgctgcctggaggagaagcctggagaccgtggcaagctggcccgggcatcagggaactatgccaccgttatctcccacaaccctgagaccaagaagacccgtgtgaagctgccctccggctccaagaaggttatctcctcagccaacagagctgtggttggtgtggtggctggaggtggccgaattgacaaacccatcttgaaggctggccgggcgtaccacaaatataaggcaaagaggaactgctggccacgagtacggggtgtggccatgaatcctgtggagcatccttttggaggtggcaaccaccagcacatcggcaagccctccaccatccgcagagatgcccctgctggccgcaaagtgggtctcattgctgcccgccggactggacgtctccggggaaccaagactgtgcaggagaaagagaactagtgctgagggcctcaataaacgttgtgttatgccaccttgaaacactaaaaaaaaagacaagcgagaacaacacacaacaagaaaaacaaagtaaagaagacatagagaggacagcaccagaaccagagatataaccaggatgagcgggcgcggagctgagctacaaatttgtatccctcagtgaagcgaccacaattattcgcgagcacaccaaagtatttatatgaacaaataaagtaccccctcgatagctcaagtcaaatacaagcaacaagcgccgcgcgcccgtgataagaagccgtgcggcttcgaaaagaattcgtttcatggcgtacattaggagcaaccccaccatctggggggcgccagacagctggaccacaccaccgagaattagcctcctagg

SEQ ID NO: 303752 - DNA, 1437 bp, Homo sapiens
  misc_feature (1318)..(1318): n is a, c, g, or t
ggcacgaggtagaaaccatgaaaaaattagatattgttttgtgacttttagacagtggtaaatatagaaccatgaattctggtcacattccatttctctccaacatgaaggatcaaaaaatgtttttcaatgtgttctttgttccactggaaacttagagtcatgagtttatgagctgatttggtcaccttcctctgcctttgttcactgtgagttctgatgtcttagtgacttagttcttagaagctcacgccttagtttgaaacagattctccacggtggtccccaaaacactgtctgcatatccataagaattgagcgctatgggtgttaacgtgcatgaggatcagtttgcagcagcaagtacaaaaggagaagaggaacatccgttgaatgagtgtgttttgtacataacttcagatacttgtgaacatgccttatatttgtccaacaactgtcagaataaagaacattctaaaatgagaaaaaaacaggacccgtcgccatgggccgtgtgatccgtggacagaggaagggcgccgggtctgtgttccgcgcgcacgtgaagcaccgtaaaggcgctgcgcgcctgcgcgccgtggatttcgctgagcggcacggctacatcaagggcatcgtcaaggacatcatccacgacccgggccgcggcgcgcccctcgccaaggtggtcttccgggatccgtatcggtttaagaagcggacggagctgttcattgccgccgagggcattcacacgggccagtttgtgtattgcggcaagaaggcccagctcaacattggcaatgtgctccctgtgggcaccatgcctgagggtacaatcgtgtgctgcctggaggagaagcctggagaccgtggcaagctggcccgggcatcagggaactatgccaccgttatctcccacaaccctgagaccaagaagacccgtgtgaagctgccctccggctccaagaaggttatctcctcagccaacagagctgtggttggtgtggtggctggaggtggccgaattgacaaacccatcttgaaggctggccgggcgtaccacaaatataaggcaaagaggaactgctggccacgagtacggggtgtggccatgaatcctgtggagcatccttttggaggtggcaaccaccagcacatcggcaagccctccaccatccgcagagatgcccctgctggccgcaaagtgggtctcattgctgcccgccggactggacgtctccggggaaccaagactgtgcaggagaaagagaactagtgctgagggcccaataaagttgtgttttgccacaaaaanaaggggggcgcaaaaatcccagggccagtagggtaccacttgtcaagggccaagagcggtataaagaccgggggtaaaaggcggacagacgggtgaagacctggggacagaaaagagac

SEQ ID NO: 303753 - DNA, 965 bp, Homo sapiens
  misc_feature (20)..(20): n is a, c, g, or t
  misc_feature (71)..(71): n is a, c, g, or t
  misc_feature (872)..(872): n is a, c, g, or t
cacgcgtcggacccacgcgntcgcccacgcgtccggacccacgctgtcgcccacgcgtccgcggacgcgtnggcgctggtgaacaggacccgtcgccatgggccgtgtgatccgtggacagaggaagggcgccgggtctgtgttccgcgcgcacgtgaagcaccgtaaaggcgctgcgcgcctgcgcgccgtggatttcgctgagcggcacggctacatcaagggcatcgtcaaggacatcatccacgacccgggccgcggcgcgcccctcgccaaggtggtcttccgggatccgtatcggtttaagaagcggacggagctgttcattgccgccgagggcattcacacgggccagtttgtgtattgcggcaagaaggcccagctcaacattggcaatgtgctccctgtgggcaccatgcctgagggtacaatcgtgtgctgcctggaggagaagcctggagaccgtggcaagctggcccgggcatcagggaactatgccaccgttatctcccacaaccctgagaccaagaagacccgtgtgaagctgccctccggctccaagaaggttatctcctcagccaacagagctgtggttggtgtggtggctggaggtggccgaattgacaaacccatcttgaaggctggccgggcgtaccacaaatataaggcaaagaggaactgctggccacgagtacggggtgtggccatgaatcctgtggagcatccttttggaggtggcaaccaccagcacatcggcaagccctccaccatccgcagagatgcccctgctggccgcaaagtgggtctcattgctgcccgccggactggacgtctccggggaaccaagactgtgcggagaaagaaactagggntgaggccctcaataaagttggggttttgccctataataatcttcttttccttatttctataagtcttcatttctctagtatctagtgatttat

SEQ ID NO: 303754 - DNA, 614 bp, Homo sapiens
  misc_feature (544)..(545): n is a, c, g, or t
  misc_feature (569)..(569): n is a, c, g, or t
  misc_feature (580)..(580): n is a, c, g, or t
  misc_feature (594)..(594): n is a, c, g, or t
  misc_feature (597)..(597): n is a, c, g, or t
accacgcgtcgcggacgcgtgggtcgacccacgcgtccggaaaagaagcggacggagctgttcattgccgccgagggcattcacacgggccagtttgtgtattgcggcaagatgctccctgtgggcaccatgcctgacctggagaccgtggcaagctggcccgggcatcagggaactatgccaccgttatctcccacaaccctgagaccaagaagacccgtgtgaagctgccctccggctccaagaaggttatctcctcagccaacagagctgtggttggtgtggtggctggaggtggccgaattgacaaacccatcttgaaggctggccgggcgtaccacaaatataaggcaaagaggaactgctggccacgagtacggggtgtggccatgaatcctgtggagcatccttttggaggtggcaaccaccagcacatcggcaagccctccaccatccgcagagatgcccctgctggccgcaaagtgggtctcattgctgcccgccggactggacgtctccggggaaccaagactgtgcaggaganngagaactagtgctgagggcctcantaaagtcggtnatgccaaaaaaaanaangaaaaaaacaaaggggg

SEQ ID NO: 303755 - DNA, 774 bp, Homo sapiens
cggacgcgtgggtcgacccacgcgtccgggacagaggaagggcgccgggtctgtgttccgcgcgcacgtgaagcaccgtaaaggcgctgcgcgcctgcgcgccgtggatttcgctgagcggcacggctacatcaagggcatcgtcaaggacatcatccacgacccgggccgcggcgcgcccctcgccaaggtggtcttccgggatccgtatcggtttaagaagcggacggagctgttcattgccgccgagggcattcacacgggccagtttgtgtattgcggcaagacagctcaacattggcaatgtgctccctgtgggcaccatgcctgacctggagaccgtggcaagctggcccgggcatcagggaactatgccaccgttatctcccacaaccctgagaccaagaagacccgtgtgaagctgccctccggctccaagaaggttatctcctcagccaacagagctgtggttggtgtggtggctggaggtggccgaattgacaaacccatcttgaaggctggccgggcgtaccacaaatataaggcaaagaggaactgctggccacgagtacggggtgtggccatgaatcctgtggagcatccttttggaggtggcaaccaccagcacatcggcaagccctccaccatccgcagagatgcccctgctggccgcaaagtgggtctcattgctgcccgccggactggacgtctccggggaaccaagactgtgcaggagaaagagaaaaacgtgcggaggcccagattgggaattcc

SEQ ID NO: 303756 - DNA, 859 bp, Homo sapiens
accacgcgtcgcggacgcgtgggtcgacccacgcgtccggaacaggacccgtcgccatgggccgtgtgatccgtggacagaggaagggcgccgggtctgtgttccgcgcgcacgtgaagcaccgtaaaggcgctgcgcgcctgcgcgccgtggatttcgctgagcggcacggctacatcaagggcatcgtcaaggacatcatccacgacccgggccgcggcgcgcccctcgccaaggtggtcttccgggatccgtatcggtttaagaagcggacggagctgttcattgccgccgagggcattcacacgggccagtttgtgtattgcggcaagaaggcccagctcaacattggcaatgtgctccctgtgggcaccatgcctgagggtacaatcgtgtgctgcctggaggagaagcctggagaccgtggcaagctggcccgggcatcagggaactatgccaccgttatctcccacaaccctgagaccaagaagacccgtgtgaagctgccctccggctccaagaaggttatctcctcagccaacagagctgtggttggtgtggtggctggaggtggccgaattgacaaacccatcttgaaggctggccgggcgtaccacaaatataaggcaaagaggaactgctggccacgagtacggggtgtggccatgaatcctgtggagcatccttttggaggtggcaaccaccagcacatcggcaagccctccaccatccgcagagatgcccctgctggccgcaaagtgggtctcattgctgcccgccggactggacgtctccggggaaccaagactgtgcggagaagagaactagtgctgagggcctcataaagttgggttatgcc

SEQ ID NO: 303757 - DNA, 803 bp, Homo sapiens
  misc_feature (297)..(297): n is a, c, g, or t
gtgaagaggaccgtcgtcatggcgaactgagtgatctgatgtactaagatgaatgacccgtagtctgtagtgctcgcgccgttcagcccgtaaatacgctgtccgcctacgcgccgagaatttctatgattactactgctacgtcaagggtatcgtctcatgacgtcatctcacaggaactagggccggcgcgcagcccctcgtatagcggtgggtctcccgcgatatccagaatcggttcaaaagtagatggagctgtcattgccgcgagggcattcacagggccagttgtgtatntgcggctaagaaggcccagctcaactattggcaatgttgctccctgtgggcaccatgcctgagggtacaatcgtgtgctgcctggaggagaagcctggagaccgtggcaagctggcccgggcatcagggaactatgccaccgttatctcccacaaccctgagaccaagaagacccgtgtgaagctgccctccggctccaagaaggttatctcctcagccaacagagctgtggttggtgtggtggctggaggtggccgaattgacaaacccatcttgaaggctggccgggcgtaccacaaatataaggcaaagaggaactgctggccacgagtacggggtgtggccatgaatcctgtggagcatccttttggaggtggcaaccaccagcacatcggcaagccctccaccatccgcagagatgcccctgctggccgcaaagtgggtctcattgctgcccgccggactggacgtctccgggaaccagactgatgacgctagaggtaccg

SEQ ID NO: 303758 - DNA, 693 bp, Homo sapiens
  misc_feature (27)..(27): n is a, c, g, or t
  misc_feature (29)..(29): n is a, c, g, or t
aggctggtgttaattcggccgagggtnancaggacccgtcgccatgggccgtgtgatccgtggacagaggaagggcgccgggtctgtgttccgcgcgcacgtgaagcaccgtaaaggcgctgcgcgcctgcgcgccgtggatttcgctgagcggcacggctacatcaagggcaccacgacccgggccgcggcgcgcccctcgccaaggtggtcttccgggatccgtatcggtttaagaagcggacggagctgttcattgccgccgagggcattcacacgggccagtttgtgtattgcggcaagatgctccctgtgggcaccatgcctgagggtacaatcgtgtgctgcctggaggagaagcctggagaccgtggcaagctggcccgggcactccaagaaggttatctcctcagccaacagagctgtggttggtgtggtggctggaggtggccgaattgacaaacccatcttgaaggctggccgggcgtaccacaaatataaggcaaagaggaactgctggccacgagtacggggtgtggccatgaatcctgtggagcatccttttggaggtggcaaccaccagcacacggcaagccctccaccatccgcagagatgcccctgctggccgcaaagtgggtctcattgctgcccgccggactggacgtgcggactgacgtctcggggaccagatg

SEQ ID NO: 303759 - DNA, 747 bp, Homo sapiens
  misc_feature (636)..(636): n is a, c, g, or t
attcccggatcgctggtgaacaggacccgtcgccatgggccgtgtgatccgtggacagaggaagggcgccgggtctgtgttccgcgcgcacgtgaagcaccgtaaaggcgctgcgcgcctgcgcgccgtggatttcgctgagcggcacggctacatcaagggcaccacgacccgggccgcggcgcgcccctcgccaaggtggtcttccgggatccgtatcggtttaagaagcggacggagctgttcattgccgccgagggcattcacacgggccagtttgtgtattgcggcaagatgctccctgtgggcaccatgcctgagggtacaatcgtgtgctgcctggaggagaagcctggagaccgtggcaagctggcccgggcatcagggaactatgccaccgttatctcccacaaccctgagaccaagaagacccgtgtgaagctgccctccggctccaagaaggttatctcctcagccaacagagctgtggttggtgtggtggctggaggtggccgaattgacaaacccatcttgaaggctggccgggcgtaccacaaatataaggcacacgagtacggggtgtggccatgaatcctgtggagcatccttttggaggtggcaaccaccagcacatcngcaagccctccaccggattcatggccacaccccgtaccacaaatttaggcaaagaggaactgctggcaacgagtacggggtgtggccatgaatcctgtggagcatcctttt

SEQ ID NO: 303760 - DNA, 1343 bp, Homo sapiens
gtttgtgttgctccttttcgtctgcttctggccttttgaagatgattatatttatttttttgtggactacttgactgtgaggacccacaggtggacaaaagcaggcttgtaaatcgtcggcagtaattacggtctaggtacgaggctgggtgttcgggtgaacaggacccgtcgccatgggccgtgtgatccgtggacagaggaagggcgccgggtctgtgttccgcgcgcacgtgaagcaccgtaaaggcgctgcgcgcctgcgcgccgtggatttcgctgagcggcacggctacatcaagggcatcgtcaaggacatcatccacgacccgggccgcggcgcgcccctcgccaaggtggtcttccgggatccgtatcggtttaagaagcggacggagctgttcattgccgccgagggcattcacacgggccagtttgtgtattgcggcaagaaggcccagctcaacattggcaatgtgctccctgtgggcaccatgcctgagggtacaatcgtgtgctgcctggaggagaagcctggagaccgtggcaagctggcccgggcatcagggaactatgccaccgttatctcccacaaccctgagaccaagaagacccgtgtgaagctgccctccggctccaagaaggttatctcctcagccaacagagctgtggttggtgtggtggctggaggtggccgaattgacaaacccatcttgaaggctggccgggcgtaccacaaatataaggcaaagaggaactgctggccacgagtacggggtgtggccatgaatcctgtggagcatccttttggaggtggcaaccaccagcacatcggcaagccctccaccatccgcagagatgcccctgctggccgcaaagtgggtctcattgctgcccgccggactggacgtctccggggaaccaagactgtgcaggagaaagagaactagtgctgagggcctcaataaagtttgtgtttatgccaaaaaaaaaaaacaaaaaaaaaaaaaaaaaaaaaaaaaaaaaaaaaaaaaaaaaaaaaaaaaaaaaaaaaaaaaaaaaaaaaaaaaaggggggggggggtatgaaaaaattttcggggaagcggcgcaacaataaatgagcgtcacaaattttatgtaaataagaggggcacctgattgagggatcatataaataaaagagggagggggggattaacaaagagcgggaggcaaaaacagggttgtaatataggaagaccacactcatgtgggggaaatagggacacacacgaaaatagggggggaaaaaaagaggtatgggaaacaggtatcaggggagaatgttagctgtagaatagg

SEQ ID NO: 303761 - DNA, 1175 bp, Homo sapiens
gtttgtgttgctccttttcgtctgcttctggccttttgaagatgattatatttatttttttgtggactacttgactgtgaggacccacaggtggacaaaagcaggcttgtaaatcgtcggcagtaattacggtctaggtacgaggctgggtgttcgggtgaacaggacccgtcgccatgggccgtgtgatccgtggacagaggaagggcgccgggtctgtgttccgcgcgcacgtgaagcaccgtaaaggcgctgcgcgcctgcgcgccgtggatttcgctgagcggcacggctacatcaagggcatcgtcaaggacatcatccacgacccgggccgcggcgcgcccctcgccaaggtggtcttccgggatccgtatcggtttaagaagcggacggagctgttcattgccgccgagggcattcacacgggccagtttgtgtattgcggcaagaaggcccagctcaacattggcaatgtgctccctgtgggcaccatgcctgagggtacaatcgtgtgctgcctggaggagaagcctggagaccgtggcaagctggcccgggcatcagggaactatgccaccgttatctcccacaaccctgagaccaagaagacccgtgtgaagctgccctccggctccaagaaggttatctcctcagccaacagagctgtggttggtgtggtggctggaggtggccgaattgacaaacccatcttgaaggctggccgggcgtaccacaaatataaggcaaagaggaactgctggccacgagtacggggtgtggccatgaatcctgtggagcatccttttggaggtggcaaccaccagcacatcggcaagccctccaccatccgcagagatgcccctgctggccgcaaagtgggtctcattgctgcccgccggactggacgtctccggggaaccaagactgtgcaggagaaagagaactagtgctgagggcctcaataaagtttgtgtttatgccaaaaaaaaaaaacaaaaaaaaaaaaaaaaaaaaaaaaaaaaaaaaaaaaaaaaaaaaaaaaaaaaaaaaaaaaaaaaccttgtgggccgcttgggccaagtgaattttagactggagcaagttaatgcatgcggccgaatttggagctaattgggccaattggccttatagggagccgttttacttccggc

SEQ ID NO: 303762 - DNA, 1060 bp, Homo sapiens
gtttgtgttgctccttttcgtctgcttctggccttttgaagatgattatatttatttttttgtggactacttgactgtgaggacccacaggtggacaaaagcaggcttgtaaatcgtcggcagtaattacggtctaggtacgaggctgggtgttcgggtgaacaggacccgtcgccatgggccgtgtgatccgtggacagaggaagggcgccgggtctgtgttccgcgcgcacgtgaagcaccgtaaaggcgctgcgcgcctgcgcgccgtggatttcgctgagcggcacggctacatcaagggcatcgtcaaggacatcatccacgacccgggccgcggcgcgcccctcgccaaggtggtcttccgggatccgtatcggtttaagaagcggacggagctgttcattgccgccgagggcattcacacgggccagtttgtgtattgcggcaagaaggcccagctcaacattggcaatgtgctccctgtgggcaccatgcctgagggtacaatcgtgtgctgcctggaggagaagcctggagaccgtggcaagctggcccgggcatcagggaactatgccaccgttatctcccacaaccctgagaccaagaagacccgtgtgaagctgccctccggctccaagaaggttatctcctcagccaacagagctgtggttggtgtggtggctggaggtggccgaattgacaaacccatcttgaaggctggccgggcgtaccacaaatataaggcaaagaggaactgctggccacgagtacggggtgtggccatgaatcctgtggagcatccttttggaggtggcaaccaccagcacatcggcaagccctccaccatccgcagagatgcccctgctggccgcaaagtgggtctcattgctgcccgccggactggacgtctccggggaaccaagactgtgcaggagaaagagaactagtgctgagggcctcaataaagtttgtgtttatgccaaaaaaaaaacacacaaaacacaaaaaaaacatccttttggaagaaaaagcggacctccccttggagcgccaagaa

SEQ ID NO: 303763 - DNA, 1138 bp, Homo sapiens
gtttgtgttgctccttttcgtctgcttctggccttttgaagatgattatatttatttttttgtggactacttgactgtgaggacccacaggtggacaaaagcaggcttgtaaatcgtcggcagtaattacggtctaggtacgaggctgggtgttcgggtgaacaggacccgtcgccatgggccgtgtgatccgtggacagaggaagggcgccgggtctgtgttccgcgcgcacgtgaagcaccgtaaaggcgctgcgcgcctgcgcgccgtggatttcgctgagcggcacggctacatcaagggcatcgtcaaggacatcatccacgacccgggccgcggcgcgcccctcgccaaggtggtcttccgggatccgtatcggtttaagaagcggacggagctgttcattgccgccgagggcattcacacgggccagtttgtgtattgcggcaagaaggcccagctcaacattggcaatgtgctccctgtgggcaccatgcctgagggtacaatcgtgtgctgcctggaggagaagcctggagaccgtggcaagctggcccgggcatcagggaactatgccaccgttatctcccacaaccctgagaccaagaagacccgtgtgaagctgccctccggctccaagaaggttatctcctcagccaacagagctgtggttggtgtggtggctggaggtggccgaattgacaaacccatcttgaaggctggccgggcgtaccacaaatataaggcaaagaggaactgctggccacgagtacggggtgtggccatgaatcctgtggagcatccttttggaggtggcaaccaccagcacatcggcaagccctccaccatccgcagagatgcccctgctggccgcaaagtgggtctcattgctgcccgccggactggacgtctccggggaaccaagactgtgcaggagaaagagaactagtgctgagggcctcaataagttggtgtttatgccagaaagaaaaaaaaaaaaaaaaaccgggggacacatcaatgggggggggaaaaagggtaaaaaaggcgccacgtgcaaaggggtccggcaccccttttttgtcacacaggggagaatcggagcgccccaaaaggggcgaaaatcaaagccggacc

SEQ ID NO: 303764 - DNA, 996 bp, Homo sapiens
gtttgtgttgctccttttcgtctgcttctggccttttgaagatgattatatttatttttttgtggactacttgactgtgaggacccacaggtggacaaaagcaggcttgtaaatcgtcggcagtaattacggtctaggtacgaggctgggtgttcgggtgaacaggacccgtcgccatgggccgtgtgatccgtggacagaggaagggcgccgggtctgtgttccgcgcgcacgtgaagcaccgtaaaggcgctgcgcgcctgcgcgccgtggatttcgctgagcggcacggctacatcaagggcatcgtcaaggacatcatccacgacccgggccgcggcgcgcccctcgccaaggtggtcttccgggatccgtatcggtttaagaagcggacggagctgttcattgccgccgagggcattcacacgggccagtttgtgtattgcggcaagaaggcccagctcaacattggcaatgtgctccctgtgggcaccatgcctgagggtacaatcgtgtgctgcctggaggagaagcctggagaccgtggcaagctggcccgggcatcagggaactatgccaccgttatctcccacaaccctgagaccaagaagacccgtgtgaagctgccctccggctccaagaaggttatctcctcagccaacagagctgtggttggtgtggtggctggaggtggccgaattgacaaacccatcttgaaggctggccgggcgtaccacaaatataaggcaaagaggaactgctggccacgagtacggggtgtggccatgaatcctgtggagcatccttttggaggtggcaaccaccagcacatcggcaagccctccaccatccgcagagatgcccctgctggccgcaaagtgggtctcattgctgcccgccggactggacgtctccggggaaccaagactgtgcaggagaaagagaactagtgctgagggcctcaataaagtttgtgtttatgccaaaaaaaaaaaa

SEQ ID NO: 303765 - DNA, 1108 bp, Homo sapiens
  misc_feature (989)..(989): n is a, c, g, or t
gtttgtgttgctccttttcgtctgcttctggccttttgaagatgattatatttatttttttgtggactacttgactgtgaggacccacaggtggacaaaagcaggcttgtaaatcgtcggcagtaattacggtctaggtacgaggctgggtgttcgggtgaacaggacccgtcgccatgggccgtgtgatccgtggacagaggaagggcgccgggtctgtgttccgcgcgcacgtgaagcaccgtaaaggcgctgcgcgcctgcgcgccgtggatttcgctgagcggcacggctacatcaagggcatcgtcaaggacatcatccacgacccgggccgcggcgcgcccctcgccaaggtggtcttccgggatccgtatcggtttaagaagcggacggagctgttcattgccgccgagggcattcacacgggccagtttgtgtattgcggcaagaaggcccagctcaacattggcaatgtgctccctgtgggcaccatgcctgagggtacaatcgtgtgctgcctggaggagaagcctggagaccgtggcaagctggcccgggcatcagggaactatgccaccgttatctcccacaaccctgagaccaagaagacccgtgtgaagctgccctccggctccaagaaggttatctcctcagccaacagagctgtggttggtgtggtggctggaggtggccgaattgacaaacccatcttgaaggctggccgggcgtaccacaaatataaggcaaagaggaactgctggccacgagtacggggtgtggccatgaatcctgtggagcatccttttggaggtggcaaccaccagcacatcggcaagccctccaccatccgcagagatgcccctgctggccgcaaagtgggtctcattgctgcccgccggactggacgtctccggggaaccaagactgtgcaggagaaagagaactagtgctgagggcccaataaagttgtgttttgccacaaaaanaaggggggcgcaaaaatcccagggccagtagggtaccacttgtcaagggccaagagcggtataaagaccgggggtaaaaggcggacagacgggtgaagacctggggacagaaaagagac

SEQ ID NO: 303766 - DNA, 1152 bp, Homo sapiens
  misc_feature (989)..(989): n is a, c, g, or t
  misc_feature (994)..(995): n is a, c, g, or t
  misc_feature (998)..(998): n is a, c, g, or t
gtttgtgttgctccttttcgtctgcttctggccttttgaagatgattatatttatttttttgtggactacttgactgtgaggacccacaggtggacaaaagcaggcttgtaaatcgtcggcagtaattacggtctaggtacgaggctgggtgttcgggtgaacaggacccgtcgccatgggccgtgtgatccgtggacagaggaagggcgccgggtctgtgttccgcgcgcacgtgaagcaccgtaaaggcgctgcgcgcctgcgcgccgtggatttcgctgagcggcacggctacatcaagggcatcgtcaaggacatcatccacgacccgggccgcggcgcgcccctcgccaaggtggtcttccgggatccgtatcggtttaagaagcggacggagctgttcattgccgccgagggcattcacacgggccagtttgtgtattgcggcaagaaggcccagctcaacattggcaatgtgctccctgtgggcaccatgcctgagggtacaatcgtgtgctgcctggaggagaagcctggagaccgtggcaagctggcccgggcatcagggaactatgccaccgttatctcccacaaccctgagaccaagaagacccgtgtgaagctgccctccggctccaagaaggttatctcctcagccaacagagctgtggttggtgtggtggctggaggtggccgaattgacaaacccatcttgaaggctggccgggcgtaccacaaatataaggcaaagaggaactgctggccacgagtacggggtgtggccatgaatcctgtggagcatccttttggaggtggcaaccaccagcacatcggcaagccctccaccatccgcagagatgcccctgctggccgcaaagtgggtctcattgctgcccgccggactggacgtctccggggaaccaagactgtgcaggagaaagagaactagtgctgagggcctcaataaaggtttgtgtttatgccaaanaaaannaanaaaaactccggggcactcaatcggggtgcggaaacagcgcgctctgagatgggccaatggtgtccataccgtgttccggacccccttttcttggcacacggcggtaacttcccggccccctataagggggccaataaattccgaagcgggtacg

SEQ ID NO: 303767 - DNA, 1204 bp, Homo sapiens
gtttgtgttgctccttttcgtctgcttctggccttttgaagatgattatatttatttttttgtggactacttgactgtgaggacccacaggtggacaaaagcaggcttgtaaatcgtcggcagtaattacggtctaggtacgaggctgggtgttcgggtgaacaggacccgtcgccatgggccgtgtgatccgtggacagaggaagggcgccgggtctgtgttccgcgcgcacgtgaagcaccgtaaaggcgctgcgcgcctgcgcgccgtggatttcgctgagcggcacggctacatcaagggcatcgtcaaggacatcatccacgacccgggccgcggcgcgcccctcgccaaggtggtcttccgggatccgtatcggtttaagaagcggacggagctgttcattgccgccgagggcattcacacgggccagtttgtgtattgcggcaagaaggcccagctcaacattggcaatgtgctccctgtgggcaccatgcctgagggtacaatcgtgtgctgcctggaggagaagcctggagaccgtggcaagctggcccgggcatcagggaactatgccaccgttatctcccacaaccctgagaccaagaagacccgtgtgaagctgccctccggctccaagaaggttatctcctcagccaacagagctgtggttggtgtggtggctggaggtggccgaattgacaaacccatcttgaaggctggccgggcgtaccacaaatataaggcaaagaggaactgctggccacgagtacggggtgtggccatgaatcctgtggagcatccttttggaggtggcaaccaccagcacatcggcaagccctccaccatccgcagagatgcccctgctggccgcaaagtgggtctcattgctgcccgccggactggacgtctccggggaaccaagactgtgcaggagaaagagaactagtgctgagggcgagcctcaataaagtttgtgtttatgccaaaaaaaattacagtaatagtagaaagcaatgaggtcgtagaataaagcataatatgccaactaacataacagataaatagaggaggagtaatttattgtggagagagtagaaagatatagtatcaagcagtagtcacataagttgctagacacgttttttgaaagaggagcaatcagggcactagataggggggtgatattagaagaggtgactt

SEQ ID NO: 303768 - DNA, 1288 bp, Homo sapiens
  misc_feature (986)..(986): n is a, c, g, or t
  misc_feature (991)..(991): n is a, c, g, or t
gtttgtgttgctccttttcgtctgcttctggccttttgaagatgattatatttatttttttgtggactacttgactgtgaggacccacaggtggacaaaagcaggcttgtaaatcgtcggcagtaattacggtctaggtacgaggctgggtgttcgggtgaacaggacccgtcgccatgggccgtgtgatccgtggacagaggaagggcgccgggtctgtgttccgcgcgcacgtgaagcaccgtaaaggcgctgcgcgcctgcgcgccgtggatttcgctgagcggcacggctacatcaagggcatcgtcaaggacatcatccacgacccgggccgcggcgcgcccctcgccaaggtggtcttccgggatccgtatcggtttaagaagcggacggagctgttcattgccgccgagggcattcacacgggccagtttgtgtattgcggcaagaaggcccagctcaacattggcaatgtgctccctgtgggcaccatgcctgagggtacaatcgtgtgctgcctggaggagaagcctggagaccgtggcaagctggcccgggcatcagggaactatgccaccgttatctcccacaaccctgagaccaagaagacccgtgtgaagctgccctccggctccaagaaggttatctcctcagccaacagagctgtggttggtgtggtggctggaggtggccgaattgacaaacccatcttgaaggctggccgggcgtaccacaaatataaggcaaagaggaactgctggccacgagtacggggtgtggccatgaatcctgtggagcatccttttggaggtggcaaccaccagcacatcggcaagccctccaccatccgcagagatgcccctgctggccgcaaagtgggtctcattgctgcccgccggactggacgtctccggggaaccaagactgtgcaggagaaagagaactagtgctgagggcctcaataaagttcgtgtttatgcaancacancaacacacacacacagacacccaaacaaaggacacacaacaaaccaaaacacacaaaaacaaaaagggagcgggcaaaaaaaatacacaagggagcccagcacagccaccaccgtcacacaagccgcccaaaagacgagccaaattacacagcaagcgccgccggtataaacccggtggctgaaaccatgaagcggagtattagagacacctcatcgcggcagcgaacatagcaccaccccgcgacatacaggccgcacaaatatccacatcctggaccacaccacatttgcctaat

SEQ ID NO: 303769 - DNA, 1024 bp, Homo sapiens
gtttgtgttgctccttttcgtctgcttctggccttttgaagatgattatatttatttttttgtggactacttgactgtgaggacccacaggtggacaaaagcaggcttgtaaatcgtcggcagtaattacggtctaggtacgaggctgggtgttcgggtgaacaggacccgtcgccatgggccgtgtgatccgtggacagaggaagggcgccgggtctgtgttccgcgcgcacgtgaagcaccgtaaaggcgctgcgcgcctgcgcgccgtggatttcgctgagcggcacggctacatcaagggcatcgtcaaggacatcatccacgacccgggccgcggcgcgcccctcgccaaggtggtcttccgggatccgtatcggtttaagaagcggacggagctgttcattgccgccgagggcattcacacgggccagtttgtgtattgcggcaagaaggcccagctcaacattggcaatgtgctccctgtgggcaccatgcctgagggtacaatcgtgtgctgcctggaggagaagcctggagaccgtggcaagctggcccgggcatcagggaactatgccaccgttatctcccacaaccctgagaccaagaagacccgtgtgaagctgccctccggctccaagaaggttatctcctcagccaacagagctgtggttggtgtggtggctggaggtggccgaattgacaaacccatcttgaaggctggccgggcgtaccacaaatataaggcaaagaggaactgctggccacgagtacggggtgtggccatgaatcctgtggagcatccttttggaggtggcaaccaccagcacatcggcaagccctccaccatccgcagagatgcccctgctggccgcaaagtgggtctcattgctgcccgccggactggacgtctccggggaaccaagactgtgcaggagaaagagaactagtgctgagggcctcaataaagtttgtgtttatgccaaaaaaaaaagtcgacgcggccgcgaatttagtagtagta

SEQ ID NO: 303770 - DNA, 1356 bp, Homo sapiens
gtttgtgttgctccttttcgtctgcttctggccttttgaagatgattatatttatttttttgtggactacttgactgtgaggacccacaggtggacaaaagcaggcttgtaaatcgtcggcagtaattacggtctaggtacgaggctgggtgttcgggtgaacaggacccgtcgccatgggccgtgtgatccgtggacagaggaagggcgccgggtctgtgttccgcgcgcacgtgaagcaccgtaaaggcgctgcgcgcctgcgcgccgtggatttcgctgagcggcacggctacatcaagggcatcgtcaaggacatcatccacgacccgggccgcggcgcgcccctcgccaaggtggtcttccgggatccgtatcggtttaagaagcggacggagctgttcattgccgccgagggcattcacacgggccagtttgtgtattgcggcaagaaggcccagctcaacattggcaatgtgctccctgtgggcaccatgcctgagggtacaatcgtgtgctgcctggaggagaagcctggagaccgtggcaagctggcccgggcatcagggaactatgccaccgttatctcccacaaccctgagaccaagaagacccgtgtgaagctgccctccggctccaagaaggttatctcctcagccaacagagctgtggttggtgtggtggctggaggtggccgaattgacaaacccatcttgaaggctggccgggcgtaccacaaatataaggcaaagaggaactgctggccacgagtacggggtgtggccatgaatcctgtggagcatccttttggaggtggcaaccaccagcacatcggcaagccctccaccatccgcagagatgcccctgctggccgcaaagtgggtctcattgctgcccgccggactggacgtctccggggaaccaagactgtgcaggagaaagagaactagtgctgagggcctcaataaacgttgtgttatgccaccttgaaacactaaaaaaaaagacaagcgagaacaacacacaacaagaaaaacaaagtaaagaagacatagagaggacagcaccagaaccagagatataaccaggatgagcgggcgcggagctgagctacaaatttgtatccctcagtgaagcgaccacaattattcgcgagcacaccaaagtatttatatgaacaaataaagtaccccctcgatagctcaagtcaaatacaagcaacaagcgccgcgcgcccgtgataagaagccgtgcggcttcgaaaagaattcgtttcatggcgtacattaggagcaaccccaccatctggggggcgccagacagctggaccacaccaccgagaattagcctcctagg

SEQ ID NO: 303771 - DNA, 1355 bp, Homo sapiens
gtttgtgttgctccttttcgtctgcttctggccttttgaagatgattatatttatttttttgtggactacttgactgtgaggacccacaggtggacaaaagcaggcttgtaaatcgtcggcagtaattacggtctaggtacgaggctgggtgttcgggtgaacaggacccgtcgccatgggccgtgtgatccgtggacagaggaagggcgccgggtctgtgttccgcgcgcacgtgaagcaccgtaaaggcgctgcgcgcctgcgcgccgtggatttcgctgagcggcacggctacatcaagggcatcgtcaaggacatcatccacgacccgggccgcggcgcgcccctcgccaaggtggtcttccgggatccgtatcggtttaagaagcggacggagctgttcattgccgccgagggcattcacacgggccagtttgtgtattgcggcaagaaggcccagctcaacattggcaatgtgctccctgtgggcaccatgcctgagggtacaatcgtgtgctgcctggaggagaagcctggagaccgtggcaagctggcccgggcatcagggaactatgccaccgttatctcccacaaccctgagaccaagaagacccgtgtgaagctgccctccggctccaagaaggttatctcctcagccaacagagctgtggttggtgtggtggctggaggtggccgaattgacaaacccatcttgaaggctggccgggcgtaccacaaatataaggcaaagaggaactgctggccacgagtacggggtgtggccatgaatcctgtggagcatccttttggaggtggcaaccaccagcacatcggcaagccctccaccatccgcagagatgcccctgctggccgcaaagtgggtctcattgctgcccgccggactggacgtctccggggaaccaagactgtgcaggagaaagagaactagtgctgagggcctcaataaagtttgtgtttatgccaaaaaaaaaaaaaaaaaaaaaaaacaaaaaaaaaaaaaaaaaaaaaaaaaaaaaaaaaaaaaaaaaaaaaaaaaaaaaaaaaaaaaaaaaaaaaaaaaaggggggggggggtatgaaaaaattttcggggaagcggcgcaacaataaatgagcgtcacaaattttatgtaaataagaggggcacctgattgagggatcatataaataaaagagggagggggggattaacaaagagcgggaggcaaaaacagggttgtaatataggaagaccacactcatgtgggggaaatagggacacacacgaaaatagggggggaaaaaaagaggtatgggaaacaggtatcaggggagaatgttagctgtagaatagg

SEQ ID NO: 303772 - DNA, 1403 bp, Homo sapiens
  misc_feature (1403)..(1403): n is a, c, g, or t
gtttgtgttgctccttttcgtctgcttctggccttttgaagatgattatatttatttttttgtggactacttgactgtgaggacccacaggtggacaaaagcaggcttgtaaatcgtcggcagtaattacggtctaggtacgaggctgggtgttcgggtgaacaggacccgtcgccatgggccgtgtgatccgtggacagaggaagggcgccgggtctgtgttccgcgcgcacgtgaagcaccgtaaaggcgctgcgcgcctgcgcgccgtggatttcgctgagcggcacggctacatcaagggcatcgtcaaggacatcatccacgacccgggccgcggcgcgcccctcgccaaggtggtcttccgggatccgtatcggtttaagaagcggacggagctgttcattgccgccgagggcattcacacgggccagtttgtgtattgcggcaagaaggcccagctcaacattggcaatgtgctccctgtgggcaccatgcctgagggtacaatcgtgtgctgcctggaggagaagcctggagaccgtggcaagctggcccgggcatcagggaactatgccaccgttatctcccacaaccctgagaccaagaagacccgtgtgaagctgccctccggctccaagaaggttatctcctcagccaacagagctgtggttggtgtggtggctggaggtggccgaattgacaaacccatcttgaaggctggccgggcgtaccacaaatataaggcaaagaggaactgctggccacgagtacggggtgtggccatgaatcctgtggagcatccttttggaggtggcaaccaccagcacatcggcaagccctccaccatccgcagagatgcccctgctggccgcaaagtgggtctcattgctgcccgccggactggacgtctccggggaaccaagactgtgcaggagaaagagaactagtgctgagggcctcaataaagttgtgtttatgccaaaaaaaaaaccaaaacaacaacaaaaaaaaaaaaaagaaactcgacaaacaaaaaaaggggggggacgcgacaaaaaatcagcctagcggcggcccacaaagcagacgccaccaccttcgtggaagaaaaggcaaccaaagagaagcgagaccaaccagacacccggcgagcacgaacacaacgcgagcacgaggagagacccacggcggtatgagaaacaacaacacggcgcgggcacacggcaccaccaccagcaatgacgaggaaaaaactgagtgatggtcaaccgcgttctgcgcggccaaggccggaagaaatagccgccggaaaacgcgaagacagaccgaacagcaacaagagaccatcagtgaacgacgcaaacaggcacgaccgcaccagacaccagtcaggcaccgcn

SEQ ID NO: 303773 - DNA, 1056 bp, Homo sapiens
  misc_feature (987)..(987): n is a, c, g, or t
gtttgtgttgctccttttcgtctgcttctggccttttgaagatgattatatttatttttttgtggactacttgactgtgaggacccacaggtggacaaaagcaggcttgtaaatcgtcggcagtaattacggtctaggtacgaggctgggtgttcgggtgaacaggacccgtcgccatgggccgtgtgatccgtggacagaggaagggcgccgggtctgtgttccgcgcgcacgtgaagcaccgtaaaggcgctgcgcgcctgcgcgccgtggatttcgctgagcggcacggctacatcaagggcatcgtcaaggacatcatccacgacccgggccgcggcgcgcccctcgccaaggtggtcttccgggatccgtatcggtttaagaagcggacggagctgttcattgccgccgagggcattcacacgggccagtttgtgtattgcggcaagaaggcccagctcaacattggcaatgtgctccctgtgggcaccatgcctgagggtacaatcgtgtgctgcctggaggagaagcctggagaccgtggcaagctggcccgggcatcagggaactatgccaccgttatctcccacaaccctgagaccaagaagacccgtgtgaagctgccctccggctccaagaaggttatctcctcagccaacagagctgtggttggtgtggtggctggaggtggccgaattgacaaacccatcttgaaggctggccgggcgtaccacaaatataaggcaaagaggaactgctggccacgagtacggggtgtggccatgaatcctgtggagcatccttttggaggtggcaaccaccagcacatcggcaagccctccaccatccgcagagatgcccctgctggccgcaaagtgggtctcattgctgcccgccggactggacgtctccggggaaccaagactgtgcaggagaaagagaactagtgctgagggcctcaataaagttgtgtttatgccaaanaaaagaaaataacggaaaagtcgaacaccacagaagaacaaggagatactagctgaagagagaagaggc

SEQ ID NO: 303774 - DNA, 1068 bp, Homo sapiens
gtttgtgttgctccttttcgtctgcttctggccttttgaagatgattatatttatttttttgtggactacttgactgtgaggacccacaggtggacaaaagcaggcttgtaaatcgtcggcagtaattacggtctaggtacgaggctgggtgttcgggtgaacaggacccgtcgccatgggccgtgtgatccgtggacagaggaagggcgccgggtctgtgttccgcgcgcacgtgaagcaccgtaaaggcgctgcgcgcctgcgcgccgtggatttcgctgagcggcacggctacatcaagggcatcgtcaaggacatcatccacgacccgggccgcggcgcgcccctcgccaaggtggtcttccgggatccgtatcggtttaagaagcggacggagctgttcattgccgccgagggcattcacacgggccagtttgtgtattgcggcaagaaggcccagctcaacattggcaatgtgctccctgtgggcaccatgcctgagggtacaatcgtgtgctgcctggaggagaagcctggagaccgtggcaagctggcccgggcatcagggaactatgccaccgttatctcccacaaccctgagaccaagaagacccgtgtgaagctgccctccggctccaagaaggttatctcctcagccaacagagctgtggttggtgtggtggctggaggtggccgaattgacaaacccatcttgaaggctggccgggcgtaccacaaatataaggcaaagaggaactgctggccacgagtacggggtgtggccatgaatcctgtggagcatccttttggaggtggcaaccaccagcacatcggcaagccctccaccatccgcagagatgcccctgctggccgcaaagtgggtctcattgctgcccgccggactggacgtctccggggaaccaagactgtgcaggagaaagagaactagtgctgagggcctcaataaagtttgtgtttatgccaaaaaaaagatagggagaaaaaaagttttgcccatagggggtccgattacaattgtcgaaccgccggaaatttagtatagtata

SEQ ID NO: 303775 - DNA, 1126 bp, Homo sapiens
  misc_feature (985)..(985): n is a, c, g, or t
gtttgtgttgctccttttcgtctgcttctggccttttgaagatgattatatttatttttttgtggactacttgactgtgaggacccacaggtggacaaaagcaggcttgtaaatcgtcggcagtaattacggtctaggtacgaggctgggtgttcgggtgaacaggacccgtcgccatgggccgtgtgatccgtggacagaggaagggcgccgggtctgtgttccgcgcgcacgtgaagcaccgtaaaggcgctgcgcgcctgcgcgccgtggatttcgctgagcggcacggctacatcaagggcatcgtcaaggacatcatccacgacccgggccgcggcgcgcccctcgccaaggtggtcttccgggatccgtatcggtttaagaagcggacggagctgttcattgccgccgagggcattcacacgggccagtttgtgtattgcggcaagaaggcccagctcaacattggcaatgtgctccctgtgggcaccatgcctgagggtacaatcgtgtgctgcctggaggagaagcctggagaccgtggcaagctggcccgggcatcagggaactatgccaccgttatctcccacaaccctgagaccaagaagacccgtgtgaagctgccctccggctccaagaaggttatctcctcagccaacagagctgtggttggtgtggtggctggaggtggccgaattgacaaacccatcttgaaggctggccgggcgtaccacaaatataaggcaaagaggaactgctggccacgagtacggggtgtggccatgaatcctgtggagcatccttttggaggtggcaaccaccagcacatcggcaagccctccaccatccgcagagatgcccctgctggccgcaaagtgggtctcattgctgcccgccggactggacgtctccggggaaccaagactgtgcggagaagagaactagtgctgagggcctcataaagttgggttatgcccaaaanaaaaacatacaacacaacaaaaaacggggggcgcaaaaacacaagggccaccagcccctctcttagggccaaggggacataacaggcggggaacagcggaccgggtgttgcaccaccggggggacccgacgcacaaacagg

SEQ ID NO: 303776 - DNA, 979 bp, Homo sapiens
gtttgtgttgctccttttcgtctgcttctggccttttgaagatgattatatttatttttttgtggactacttgactgtgaggacccacaggtggacaaaagcaggcttgtaaatcgtcggcagtaattacggtctaggtacgaggctgggtgttcgggtgaacaggacccgtcgccatgggccgtgtgatccgtggacagaggaagggcgccgggtctgtgttccgcgcgcacgtgaagcaccgtaaaggcgctgcgcgcctgcgcgccgtggatttcgctgagcggcacggctacatcaagggcatcgtcaaggacatcatccacgacccgggccgcggcgcgcccctcgccaaggtggtcttccgggatccgtatcggtttaagaagcggacggagctgttcattgccgccgagggcattcacacgggccagtttgtgtattgcggcaagaaggcccagctcaacattggcaatgtgctccctgtgggcaccatgcctgagggtacaatcgtgtgctgcctggaggagaagcctggagaccgtggcaagctggcccgggcatcagggaactatgccaccgttatctcccacaaccctgagaccaagaagacccgtgtgaagctgccctccggctccaagaaggttatctcctcagccaacagagctgtggttggtgtggtggctggaggtggccgaattgacaaacccatcttgaaggctggccgggcgtaccacaaatataaggcaaagaggaactgctggccacgagtacggggtgtggccatgaatcctgtggagcatccttttggaggtggcaaccaccagcacatcggcaagccctccaccatccgcagagatgcccctgctggccgcaaagtgggtctcattgctgcccgccggactggacgtctccggggaaccaagactgtgcggagaagagaactagtgctgagggcctcataaagttgggttatgcc

SEQ ID NO: 303777 - DNA, 1044 bp, Homo sapiens
  misc_feature (951)..(951): n is a, c, g, or t
gtttgtgttgctccttttcgtctgcttctggccttttgaagatgattatatttatttttttgtggactacttgactgtgaggacccacaggtggacaaaagcaggcttgtaaatcgtcggcagtaattacggtctaggtacgaggctgggtgttcgggtgaacaggacccgtcgccatgggccgtgtgatccgtggacagaggaagggcgccgggtctgtgttccgcgcgcacgtgaagcaccgtaaaggcgctgcgcgcctgcgcgccgtggatttcgctgagcggcacggctacatcaagggcatcgtcaaggacatcatccacgacccgggccgcggcgcgcccctcgccaaggtggtcttccgggatccgtatcggtttaagaagcggacggagctgttcattgccgccgagggcattcacacgggccagtttgtgtattgcggcaagaaggcccagctcaacattggcaatgtgctccctgtgggcaccatgcctgagggtacaatcgtgtgctgcctggaggagaagcctggagaccgtggcaagctggcccgggcatcagggaactatgccaccgttatctcccacaaccctgagaccaagaagacccgtgtgaagctgccctccggctccaagaaggttatctcctcagccaacagagctgtggttggtgtggtggctggaggtggccgaattgacaaacccatcttgaaggctggccgggcgtaccacaaatataaggcaaagaggaactgctggccacgagtacggggtgtggccatgaatcctgtggagcatccttttggaggtggcaaccaccagcacatcggcaagccctccaccatccgcagagatgcccctgctggccgcaaagtgggtctcattgctgcccgccggactggacgtctccggggaaccaagactgtgcggagaaagaaactagggntgaggccctcaataaagttggggttttgccctataataatcttcttttccttatttctataagtcttcatttctctagtatctagtgatttat

SEQ ID NO: 303778 - DNA, 1316 bp, Homo sapiens
gtttgtgttgctccttttcgtctgcttctggccttttgaagatgattatatttatttttttgtggactacttgactgtgaggacccacaggtggacaaaagcaggcttgtaaatcgtcggcagtaattacggtctaggtacgaggctgggtgttcgggtgaacaggacccgtcgccatgggccgtgtgatccgtggacagaggaagggcgccgggtctgtgttccgcgcgcacgtgaagcaccgtaaaggcgctgcgcgcctgcgcgccgtggatttcgctgagcggcacggctacatcaagggcatcgtcaaggacatcatccacgacccgggccgcggcgcgcccctcgccaaggtggtcttccgggatccgtatcggtttaagaagcggacggagctgttcattgccgccgagggcattcacacgggccagtttgtgtattgcggcaagaaggcccagctcaacattggcaatgtgctccctgtgggcaccatgcctgagggtacaatcgtgtgctgcctggaggagaagcctggagaccgtggcaagctggcccgggcatcagggaactatgccaccgttatctcccacaaccctgagaccaagaagacccgtgtgaagctgccctccggctccaagaaggttatctcctcagccaacagagctgtggttggtgtggtggctggaggtggccgaattgacaaacccatcttgaaggctggccgggcgtaccacaaatataaggcaaagaggaactgctggccacgagtacggggtgtggccatgaatcctgtggagcatccttttggaggtggcaaccaccagcacatcggcaagccctccaccatccgcagagatgcccctgctggccgcaaagtgggtctcattgctgcccgccggactggacgtctccggggaaccaagactgtgcaggagaaagagaactagtgctgagggcctcaataaagttctgtgctttatgccaaaaaaaaaaacaaacacaccacaatcatcaaacaaacaatcatcgaacgctcttatttcccgcagctcccaacaaactaccataactacaacgtggccccatcggacccacagcggctagtctccatcgttggaccccaagagtatcatgtctgcgctacccaccgccggtccaaaacccctcacggggctctccccattatacgatccacgctcgtatagacaatctccccagaaaagcgccaagggttaacccgtcactaagacgcacacgcaacgcgcaaccccgctctacggctcacaccgctccggccgaacctcactagccac

SEQ ID NO: 303779 - DNA, 1274 bp, Homo sapiens
  misc_feature (989)..(989): n is a, c, g, or t
  misc_feature (992)..(992): n is a, c, g, or t
  misc_feature (995)..(995): n is a, c, g, or t
gtttgtgttgctccttttcgtctgcttctggccttttgaagatgattatatttatttttttgtggactacttgactgtgaggacccacaggtggacaaaagcaggcttgtaaatcgtcggcagtaattacggtctaggtacgaggctgggtgttcgggtgaacaggacccgtcgccatgggccgtgtgatccgtggacagaggaagggcgccgggtctgtgttccgcgcgcacgtgaagcaccgtaaaggcgctgcgcgcctgcgcgccgtggatttcgctgagcggcacggctacatcaagggcatcgtcaaggacatcatccacgacccgggccgcggcgcgcccctcgccaaggtggtcttccgggatccgtatcggtttaagaagcggacggagctgttcattgccgccgagggcattcacacgggccagtttgtgtattgcggcaagaaggcccagctcaacattggcaatgtgctccctgtgggcaccatgcctgagggtacaatcgtgtgctgcctggaggagaagcctggagaccgtggcaagctggcccgggcatcagggaactatgccaccgttatctcccacaaccctgagaccaagaagacccgtgtgaagctgccctccggctccaagaaggttatctcctcagccaacagagctgtggttggtgtggtggctggaggtggccgaattgacaaacccatcttgaaggctggccgggcgtaccacaaatataaggcaaagaggaactgctggccacgagtacggggtgtggccatgaatcctgtggagcatccttttggaggtggcaaccaccagcacatcggcaagccctccaccatccgcagagatgcccctgctggccgcaaagtgggtctcattgctgcccgccggactggacgtctccggggaaccaagactgtgccggagaaagagaactagtgctgagggcctcaataaagtttgtgtttatgccaaaancancangatagaacgcacaaaaacacaagagggcagccacacaataatactcggggaggcacagataagataaccaccatttgtaaaagggccaccaatagagaacatcattaaaagacgcgctataacaagacaggacaaacaccaggcctgtataaacacatttgttgagaggcacacaccacatacgtcgaacattaataagtgtagactcactcgctgttactgatatatcgaacatcatctgagacaagtgcacgctctagatcgataggaagaacctga

SEQ ID NO: 303780 - DNA, 1171 bp, Homo sapiens
  misc_feature (915)..(915): n is a, c, g, or t
  misc_feature (998)..(998): n is a, c, g, or t
  misc_feature (1010)..(1011): n is a, c, g, or t
gtttgtgttgctccttttcgtctgcttctggccttttgaagatgattatatttatttttttgtggactacttgactgtgaggacccacaggtggacaaaagcaggcttgtaaatcgtcggcagtaattacggtctaggtacgaggctgggtgttcgggtgaacaggacccgtcgccatgggccgtgtgatccgtggacagaggaagggcgccgggtctgtgttccgcgcgcacgtgaagcaccgtaaaggcgctgcgcgcctgcgcgccgtggatttcgctgagcggcacggctacatcaagggcatcgtcaaggacatcatccacgacccgggccgcggcgcgcccctcgccaaggtggtcttccgggatccgtatcggtttaagaagcggacggagctgttcattgccgccgagggcattcacacgggccagtttgtgtattgcggcaagaaggcccagctcaacattggcaatgtgctccctgtgggcaccatgcctgagggtacaatcgtgtgctgcctggaggagaagcctggagaccgtggcaagctggcccgggcatcagggaactatgccaccgttatctcccacaaccctgagaccaagaagacccgtgtgaagctgccctccggctccaagaaggttatctcctcagccaacagagctgtggttggtgtggtggctggaggtggccgaattgacaaacccatcttgaaggctggccgggcgtaccacaaatataaggcaaagaggaactgctggccacgagtacggggtgtggccatgaatcctgtggagcatccttttggaggtggcaaccaccagcacatcggcaagccctccaccatccgcagagatgcccctgctggccgcaaagtgggtctcattgctgcccgccggactggacgtctcnggggaaaccaagactgtgcaggagaaagagaactagtgctgagggcctcaataaagttgtgtttatgccaaccgaaaaaaaanaacaaacacacnnaaaaacaaaactgttttgggggccccctgggcctcagaaaaagttttttaaaaccattcggtttggggcggggggcccatgggttcagtgacctgtgctcacgcggtgtcccaggagacacccgggccgaaaacggctgggttttctcccaattaaaagc

SEQ ID NO: 303781 - DNA, 984 bp, Homo sapiens; identical to SEQ ID NO: 303736

SEQ ID NO: 303782 - DNA, 1161 bp, Homo sapiens
gtttgtgttgctccttttcgtctgcttctggccttttgaagatgattatatttatttttttgtggactacttgactgtgaggacccacaggtggacaaaagcaggcttgtaaatcgtcggcagtaattacggtctaggtacgaggctgggtgttcgggtgaacaggacccgtcgccatgggccgtgtgatccgtggacagaggaagggcgccgggtctgtgttccgcgcgcacgtgaagcaccgtaaaggcgctgcgcgcctgcgcgccgtggatttcgctgagcggcacggctacatcaagggcatcgtcaaggacatcatccacgacccgggccgcggcgcgcccctcgccaaggtggtcttccgggatccgtatcggtttaagaagcggacggagctgttcattgccgccgagggcattcacacgggccagtttgtgtattgcggcaagaaggcccagctcaacattggcaatgtgctccctgtgggcaccatgcctgagggtacaatcgtgtgctgcctggaggagaagcctggagaccgtggcaagctggcccgggcatcagggaactatgccaccgttatctcccacaaccctgagaccaagaagacccgtgtgaagctgccctccggctccaagaaggttatctcctcagccaacagagctgtggttggtgtggtggctggaggtggccgaattgacaaacccatcttgaaggctggccgggcgtaccacaaatataaggcaaagaggaactgctggccacgagtacggggtgtggccatgaatcctgtggagcatccttttggaggtggcaaccaccagcacatcggcaagccctccaccatccgcagagatgcccctgctggccgcaaagtgggtctcattgctgcccgccggactggacgtctccggggaaccaagactgtgcaggagaaagagaactagtgctgagggcctcaataaagtttgtgtttatgccaaaaaaaaaaaaaaaaaaaaaaaaaaaaaaaacgatgttgcgggcgcgcgaccggggcccctcggagaaagactcttcgcagaaaccctatgcgggtggggcgcgccggggggcccagaggagaggcaaggggaaacaggggccaaagagggggttcccgagaggagacaaccggga

SEQ ID NO: 303783 - DNA, 1101 bp, Homo sapiens
gtttgtgttgctccttttcgtctgcttctggccttttgaagatgattatatttatttttttgtggactacttgactgtgaggacccacaggtggacaaaagcaggcttgtaaatcgtcggcagtaattacggtctaggtacgaggctgggtgttcgggtgaacaggacccgtcgccatgggccgtgtgatccgtggacagaggaagggcgccgggtctgtgttccgcgcgcacgtgaagcaccgtaaaggcgctgcgcgcctgcgcgccgtggatttcgctgagcggcacggctacatcaagggcatcgtcaaggacatcatccacgacccgggccgcggcgcgcccctcgccaaggtggtcttccgggatccgtatcggtttaagaagcggacggagctgttcattgccgccgagggcattcacacgggccagtttgtgtattgcggcaagaaggcccagctcaacattggcaatgtgctccctgtgggcaccatgcctgagggtacaatcgtgtgctgcctggaggagaagcctggagaccgtggcaagctggcccgggcatcagggaactatgccaccgttatctcccacaaccctgagaccaagaagacccgtgtgaagctgccctccggctccaagaaggttatctcctcagccaacagagctgtggttggtgtggtggctggaggtggccgaattgacaaacccatcttgaaggctggccgggcgtaccacaaatataaggcaaagaggaactgctggccacgagtacggggtgtggccatgaatcctgtggagcatccttttggaggtggcaaccaccagcacatcggcaagccctccaccatccgcagagatgcccctgctggccgcaaagtgggtctcattgctgcccgccggactggacgtttaccggcaccgagactgtgccgcaaggcgactatgccggggctcataagttggttttcccccagaaaaaaggggggcgcaaaagccccgaggcacttcggtcccgttttaaagcggcacatggggataaaagagcgggcgttaacggtggacactggttggagccctggggaccccacaacgggaaagg

SEQ ID NO: 303784 - DNA, 1679 bp, Homo sapiens
gtttgtgttgctccttttcgtctgcttctggccttttgaagatgattatatttatttttttgtggactacttgactgtgaggacccacaggtggacaaaagcaggcttgtaaatcgtcggcagtaattacggtctaggtacgaggctgggtgttcgggtgaacaggacccgtcgccatgggccgtgtgatccgtggacagaggaagggcgccgggtctgtgttccgcgcgcacgtgaagcaccgtaaaggcgctgcgcgcctgcgcgccgtggatttcgctgagcggcacggctacatcaagggcatcgtcaaggacatcatccacgacccgggccgcggcgcgcccctcgccaaggtggtcttccgggatccgtatcggtttaagaagcggacggagctgttcattgccgccgagggcattcacacgggccagtttgtgtattgcggcaagaaggcccagctcaacattggcaatgtgctccctgtgggcaccatgcctgagggtacaatcgtgtgctgcctggaggagaagcctggagaccgtggcaagctggcccgggcatcagggaactatgccaccgttatctcccacaaccctgagaccaagaagacccgtgtgaagctgccctccggctccaagaaggttatctcctcagccaacagagctgtggttggtgtggtggctggaggtggccgaattgacaaacccatcttgaaggctggccgggcgtaccacaaatataaggcaaagaggaactgctggccacgagtacggggtgtggccatgaatcctgtggagcatccttttggaggtggcaaccaccagcacatcggcaagccctccaccatccgcagagatgcccctgctggccgcaaagtgggtctcattgctgcccgccggactggacgtctccggggaaccaagactgtgcaggagaaagagaactagtgctgagggcctcaataaagtttgtgtttatgccaaaaaacaaaaaacaaaaaaaacaaaaacaaaaaacaaaacaaaaacaccaaaaaaaaaaggggggggagaaaaaaactccccacaagaggggcacacgaacaagagacacacaccagacatagtaacacaaagaggggccacacaaggaaggaaaaacaaacacgcgaagaaagaggaacggaaaaaaaaaaaaaaaaagagaagaacacaagagaaacagaaggaaaaaccacacaaaagcacgcaaataccacaccgggggcaaacaaactggggacacaaccacgccaacgagacagcagaacaggagcacatcaagagaacagaagcgaccaggcgcgcaaacaccgcgcgcccaacacatcacaccccgataccaaaaacgaaacaaaagacaacctaccccagaacagacatataacacaagcggcctagacaataaagaaaacaacacaaaacacacaacaaccagccgaaaacgacacgacgaaaacagcaagaagacgaaagggagagcgaggagagaaggaggagagaagagaggcagaggcaacaggaaaaggggagggggaggaggagaggaggagagggagaaagcgcaagggagaggggacaagggggaagaaaggatagaggagaggggaaggaggagaggagagggaggagagagggggaggggagagacaaggggag

SEQ ID NO: 303785 - DNA, 1888 bp, Homo sapiens
gtttgtgttgctccttttcgtctgcttctggccttttgaagatgattatatttatttttttgtggactacttgactgtgaggacccacaggtggacaaaagcaggcttgtaaatcgtcggcagtaattacggtctaggtacgaggctgggtgttcgggtgaacaggacccgtcgccatgggccgtgtgatccgtggacagaggaagggcgccgggtctgtgttccgcgcgcacgtgaagcaccgtaaaggcgctgcgcgcctgcgcgccgtggatttcgctgagcggcacggctacatcaagggcatcgtcaaggacatcatccacgacccgggccgcggcgcgcccctcgccaaggtggtcttccgggatccgtatcggtttaagaagcggacggagctgttcattgccgccgagggcattcacacgggccagtttgtgtattgcggcaagaaggcccagctcaacattggcaatgtgctccctgtgggcaccatgcctgagggtacaatcgtgtgctgcctggaggagaagcctggagaccgtggcaagctggcccgggcatcagggaactatgccaccgttatctcccacaaccctgagaccaagaagacccgtgtgaagctgccctccggctccaagaaggttatctcctcagccaacagagctgtggttggtgtggtggctggaggtggccgaattgacaaacccatcttgaaggctggccgggcgtaccacaaatataaggcaaagaggaactgctggccacgagtacggggtgtggccatgaatcctgtggagcatccttttggaggtggcaaccaccagcacatcggcaagccctccaccatccgcagagatgcccctgctggccgcaaagtgggtctcattgctgcccgccggactggacgtctccggggaaccaagactgtgcaggagaaagagaactagtgctgagggcctcaataaagtttgtgtttatgccaaaaacaaaaaaaaaaaaaaaaaaaaaccacaacacaaaaaaaacacgacggggggcgccaccagaacgcccccgcgggggccccaccccccgccccccccactcccgggacaaaagggggcccccagagggggcccgccccatacaaaacaacggcacacgggcgcccacacatccaaaaccgcacaccaacggggcaaccacgcgaaacagggaaaaccacggacaaaacaccccaccacacgcggcagcgcgccacacaaatcgggagcacaacaaaaccccacacaagagagcccattaaagcgcccccaacacggcgaaacaccacaaagaatcaacacacgcgctcaaacgtggctaccaccaccacaacacagacaaaagccctccacccccgaccaacccaccctgggccaaatacgagggattaacatccctccccccggacaccatcttttacccccaggagcatacacagtaaacacacccgccgagcccaaccgacgctccaacaataccgagcaaccaacaccatgccaagcacgagccgcaccccactccccacaaaacagaatgccacacaccacacagcagccaaagccgcagaaggagcagcgcgcgagcctgcacccgacagcgccaggatcccaaaacaggaccaatgaacaaaagagagaccgcgcagaagagggcgacgacggccgcaccggccgcgaccaccgctcggggacagagcgacgccaaccaccgacagacgagcgacacgcgagacaccgcggcgagaagcaacaacaacgaaacagagcagaacgcgggtggagccgcactagctcgagggaatcaataaggagctgagacagacgacaacggaagacgcatgaccacaaacgccggatgcaac

SEQ ID NO: 303786 - DNA, 1124 bp, Homo sapiens
gtttgtgttgctccttttcgtctgcttctggccttttgaagatgattatatttatttttttgtggactacttgactgtgaggacccacaggtggacaaaagcaggcttgtaaatcgtcggcagtaattacggtctaggtacgaggctgggtgttcgggtgaacaggacccgtcgccatgggccgtgtgatccgtggacagaggaagggcgccgggtctgtgttccgcgcgcacgtgaagcaccgtaaaggcgctgcgcgcctgcgcgccgtggatttcgctgagcggcacggctacatcaagggcatcgtcaaggacatcatccacgacccgggccgcggcgcgcccctcgccaaggtggtcttccgggatccgtatcggtttaagaagcggacggagctgttcattgccgccgagggcattcacacgggccagtttgtgtattgcggcaagaaggcccagctcaacattggcaatgtgctccctgtgggcaccatgcctgagggtacaatcgtgtgctgcctggaggagaagcctggagaccgtggcaagctggcccgggcatcagggaactatgccaccgttatctcccacaaccctgagaccaagaagacccgtgtgaagctgccctccggctccaagaaggttatctcctcagccaacagagctgtggttggtgtggtggctggaggtggccgaattgacaaacccatcttgaaggctggccgggcgtaccacaaatataaggcaaagaggaactgctggccacgagtacggggtgtggccatgaatcctgtggagcatccttttggaggtggcaaccaccagcacatcggcaagccctccaccatccgcagagatgcccctgctggccgcaaagtgggtctcattgctgcccgccggactggacgtctccggggaaccaagactgtgcaggagaaagagaactagtgctgagggcctcaataaagtttgtgtttatgcccgaaaaaaaaacaatcacaaaaaaaactctgtgtggcgcggcgggccctcgaaaaagttttgtagaaacccccgttggggggcccgggcccctggtgggacctgggcaaggggtccgggaatccgggccacacaggcggg

SEQ ID NO: 303787 - DNA, 1418 bp, Homo sapiens
gtttgtgttgctccttttcgtctgcttctggccttttgaagatgattatatttatttttttgtggactacttgactgtgaggacccacaggtggacaaaagcaggcttgtaaatcgtcggcagtaattacggtctaggtacgaggctgggtgttcgggtgaacaggacccgtcgccatgggccgtgtgatccgtggacagaggaagggcgccgggtctgtgttccgcgcgcacgtgaagcaccgtaaaggcgctgcgcgcctgcgcgccgtggatttcgctgagcggcacggctacatcaagggcatcgtcaaggacatcatccacgacccgggccgcggcgcgcccctcgccaaggtggtcttccgggatccgtatcggtttaagaagcggacggagctgttcattgccgccgagggcattcacacgggccagtttgtgtattgcggcaagaaggcccagctcaacattggcaatgtgctccctgtgggcaccatgcctgagggtacaatcgtgtgctgcctggaggagaagcctggagaccgtggcaagctggcccgggcatcagggaactatgccaccgttatctcccacaaccctgagaccaagaagacccgtgtgaagctgccctccggctccaagaaggttatctcctcagccaacagagctgtggttggtgtggtggctggaggtggccgaattgacaaacccatcttgaaggctggccgggcgtaccacaaatataaggcaaagaggaactgctggccacgagtacggggtgtggccatgaatcctgtggagcatccttttggaggtggcaaccaccagcacatcggcaagccctccaccatccgcagagatgcccctgctggccgcaaagtgggtctcattgctgcccgccggactggacgtctccggggaaccaagactgtgcaggagaaagagaactagtgctgagggcctcaataaagtttgtgtttatgccaaaaaaaaaaaaaaaaaaaaaaggaaaaaaatacacaaataaatagaaaaagaaaaaaaaggggggcggcgcgcgcgcgcacctaaaaagatcttccccgggagggggcccgaaaggtatgtcggcgatccagccagcggtttggtgtgcgcagcaagcgggggcgcccccaaatgaagggggcggtcgctatatatataagaacgcaatacggcgacccgcgcggcggcggggtataacaaaccagcggacgaggacgaggcggaggaaacccagcgcggcgaccacgcgggcagacccctagtggggagagagagagcgccccctcaaactactccgggggcggggcgagcacaaatagtggggggcagcacaacccctccctcacaagaaggaattagtaacccgccccacgaagggacggaacaactagt

SEQ ID NO: 303788 - DNA, 1376 bp, Homo sapiens
gtttgtgttgctccttttcgtctgcttctggccttttgaagatgattatatttatttttttgtggactacttgactgtgaggacccacaggtggacaaaagcaggcttgtaaatcgtcggcagtaattacggtctaggtacgaggctgggtgttcgggtgaacaggacccgtcgccatgggccgtgtgatccgtggacagaggaagggcgccgggtctgtgttccgcgcgcacgtgaagcaccgtaaaggcgctgcgcgcctgcgcgccgtggatttcgctgagcggcacggctacatcaagggcatcgtcaaggacatcatccacgacccgggccgcggcgcgcccctcgccaaggtggtcttccgggatccgtatcggtttaagaagcggacggagctgttcattgccgccgagggcattcacacgggccagtttgtgtattgcggcaagaaggcccagctcaacattggcaatgtgctccctgtgggcaccatgcctgagggtacaatcgtgtgctgcctggaggagaagcctggagaccgtggcaagctggcccgggcatcagggaactatgccaccgttatctcccacaaccctgagaccaagaagacccgtgtgaagctgccctccggctccaagaaggttatctcctcagccaacagagctgtggttggtgtggtggctggaggtggccgaattgacaaacccatcttgaaggctggccgggcgtaccacaaatataaggcaaagaggaactgctggccacgagtacggggtgtggccatgaatcctgtggagcatccttttggaggtggcaaccaccagcacatcggcaagccctccaccatccgcagagatgcccctgctggccgcaaagtgggtctcattgctgcccgccggactggacgtctccggggaaccaagactgtgcaggagaaagagaactagtgctgagggcctcaataaagtttgtgtttatgccaaaaaaaacaacaacacccaaacacacacaaaacatacaaacaacaaaacaacggggggcccgcccccccctttttttctcctcctcgcgggctccccccgcgagcttctttccgcaccgcgcatccaccaacctcggggggggccacccttgcggggcgacaaccataacaaagcccctcttaaccaaacggtgatcactccacaaataacctcaaacctagacagaacgctccttgcccaaccccgcccgccacatcctcgcctgacaccacaccagacatacagatcctgccaaaaccacttttaccaaaaaacacactctccaaacacaccatcacctcctctcaaccacttccaccccttatctcataccccaaaccattttatccc

SEQ ID NO: 303789 - DNA, 1408 bp, Homo sapiens
gtttgtgttgctccttttcgtctgcttctggccttttgaagatgattatatttatttttttgtggactacttgactgtgaggacccacaggtggacaaaagcaggcttgtaaatcgtcggcagtaattacggtctaggtacgaggctgggtgttcgggtgaacaggacccgtcgccatgggccgtgtgatccgtggacagaggaagggcgccgggtctgtgttccgcgcgcacgtgaagcaccgtaaaggcgctgcgcgcctgcgcgccgtggatttcgctgagcggcacggctacatcaagggcatcgtcaaggacatcatccacgacccgggccgcggcgcgcccctcgccaaggtggtcttccgggatccgtatcggtttaagaagcggacggagctgttcattgccgccgagggcattcacacgggccagtttgtgtattgcggcaagaaggcccagctcaacattggcaatgtgctccctgtgggcaccatgcctgagggtacaatcgtgtgctgcctggaggagaagcctggagaccgtggcaagctggcccgggcatcagggaactatgccaccgttatctcccacaaccctgagaccaagaagacccgtgtgaagctgccctccggctccaagaaggttatctcctcagccaacagagctgtggttggtgtggtggctggaggtggccgaattgacaaacccatcttgaaggctggccgggcgtaccacaaatataaggcaaagaggaactgctggccacgagtacggggtgtggccatgaatcctgtggagcatccttttggaggtggcaaccaccagcacatcggcaagccctccaccatccgcagagatgcccctgctggccgcaaagtgggtctcattgctgcccgccggactggacgtctccggggaaccaagactgtgcaggagaaagagaactagtgctgagggcctcaataaagtttgtgtttatgccaaaaaaaaaaaaaaaaaaaaaaaaaaaaaaaaaaaaaaaaaaaaagggggggcgcaaatccccctgcggggggcgcccaagtatagccgagatacccacgtttctggcggacaaaggggcgcccaaagagggcagcgaatctataaaaagcacacgccgccagcggcccggcgtaaaacacggtcgcgcgcgggcgaaaacccctggtcaccgcgcgccactttggggaagaaccaccccccaccattcgcggggggggcaccaaataggggggcacaacccacccacacacaaagattctacgacgcccacaggggatataatcaaacacttcgaaccgcggctaaacagggcgtacacccacgcggtaaaatcgccgccgccggaaaacttgcggccacggaccacaggcagcgaacatttt

SEQ ID NO: 303790 - DNA, 946 bp, Homo sapiens
gtttgtgttgctccttttcgtctgcttctggccttttgaagatgattatatttatttttttgtggactacttgactgtgaggacccacaggtggacaaaagcaggcttgtaaatcgtcggcagtaattacggtctaggtacgaggctgggtgttcgggtgaacaggacccgtcgccatgggccgtgtgatccgtggacagaggaagggcgccgggtctgtgttccgcgcgcacgtgaagcaccgtaaaggcgctgcgcgcctgcgcgccgtggatttcgctgagcggcacggctacatcaagggcatcgtcaaggacatcatccacgacccgggccgcggcgcgcccctcgccaaggtggtcttccgggatccgtatcggtttaagaagcggacggagctgttcattgccgccgagggcattcacacgggccagtttgtgtattgcggcaagaaggcccagctcaacattggcaatgtgctccctgtgggcaccatgcctgagggtacaatcgtgtgctgcctggaggagaagcctggagaccgtggcaagctggcccgggcatcagggaactatgccaccgttatctcccacaaccctgagaccaagaagacccgtgtgaagctgccctccggctccaagaaggttatctcctcagccaacagagctgtggttggtgtggtggctggaggtggccgaattgacaaacccatcttgaaggctggccgggcgtaccacaaatataaggcaaagaggaactgctggccacgagtacggggtgtggccatgaatcctgtggagcatccttttggaggtggcaaccaccagcacatcggcaagccctccaccatccgcagagatgcccctgctggccgcaaagtgggtctcattgctgcccgccggactggacgtctccgggaaccagactgatgacgctagaggtaccg

SEQ ID NO: 303791 - DNA, 969 bp, Homo sapiens
gtttgtgttgctccttttcgtctgcttctggccttttgaagatgattatatttatttttttgtggactacttgactgtgaggacccacaggtggacaaaagcaggcttgtaaatcgtcggcagtaattacggtctaggtacgaggctgggtgttcgggtgaacaggacccgtcgccatgggccgtgtgatccgtggacagaggaagggcgccgggtctgtgttccgcgcgcacgtgaagcaccgtaaaggcgctgcgcgcctgcgcgccgtggatttcgctgagcggcacggctacatcaagggcatcgtcaaggacatcatccacgacccgggccgcggcgcgcccctcgccaaggtggtcttccgggatccgtatcggtttaagaagcggacggagctgttcattgccgccgagggcattcacacgggccagtttgtgtattgcggcaagaaggcccagctcaacattggcaatgtgctccctgtgggcaccatgcctgagggtacaatcgtgtgctgcctggaggagaagcctggagaccgtggcaagctggcccgggcatcagggaactatgccaccgttatctcccacaaccctgagaccaagaagacccgtgtgaagctgccctccggctccaagaaggttatctcctcagccaacagagctgtggttggtgtggtggctggaggtggccgaattgacaaacccatcttgaaggctggccgggcgtaccacaaatataaggcaaagaggaactgctggccacgagtacggggtgtggccatgaatcctgtggagcatccttttggaggtggcaaccaccagcacatcggcaagccctccaccatccgcagagatgcccctgctggccgcaaagtgggtctcattgctgcccgccggactggacgtctccgggaaccaagactgtgcaggagaaagagaatacggctcgcgccgcaagtgctcc

SEQ ID NO: 303792 - DNA, 1355 bp, Homo sapiens
gtttgtgttgctccttttcgtctgcttctggccttttgaagatgattatatttatttttttgtggactacttgactgtgaggacccacaggtggacaaaagcaggcttgtaaatcgtcggcagtaattacggtctaggtacgaggctgggtgttcgggtgaacaggacccgtcgccatgggccgtgtgatccgtggacagaggaagggcgccgggtctgtgttccgcgcgcacgtgaagcaccgtaaaggcgctgcgcgcctgcgcgccgtggatttcgctgagcggcacggctacatcaagggcatcgtcaaggacatcatccacgacccgggccgcggcgcgcccctcgccaaggtggtcttccgggatccgtatcggtttaagaagcggacggagctgttcattgccgccgagggcattcacacgggccagtttgtgtattgcggcaagaaggcccagctcaacattggcaatgtgctccctgtgggcaccatgcctgagggtacaatcgtgtgctgcctggaggagaagcctggagaccgtggcaagctggcccgggcatcagggaactatgccaccgttatctcccacaaccctgagaccaagaagacccgtgtgaagctgccctccggctccaagaaggttatctcctcagccaacagagctgtggttggtgtggtggctggaggtggccgaattgacaaacccatcttgaaggctggccgggcgtaccacaaatataaggcaaagaggaactgctggccacgagtacggggtgtggccatgaatcctgtggagcatccttttggaggtggcaaccaccagcacatcggcaagccctccaccatccgcagagatgcccctgctggccgcaaagtgggtctcattgctgcccgccggactggacgtctccggggaaccaagactgtgcaggagaaagagaactagtgctgagggcctcaataaagtttgtgtttatgccaaaaaaaaacaaaaaaaacaacttgggacaccaagtcccctctctttttggcaaaagtgggggccccctgtggacctggccaggcgctgcaacacggggcagaggaggcatgacagccagcggcaccctggaacacccgtgccgcggccggaccatagcgccaaaaatcaacgggggcgccaccacagaaagggcccccaaggaactccgaaacccctgtggagagagcccttccagagaaaccggcagctgcccgtgggaacccagtcctggaacacggcacctcaggtcccgccaaagatacctagcccaccttcacaaggcagcaccacacgccgacacacaaccggcacgccgagcagggcaagccc

SEQ ID NO: 303793 - DNA, 1095 bp, Homo sapiens
gtttgtgttgctccttttcgtctgcttctggccttttgaagatgattatatttatttttttgtggactacttgactgtgaggacccacaggtggacaaaagcaggcttgtaaatcgtcggcagtaattacggtctaggtacgaggctgggtgttcgggtgaacaggacccgtcgccatgggccgtgtgatccgtggacagaggaagggcgccgggtctgtgttccgcgcgcacgtgaagcaccgtaaaggcgctgcgcgcctgcgcgccgtggatttcgctgagcggcacggctacatcaagggcatcgtcaaggacatcatccacgacccgggccgcggcgcgcccctcgccaaggtggtcttccgggatccgtatcggtttaagaagcggacggagctgttcattgccgccgagggcattcacacgggccagtttgtgtattgcggcaagaaggcccagctcaacattggcaatgtgctccctgtgggcaccatgcctgagggtacaatcgtgtgctgcctggaggagaagcctggagaccgtggcaagctggcccgggcatcagggaactatgccaccgttatctcccacaaccctgagaccaagaagacccgtgtgaagctgccctccggctccaagaaggttatctcctcagccaacagagctgtggttggtgtggtggctggaggtggccgaattgacaaacccatcttgaaggctggccgggcgtaccacaaatataaggcaaagaggaactgctggccacgagtacggggtgtggccatgaatcctgtggagcatccttttggaggtggcaaccaccagcacatcggcaagccctccaccatccgcagagatgccctgtggcgcaaagtgggtctcatgctgccgcggactgacgtcccgggaaccagatgtgcgggaagagactgtgctgaggctataagttgtgtttccaaaaaaaaaaaggggggctaaatcccgaggccattcgtccgtttgaagggcccagagataaaggcggggtacgatggagccggttggcctcgggttgccccaaccgtattttctttgtgttattagatttcccagc

SEQ ID NO: 303794 - DNA, 1625 bp, Homo sapiens
  misc_feature (1625)..(1625): n is a, c, g, or t
gtttgtgttgctccttttcgtctgcttctggccttttgaagatgattatatttatttttttgtggactacttgactgtgaggacccacaggtggacaaaagcaggcttgtaaatcgtcggcagtaattacggtctaggtacgaggctgggtgttcgggtgaacaggacccgtcgccatgggccgtgtgatccgtggacagaggaagggcgccgggtctgtgttccgcgcgcacgtgaagcaccgtaaaggcgctgcgcgcctgcgcgccgtggatttcgctgagcggcacggctacatcaagggcatcgtcaaggacatcatccacgacccgggccgcggcgcgcccctcgccaaggtggtcttccgggatccgtatcggtttaagaagcggacggagctgttcattgccgccgagggcattcacacgggccagtttgtgtattgcggcaagaaggcccagctcaacattggcaatgtgctccctgtgggcaccatgcctgagggtacaatcgtgtgctgcctggaggagaagcctggagaccgtggcaagctggcccgggcatcagggaactatgccaccgttatctcccacaaccctgagaccaagaagacccgtgtgaagctgccctccggctccaagaaggttatctcctcagccaacagagctgtggttggtgtggtggctggaggtggccgaattgacaaacccatcttgaaggctggccgggcgtaccacaaatataaggcaaagaggaactgctggccacgagtacggggtgtggccatgaatcctgtggagcatccttttggaggtggcaaccaccagcacatcggcaagccctccaccatccgcagagatgcccgccctgttggcgaaagtgggtctcattgctgccgcggactggacgtctccgggaaccaagactgtgccggagaaagagaactagtgctgagggcctcaataaagtttgtgtttatgccaaaaaaaaaaaaacaaaaaaaaaaaaaaaaaaaaaaaaaaaaaaaaaaaaaaaaaaaaaaaaaaaaaaaaaaaaaaaaagagggggcggcggcgccaacaagaaaatctatcccccgggagggcgccgaaatgacggcgcacaccagcagtttttgttggacagaagaggggcgccccactaatgaggggagcgcttatatatatatagtcgacgacgaggagcaacgcggcgcgcgcgatgatataaataaacacaacgcactgtcagagcgcggaggagaacaacacgccgcgaactaacgcgaggggagacctctctttgtagtgaaaggaagaggagagctctctctctatctgtgtggggggggggagaggagaacaaacatatgtggggagacacacataactacctcctacaaatagagatatattatttagaacgtctcgatgtaggggggtatatatatatataataaattgttaaggaggggtgtgataatagagggtggtgtaaacaaaaaggcggcgtgtattattgtggtgtcggggtggagggagaaaaatatgttgtgtggtatataagtggggagtattatattattttttgaataaaaattaatttattatataacgaggaggggn

SEQ ID NO: 303795 - DNA, 1315 bp, Homo sapiens
gtttgtgttgctccttttcgtctgcttctggccttttgaagatgattatatttatttttttgtggactacttgactgtgaggacccacaggtggacaaaagcaggcttgtaaatcgtcggcagtaattacggtctaggtacgaggctgggtgttcgggtgaacaggacccgtcgccatgggccgtgtgatccgtggacagaggaagggcgccgggtctgtgttccgcgcgcacgtgaagcaccgtaaaggcgctgcgcgcctgcgcgccgtggatttcgctgagcggcacggctacatcaagggcatcgtcaaggacatcatccacgacccgggccgcggcgcgcccctcgccaaggtggtcttccgggatccgtatcggtttaagaagcggacggagctgttcattgccgccgagggcattcacacgggccagtttgtgtattgcggcaagaaggcccagctcaacattggcaatgtgctccctgtgggcaccatgcctgagggtacaatcgtgtgctgcctggaggagaagcctggagaccgtggcaagctggcccgggcatcagggaactatgccaccgttatctcccacaaccctgagaccaagaagacccgtgtgaagctgccctccggctccaagaaggttatctcctcagccaacagagctgtggttggtgtggtggctggaggtggccgaattgacaaacccatcttgaaggctggccgggcgtaccacaaatataaggcaaagaggaactgctggccacgagtacggggtgtggccatgaatcctgtggagcatccttttggaggtggcaaccaccagcacatcggcaagccctccaccatccgcagagatgcccgccctgttggcgaaagtgggtctcattgctgccgcggactggacgtctccgggaaccaagactgtgccggagaaagagaactagtgctgagggcctcaataaagtttgtgtttatgccaaaaaaaaaaaaacaaaaaaaaaaaaaaaaaaaaaaaaaaaaaaaaaaaaaaaaaaaaaaaaaaaaaaacaaaaaaaaaaaaaaaaaacacaaacaagaaaaaaaaacacccgcagcggaggcactactcgaaccggtgtgcgccgaaagaaaaaaaacggggctgcgattaaataacgatgcgcccgcgggttgctacaagaggttatctccgttgagacccccatccttttttctaccagacgagggggcaaaaaacctgggggcgaccccccactataagagggggacgcataaaatcaccccgataacacagggtgcaccccggcataa

SEQ ID NO: 303796 - DNA, 1448 bp, Homo sapiens
gtttgtgttgctccttttcgtctgcttctggccttttgaagatgattatatttatttttttgtggactacttgactgtgaggacccacaggtggacaaaagcaggcttgtaaatcgtcggcagtaattacggtctaggtacgaggctgggtgttcgggtgaacaggacccgtcgccatgggccgtgtgatccgtggacagaggaagggcgccgggtctgtgttccgcgcgcacgtgaagcaccgtaaaggcgctgcgcgcctgcgcgccgtggatttcgctgagcggcacggctacatcaagggcatcgtcaaggacatcatccacgacccgggccgcggcgcgcccctcgccaaggtggtcttccgggatccgtatcggtttaagaagcggacggagctgttcattgccgccgagggcattcacacgggccagtttgtgtattgcggcaagaaggcccagctcaacattggcaatgtgctccctgtgggcaccatgcctgagggtacaatcgtgtgctgcctggaggagaagcctggagaccgtggcaagctggcccgggcatcagggaactatgccaccgttatctcccacaaccctgagaccaagaagacccgtgtgaagctgccctccggctccaagaaggttatctcctcagccaacagagctgtggttggtgtggtggctggaggtggccgaattgacaaacccatcttgaaggctggccgggcgtaccacaaatataaggcaaagaggaactgctggccacgagtacggggtgtggccatgaatcctgtggagcatccttttggaggtggcaaccaccagcacatcggcaagccctccaccatccgcagagatgcccgccctgttggcgaaagtgggtctcattgctgccgcggactggacgtctccggggaaccaagactgtgcaggagaaagagaactagtgctgagggcctcaataaagtttgtgtttatgccaagaaaaaaaggaaaaaataaggaataaaaaataaagcatagtaaaaaaataaagaaaactaaataataaaaagaaaaagaaaaaaagagggggggggcgtcaaaatatattgcctaatggaggagggcgcaatattgggaccgacaaccctttttttgtttaacaagggggcgcacataaggtagggggcgttatgtaacaggcaagacggggcggcgcgcaccgtctgattattacagaccgcactgggctgaggcggagaaaaaacacgtctcccagtagaggaagtctgggagggcgacacgaccaccaataatcgcggggggggcgacacatgatgggggcaaaaccacctcgagaggggttataagcgccccgggacaaatataaacagctcagaacggtatgagggcggggaacaccacccagcaaattgttccccgggtcaaaaaatggtgccccgc

SEQ ID NO: 303797 - DNA, 1039 bp, Homo sapiens
gtttgtgttgctccttttcgtctgcttctggccttttgaagatgattatatttatttttttgtggactacttgactgtgaggacccacaggtggacaaaagcaggcttgtaaatcgtcggcagtaattacggtctaggtacgaggctgggtgttcgggtgaacaggacccgtcgccatgggccgtgtgatccgtggacagaggaagggcgccgggtctgtgttccgcgcgcacgtgaagcaccgtaaaggcgctgcgcgcctgcgcgccgtggatttcgctgagcggcacggctacatcaagggcatcgtcaaggacatcatccacgacccgggccgcggcgcgcccctcgccaaggtggtcttccgggatccgtatcggtttaagaagcggacggagctgttcattgccgccgagggcattcacacgggccagtttgtgtattgcggcaagaaggcccagctcaacattggcaatgtgctccctgtgggcaccatgcctgagggtacaatcgtgtgctgcctggaggagaagcctggagaccgtggcaagctggcccgggcatcagggaactatgccaccgttatctcccacaaccctgagaccaagaagacccgtgtgaagctgccctccggctccaagaaggttatctcctcagccaacagagctgtggttggtgtggtggctggaggtggccgaattgacaaacccatcttgaaggctggccgggcgtaccacaaatataaggcaaagaggaactgctggccacgagtacggggtgtggccatgaatcctgtggagcatccttttggaggtggcaaccaccagcacacggcaagccctccaccatccgcagagatgcccctgctggccgcaaagtgggtctcattgctgcccgccggactggacgtcctgccctcggacggcaacggcgcggcaaccagcgccgtgggcacctgatcgccggcacgtgcggcattcaacggctgcgcagcctgcgctgtggagagggacagcaccgccagcaccgcgctggccag

SEQ ID NO: 303798 - DNA, 1004 bp, Homo sapiens
gtttgtgttgctccttttcgtctgcttctggccttttgaagatgattatatttatttttttgtggactacttgactgtgaggacccacaggtggacaaaagcaggcttgtaaatcgtcggcagtaattacggtctaggtacgaggctgggtgttcgggtgaacaggacccgtcgccatgggccgtgtgatccgtggacagaggaagggcgccgggtctgtgttccgcgcgcacgtgaagcaccgtaaaggcgctgcgcgcctgcgcgccgtggatttcgctgagcggcacggctacatcaagggcatcgtcaaggacatcatccacgacccgggccgcggcgcgcccctcgccaaggtggtcttccgggatccgtatcggtttaagaagcggacggagctgttcattgccgccgagggcattcacacgggccagtttgtgtattgcggcaagaaggcccagctcaacattggcaatgtgctccctgtgggcaccatgcctgagggtacaatcgtgtgctgcctggaggagaagcctggagaccgtggcaagctggcccgggcatcagggaactatgccaccgttatctcccacaaccctgagaccaagaagacccgtgtgaagctgccctccggctccaagaaggttatctcctcagccaacagagctgtggttggtgtggtggctggaggtggccgaattgacaaacccatcttgaaggctggccgggcgtaccacaaatataaggcaaagaggaactgctggccacgagtacggggtgtggccatgaatcctgtggagcatcctttggaggtggcaaccaccagcacatcggcaagcctccacatcggagagatgccctgttggcgaaagtgggtctcattgctgccgcggactggacgtctccgggaaccaagactgtgcggaagagacactgtggggcacaagtggtttgcaaaaccacaaccccccccaccacccaacaaccccctcttccgcgcacaa

SEQ ID NO: 303799 - DNA, 1298 bp, Homo sapiens
  misc_feature (931)..(931): n is a, c, g, or t
  misc_feature (933)..(933): n is a, c, g, or t
  misc_feature (939)..(939): n is a, c, g, or t
  misc_feature (941)..(941): n is a, c, g, or t
  misc_feature (948)..(949): n is a, c, g, or t
  misc_feature (956)..(956): n is a, c, g, or t
  misc_feature (961)..(961): n is a, c, g, or t
  misc_feature (971)..(971): n is a, c, g, or t
  misc_feature (975)..(975): n is a, c, g, or t
  misc_feature (980)..(981): n is a, c, g, or t
gtttgtgttgctccttttcgtctgcttctggccttttgaagatgattatatttatttttttgtggactacttgactgtgaggacccacaggtggacaaaagcaggcttgtaaatcgtcggcagtaattacggtctaggtacgaggctgggtgttcgggtgaacaggacccgtcgccatgggccgtgtgatccgtggacagaggaagggcgccgggtctgtgttccgcgcgcacgtgaagcaccgtaaaggcgctgcgcgcctgcgcgccgtggatttcgctgagcggcacggctacatcaagggcatcgtcaaggacatcatccacgacccgggccgcggcgcgcccctcgccaaggtggtcttccgggatccgtatcggtttaagaagcggacggagctgttcattgccgccgagggcattcacacgggccagtttgtgtattgcggcaagaaggcccagctcaacattggcaatgtgctccctgtgggcaccatgcctgagggtacaatcgtgtgctgcctggaggagaagcctggagaccgtggcaagctggcccgggcatcagggaactatgccaccgttatctcccacaaccctgagaccaagaagacccgtgtgaagctgccctccggctccaagaaggttatctcctcagccaacagagctgtggttggtgtggtggctggaggtggccgaattgacaaacccatcttgaaggctggccgggcgtaccacaaatataaggcaaagaggaactgctggccacgagtacggggtgtggccatgcctgtggagcatccttttggaggtggcaaccaccagcacatcggcaagccctccaccatccgcagagatgcccctgctggccgcaaagtgggtctcattgctgcccgccggactggacgtggactggacgtctccgggggaancnaagacngngcaggannacagagnactantgcgagggcncaanaaagnngcgtaatgccacaaaaaaacaaaacgacaaaacaaaatgtggcggcacagcccaaaaagtctaaacacccgtggagcgcggcgccaagaggaagatagaaagagcagaggggcacaagaagcaccggcgaaaacgaggggttccccaaaaaaaacccggggaccgggtggaaacaacaggggtaggaatcaaggacaaagacagatcacacgcacgcagtccggcagcatagacaacaacaacaagtagagacaacaacacaaggagatgcgcaaaagagcgaagaaaacacaatcagagtatgcgccgcgtcgata

SEQ ID NO: 303800 - DNA, 792 bp, Homo sapiens
gtttgtgttgctccttttcgtctgcttctggccttttgaagatgattatatttatttttttgtggactacttgactgtgaggacccacaggtggacaaaagcaggcttgtaaatcgtcggcagtaattacggtctaggtacgaggctgggtgttcgggtgaacaggacccgtcgccatgggccgtgtgatccgtggacagaggaagggcgccgggtctgtgttccgcgcgcacgtgaagcaccgtaaaggcgctgcgcgcctgcgcgccgtggatttcgctgagcggcacggctacatcaagggcatcgtcaaggacatcatccacgacccgggccgcggcgcgcccctcgccaaggtggtcttccgggatccgtatcggtttaagaagcggacggagctgttcattgccgccgagggcattcacacgggccagtttgtgtattgcggcaagaaggcccagctcaacattggcaatgtgctccctgtgggcaccatgcctgagggtacaatcgtgtgctgcctggaggagaagcctggagaccgtggcaagctggcccgggcatcagggaactatgccaccgttatctcccacaaccctgagaccaagaagacccgtgtgaagctgccctccggctccaagaaggttatctcctcagccaacagagctgtggttggtgtggtggctggaggtggccgaattgacaaacccatcttgaaggctggccgggcgtaccacaaatataaggcagaagcaggaagcagcagaagcaggaagcggcagaagcaggaag

SEQ ID NO: 303801 - DNA, 1339 bp, Homo sapiens
gtttgtgttgctccttttcgtctgcttctggccttttgaagatgattatatttatttttttgtggactacttgactgtgaggacccacaggtggacaaaagcaggcttgtaaatcgtcggcagtaattacggtctaggtacgaggctgggtgttcgggtgaacaggacccgtcgccatgggccgtgtgatccgtggacagaggaagggcgccgggtctgtgttccgcgcgcacgtgaagcaccgtaaaggcgctgcgcgcctgcgcgccgtggatttcgctgagcggcacggctacatcaagggcatcgtcaaggacatcatccacgacccgggccgcggcgcgcccctcgccaaggtggtcttccgggatccgtatcggtttaagaagcggacggagctgttcattgccgccgagggcattcacacgggccagtttgtgtattgcggcaagaaggcccagctcaacattggcaatgtgctccctgtgggcaccatgcctgagggtacaatcgtgtgctgcctggaggagaagcctggagaccgtggcaagctggcccgggcatcagggaactatgccaccgttatctcccacaaccctgagaccaagaagacccgtgtgaagctgccctccggctccaagaaggttatctcctcagccaacagagctgtggttggtgtggtggctggaggtggccgaattgacaaacccatcttgaaggctggccgggcgtaccacaaatataaggcacacgagtacggggtgtggccatgaatcctgtggagcatccttttggaggtggcaaccaccagcacatcggcaagccctccaccatccgcagagatgcccctgctggccgcaaagtgggtctcattgctgcccgccggactggacgtctccggggaaccaagactgtgcaggagaaagagaactagtgctgagggcctcaataaagtttgtgtttatgccaaaaaaaaacaaaaaaaacaacttgggacaccaagtcccctctctttttggcaaaagtgggggccccctgtggacctggccaggcgctgcaacacggggcagaggaggcatgacagccagcggcaccctggaacacccgtgccgcggccggaccatagcgccaaaaatcaacgggggcgccaccacagaaagggcccccaaggaactccgaaacccctgtggagagagcccttccagagaaaccggcagctgcccgtgggaacccagtcctggaacacggcacctcaggtcccgccaaagatacctagcccaccttcacaaggcagcaccacacgccgacacacaaccggcacgccgagcagggcaagccc

SEQ ID NO: 303802 - DNA, 1060 bp, Homo sapiens
gtttgtgttgctccttttcgtctgcttctggccttttgaagatgattatatttatttttttgtggactacttgactgtgaggacccacaggtggacaaaagcaggcttgtaaatcgtcggcagtaattacggtctaggtacgaggctgggtgttcgggtgaacaggacccgtcgccatgggccgtgtgatccgtggacagaggaagggcgccgggtctgtgttccgcgcgcacgtgaagcaccgtaaaggcgctgcgcgcctgcgcgccgtggatttcgctgagcggcacggctacatcaagggcatcgtcaaggacatcatccacgacccgggccgcggcgcgcccctcgccaaggtggtcttccgggatccgtatcggtttaagaagcggacggagctgttcattgccgccgagggcattcacacgggccagtttgtgtattgcggcaagaaggcccagctcaacattggcaatgtgctccctgtgggcaccatgcctgagggtacaatcgtgtgctgcctggaggagaagcctggagaccgtggcaagctggcccgggcatcagggaactatgccaccgttatctcccacaaccctgagaccaagaagacccgtgtgaagctgccctccggctccaagaaggttatctcctcagccaacagagctgtggttggtgtggtggctggcctgacgtctcacacatggtgaggggggtgcttccctgcgcttggagctcagccagcattctaggtgatggatgggaggtggccgaattgacaaacccatcttgaaggctggccgggcgtaccacaaatataaggcaaagaggaactgctggccacgagtacggggtgtggccatgaatcctgtggagcatccttttggaggtggcaaccaccagcacatcggcaagccctccaccatccgcagagatgcccctgctggccgcaaagtgggtctcattgctgcccgccggactggacgtctccggggaaccaagactgtgcaggagaaagagaactagtgctgagggcctcaataaagtttgtgtttatgcc

SEQ ID NO: 303803 - DNA, 1281 bp, Homo sapiens
gtttgtgttgctccttttcgtctgcttctggccttttgaagatgattatatttatttttttgtggactacttgactgtgaggacccacaggtggacaaaagcaggcttgtaaatcgtcggcagtaattacggtctaggtacgaggctgggtgttcgggtgaacaggacccgtcgccatgggccgtgtgatccgtggacagaggaagggcgccgggtctgtgttccgcgcgcacgtgaagcaccgtaaaggcgctgcgcgcctgcgcgccgtggatttcgctgagcggcacggctacatcaagggcatcgtcaaggacatcatccacgacccgggccgcggcgcgcccctcgccaaggtggtcttccgggatccgtatcggtttaagaagcggacggagctgttcattgccgccgagggcattcacacgggccagtttgtgtattgcggcaagaaggcccagctcaacattggcaatgtgctccctgtgggcaccatgcctgagggtacaatcgtgtgctgcctggaggagaagcctggagaccgtggcaagctggcccgggcatcagggaactatgccaccgttatctcccacaaccctgagaccaagaagacccgtgtgaagctgccctccggctccaagaaggttatctcctcagccaacagagctgtggttggtgtggtggctggcctgacgtctcacacatggtgaggggggtgcttccctgcgcttggagctcagccagcattctaggtgatggatggaggtgagggccttggcttgcctgcccattgtggattgaagaaactggatgtcagctcacagggtgcaaggggctccctagggtggaggcgagtgggctttttgctgggtagttggatgcagtattgggaaggtgcatgacaggagattgaggggaggtgggggtgctctgaccgactgggggttccctgaggtatctgatcccctacaggtgtggtggctggaggtggccgaattgacaaacccatcttgaaggctggccgggcgtaccacaaatataaggcaaagaggaactgctggccacgagtacggggtgtggccatgaatcctgtggagcatccttttggaggtggcaaccaccagcacatcggcaagccctccaccatccgcagagatgcccctgctggccgcaaagtgggtctcattgctgcccgccggactggacgtctccggggaaccaagactgtgcaggagaaagagaactagtgctgagggcctcaataaagtttgtgtttatgcc

SEQ ID NO: 303804 - DNA, 1072 bp, Homo sapiens
gtttgtgttgctccttttcgtctgcttctggccttttgaagatgattatatttatttttttgtggactacttgactgtgaggacccacaggtggacaaaagcaggcttgtaaatcgtcggcagtaattacggtctaggtacgaggctgggtgttcgggtgaacaggacccgtcgccatgggccgtgtgatccgtggacagaggaagggcgccgggtctgtgttccgcgcgcacgtgaagcaccgtaaaggcgctgcgcgcctgcgcgccgtggatttcgctgagcggcacggctacatcaagggcatcgtcaaggacatcatccacgacccgggccgcggcgcgcccctcgccaaggtggtcttccgggatccgtatcggtttaagaagcggacggagctgttcattgccgccgagggcattcacacgggccagtttgtgtattgcggcaagaaggcccagctcaacattggcaatgtgctccctgtgggcaccatgcctgagggtacaatcgtgtgctgcctggaggagaagcctggagaccgtggcaagctggcccgggcatcagggaactatgccaccgttatctcccacaaccctgagaccaagaagacccgtgtgaagctgccctccggctccaagaaggttatctcctcagccaacagagctgtggttggtgtggtggctggcctgacgtctcacacatggtgaggggggtgcttccctgcgcttggagctcagccagcattctaggtgatggatgggaggtggccgaattgacaaacccatcttgaaggctggccgggcgtaccacaaatataaggcaaagaggaactgctggccacgagtacggggtgtggccatgaatcctgtggagcatccttttggaggtggcaaccaccagcacatcggcaagccctccaccatccgcagagatgcccctgctggccgcaaagtgggtctcattgctgcccgccggactggacgtctccggggaaccaagactgtgcaggagaaagagaactagtgctgagggcctcaataaagtttgtgtttatgccaaaaaaaaaaaa

SEQ ID NO: 303805 - DNA, 1365 bp, Homo sapiens
gtttgtgttgctccttttcgtctgcttctggccttttgaagatgattatatttatttttttgtggactacttgactgtgaggacccacaggtggacaaaagcaggcttgtaaatcgtcggcagtaattacggtctaggtacgaggctgggtgttcgggtgaacaggacccgtcgccatgggccgtgtgatccgtggacagaggaagggcgccgggtctgtgttccgcgcgcacgtgaagcaccgtaaaggcgctgcgcgcctgcgcgccgtggatttcgctgagcggcacggctacatcaagggcatcgtcaaggacatcatccacgacccgggccgcggcgcgcccctcgccaaggtggtcttccgggatccgtatcggtttaagaagcggacggagctgttcattgccgccgagggcattcacacgggccagtttgtgtattgcggcaagaaggcccagctcaacattggcaatgtgctccctgtgggcaccatgcctgagggtacaatcgtgtgctgcctggaggagaagcctggagaccgtggcaagctggcccgggcatcagggaactatgccaccgttatctcccacaaccctgagaccaagaagacccgtgtgaagctgccctccggctccaagaaggttatctcctcagccaacagagctgtggttggtgtggtggctggcctgacgtctcacacatggtgaggggggtgcttccctgcgcttggagctcagccagcattctaggtgatggatggaggtgagggccttggcttgcctgcccattgtggattgaagaaactggatgtcagctcacagggtgcaaggggctccctagggtggaggcgagtgggctttttgctgggtagttggatgcagtattgggaaggtgcatgacaggagattgaggggaggtgggggtgctctgaccgactgggggttccctgaggtatctgatcccctacaggtgtggtggctggaggtggccgaattgacaaacccatcttgaaggctggccgggcgtaccacaaatataaggcaaagaggaactgctggccacgagtacggggtgtggccatgaatcctgtggagcatccttttggaggtggcaaccaccagcacatcggcaagccctccaccatccgcagagatgcccctgctggccgcaaagtgggtctcattgctgcccgccggactggacgtctccggggaaccaagactgtgcaggagaaagagaactagtgctgagggcctcaataaagtttgtgtttatgccaaaaaaaagatagggagaaaaaaagttttgcccatagggggtccgattacaattgtcgaaccgccggaaatttagtatagtata

SEQ ID NO: 303806 - DNA, 1264 bp, Homo sapiens
gtttgtgttgctccttttcgtctgcttctggccttttgaagatgattatatttatttttttgtggactacttgactgtgaggacccacaggtggacaaaagcaggcttgtaaatcgtcggcagtaattacggtctaggtacgaggctgggtgttcgggtgaacaggacccgtcgccatgggccgtgtgatccgtggacagaggaagggcgccgggtctgtgttccgcgcgcacgtgaagcaccgtaaaggcgctgcgcgcctgcgcgccgtggatttcgctgagcggcacggctacatcaagggcatcgtcaaggacatcatccacgacccgggccgcggcgcgcccctcgccaaggtggtcttccgggatccgtatcggtttaagaagcggacggagctgttcattgccgccgagggcattcacacgggccagtttgtgtattgcggcaagaaggcccagctcaacattggcaatgtgctccctgtgggcaccatgcctgagggtacaatcgtgtgctgcctggaggagaagcctggagaccgtggcaagctggcccgggcatcagggaactatgccaccgttatctcccacaaccctgagaccaagaagacccgtgtgaagctgccctccggctccaagaaggttatctcctcagccaacagagctgtggttggtgtggtggctgtcggcaagccctccaccatccgcagagatgcccctgctggccgcaaagtgggtctcattgctgcccgccggactggacgtctccggggaaccaagactgtgcaggagaaagagaactagtgctgagggcctcaataaagtttgtgtttatgccaaaaaaaaaaaaaaaaaaaaaaaaaaaaaaaaaaaaaaaaaaaaagggggggcgcaaatccccctgcggggggcgcccaagtatagccgagatacccacgtttctggcggacaaaggggcgcccaaagagggcagcgaatctataaaaagcacacgccgccagcggcccggcgtaaaacacggtcgcgcgcgggcgaaaacccctggtcaccgcgcgccactttggggaagaaccaccccccaccattcgcggggggggcaccaaataggggggcacaacccacccacacacaaagattctacgacgcccacaggggatataatcaaacacttcgaaccgcggctaaacagggcgtacacccacgcggtaaaatcgccgccgccggaaaacttgcggccacggaccacaggcagcgaacatttt

SEQ ID NO: 303807 - DNA, 941 bp, Homo sapiens
gtttgtgttgctccttttcgtctgcttctggccttttgaagatgattatatttatttttttgtggactacttgactgtgaggacccacaggtggacaaaagcaggcttgtaaatcgtcggcagtaattacggtctaggtacgaggctgggtgttcgggtgaacaggacccgtcgccatgggccgtgtgatccgtggacagaggaagggcgccgggtctgtgttccgcgcgcacgtgaagcaccgtaaaggcgctgcgcgcctgcgcgccgtggatttcgctgagcggcacggctacatcaagggcatcgtcaaggacatcatccacgacccgggccgcggcgcgcccctcgccaaggtggtcttccgggatccgtatcggtttaagaagcggacggagctgttcattgccgccgagggcattcacacgggccagtttgtgtattgcggcaagaaggcccagctcaacattggcaatgtgctccctgtgggcaccatgcctgagggtacaatcgtgtgctgcctggaggagaagcctggagaccgtggcaagctggcccgggcatcagggaactatgccaccgttatctcccacaaccctgagaccaagaagacccgtgtgaagctgccctccggctccaagaaggttatctcctcagccaacagagctgtggttggtgtggtggctgggcagcagttgaatgctgagggctgtgggtgaacatgctgtgagtgccggtggacagccagtggctagacttggtccctggaattcgattacctgttgttctaaaacttgggttctgtaagtttgagctcatcctgtagtctcagttgtcatcactgtacaacaggcacaacagtacctgctttactgctgttgaggcgttaaatgagattgggacgaagtcaccagggtcttggattctaccgtgggcttcct

SEQ ID NO: 303808 - DNA, 954 bp, Homo sapiens
gtttgtgttgctccttttcgtctgcttctggccttttgaagatgattatatttatttttttgtggactacttgactgtgaggacccacaggtggacaaaagcaggcttgtaaatcgtcggcagtaattacggtctaggtacgaggctgggtgttcgggtgaacaggacccgtcgccatgggccgtgtgatccgtggacagaggaagggcgccgggtctgtgttccgcgcgcacgtgaagcaccgtaaaggcgctgcgcgcctgcgcgccgtggatttcgctgagcggcacggctacatcaagggcatcgtcaaggacatcatccacgacccgggccgcggcgcgcccctcgccaaggtggtcttccgggatccgtatcggtttaagaagcggacggagctgttcattgccgccgagggcattcacacgggccagtttgtgtattgcggcaagaaggcccagctcaacattggcaatgtgctccctgtgggcaccatgcctgagggtacaatcgtgtgctgcctggaggagaagcctggagaccgtggcaagctggcccgggcaaaccctgagaccaagaagacccgtgtgaagctgccctccggctccaagaaggttatctcctcagccaacagagctgtggttggtgtggtggctggaggtggccgaattgacaaacccatcttgaaggctggccgggcgtaccacaaatataaggcaaagaggaactgctggccacgagtacggggtgtggccatgaatcctgtggagcatccttttggaggtggcaaccaccagcacatcggcaagccctccaccatccgcagagatgcccctgctggccgcaaagtgggtctcattgctgcccgccggactggacgtctccggggaaccaagactgtgcaggagaaagagaactagtgctgagggcctcaataaagtttgtgtttatgcc

SEQ ID NO: 303809 - DNA, 953 bp, Homo sapiens
gtttgtgttgctccttttcgtctgcttctggccttttgaagatgattatatttatttttttgtggactacttgactgtgaggacccacaggtggacaaaagcaggcttgtaaatcgtcggcagtaattacggtctaggtacgaggctgggtgttcgggtgaacaggacccgtcgccatgggccgtgtgatccgtggacagaggaagggcgccgggtctgtgttccgcgcgcacgtgaagcaccgtaaaggcgctgcgcgcctgcgcgccgtggatttcgctgagcggcacggctacatcaagggcatcgtcaaggacatcatccacgacccgggccgcggcgcgcccctcgccaaggtggtcttccgggatccgtatcggtttaagaagcggacggagctgttcattgccgccgagggcattcacacgggccagtttgtgtattgcggcaagaaggcccagctcaacattggcaatgtgctccctgtgggcaccatgcctgacctggagaccgtggcaagctggcccgggcatcagggaactatgccaccgttatctcccacaaccctgagaccaagaagacccgtgtgaagctgccctccggctccaagaaggttatctcctcagccaacagagctgtggttggtgtggtggctggaggtggccgaattgacaaacccatcttgaaggctggccgggcgtaccacaaatataaggcaaagaggaactgctggccacgagtacggggtgtggccatgaatcctgtggagcatccttttggaggtggcaaccaccagcacatcggcaagccctccaccatccgcagagatgcccctgctggccgcaaagtgggtctcattgctgcccgccggactggacgtctccggggaaccaagactgtgcaggagaaagagaactagtgctgagggcctcaataaagtttgtgtttatgcc

SEQ ID NO: 303810 - DNA, 1646 bp, Homo sapiens
gtttgtgttgctccttttcgtctgcttctggccttttgaagatgattatatttatttttttgtggactacttgactgtgaggacccacaggtggacaaaagcaggcttgtaaatcgtcggcagtaattacggtctaggtacgaggctgggtgttcgggtgaacaggacccgtcgccatgggccgtgtgatccgtggacagaggaagggcgccgggtctgtgttccgcgcgcacgtgaagcaccgtaaaggcgctgcgcgcctgcgcgccgtggatttcgctgagcggcacggctacatcaagggcatcgtcaaggacatcatccacgacccgggccgcggcgcgcccctcgccaaggtggtcttccgggatccgtatcggtttaagaagcggacggagctgttcattgccgccgagggcattcacacgggccagtttgtgtattgcggcaagaaggcccagctcaacattggcaatgtgctccctgtgggcaccatgcctgagggtacaatcgtgtgctgcctggaggagaagcctggagaccgtggcaagctggcccgggcatcagggaactatgccaccgttatctcccacaaccctgagaccaagaagacccgtgtgaagctgccctccggctccaagaaggttatctcctcagccaacagagctgtggttggtgtggtggctggaggtggccgaattgacaaacccatcttgaaggctggccgggcgtaccacaaatataaggcaaagaggaactgctggccacgagtacggggtgtggccatgaatcctgtggagcatccttttggaggtggcaaccaccagcacatcggcaagccctccaccatccgcagagatgcccctgctggccgcaaagtgggtctcattgctgcccgccggactggacgtctccggggaaccaagactgtgcaggagaaagagaactagtgctgagggcctcaataaagtttgtgtttatgccaaaaaaaaaaacaacacaaaccccaccacacacacccacacacacccacccccccaaccacacccacaccacaaacaaccgcggcgccgccaaacaacatctcctcccgcgcgcgccagcagctacccgccaacccacccccctctcgtatcgaccaagcgcgccccccacaacagcgcgagccctcacacacccagcccacgcccgcgcgccggcatacaccaccaccccccacccagccacacaaccgtgccaccgggcaccccaccagcaacacgaccccccacccgcgtgcggaggcacaacctgcgcgacgaaaccaccacgccactctcacccccggccaccacacacccccgccgctactcgtctgccccccaccatctcctcgccgccgccaccactcccccacgccctctctcgccacacctcccgcccgacctccccctcaccccgcctccccactcccctccccccagccgcccccgccccccggccctccctccctcccgccgccgcctccgcatccacgctccccacctcacctcctccacccccgcccaccgccgcctcgacctcctcacgctccccactacccacccactccactccgcccgcccctactacccgcgcactcgccgcagcctcccacgcactacacc

SEQ ID NO: 303811 - DNA, 943 bp, Homo sapiens
gtttgtgttgctccttttcgtctgcttctggccttttgaagatgattatatttatttttttgtggactacttgactgtgaggacccacaggtggacaaaagcaggcttgtaaatcgtcggcagtaattacggtctaggtacgaggctgggtgttcgggtgaacaggacccgtcgccatgggccgtgtgatccgtggacagaggaagggcgccgggtctgtgttccgcgcgcacgtgaagcaccgtaaaggcgctgcgcgcctgcgcgccgtggatttcgctgagcggcacggctacatcaagggcatcgtcaaggacatcatccacgacccgggccgcggcgcgcccctcgccaaggtggtcttccgggatccgtatcggtttaagaagcggacggagctgttcattgccgccgagggcattcacacgggccagtttgtgtattgcggcaagaaggcccagctcaacattggcaatgtgctccctgtgggcaccatgcctgagggtacaatcgtgtgctgcctggaggagaagcctggagaccgtggcaagctggcccgggcatcagggaactatgccaccgttatctcccacctccaagaaggttatctcctcagccaacagagctgtggttggtgtggtggctggaggtggccgaattgacaaacccatcttgaaggctggccgggcgtaccacaaatataaggcaaagaggaactgctggccacgagtacggggtgtggccatgaatcctgtggagcatccttttggaggtggcaaccaccagcacatcggcaagccctccaccatccgcagagatgcccctgctggccgcaaagtgggtctcattgctgcccgccggactggacgtctccggggaaccaagactgtgcaggagaaagagaactagtgctgagggcctcaataaagtttgtgtttatgcc

SEQ ID NO: 303812 - DNA, 1335 bp, Homo sapiens
gtttgtgttgctccttttcgtctgcttctggccttttgaagatgattatatttatttttttgtggactacttgactgtgaggacccacaggtggacaaaagcaggcttgtaaatcgtcggcagtaattacggtctaggtacgaggctgggtgttcgggtgaacaggacccgtcgccatgggccgtgtgatccgtggacagaggaagggcgccgggtctgtgttccgcgcgcacgtgaagcaccgtaaaggcgctgcgcgcctgcgcgccgtggatttcgctgagcggcacggctacatcaagggcatcgtcaaggacatcatccacgacccgggccgcggcgcgcccctcgccaaggtggtcttccgggatccgtatcggtttaagaagcggacggagctgttcattgccgccgagggcattcacacgggccagtttgtgtattgcggcaagaaggcccagctcaacattggcaatgtgctccctgtgggcaccatgcctgagggtacaatcgtgtgctgcctggaggagaagcctggagaccgtggcaagctggcccgggcatcagggaactatgccaccgttatctcccacctccaagaaggttatctcctcagccaacagagctgtggttggtgtggtggctggaggtggccgaattgacaaacccatcttgaaggctggccgggcgtaccacaaatataaggcaaagaggaactgctggccacgagtacggggtgtggccatgaatcctgtggagcatccttttggaggtggcaaccaccagcacatcggcaagccctccaccatccgcagagatgcccctgctggccgcaaagtgggtctcattgctgcccgccggactggacgtctccggggaaccaagactgtgcaggagaaagagaactagtgctgagggcctcaataaagtttgtgtttatgccaaaaaaaacaacaacacccaaacacacacaaaacatacaaacaacaaaacaacggggggcccgcccccccctttttttctcctcctcgcgggctccccccgcgagcttctttccgcaccgcgcatccaccaacctcggggggggccacccttgcggggcgacaaccataacaaagcccctcttaaccaaacggtgatcactccacaaataacctcaaacctagacagaacgctccttgcccaaccccgcccgccacatcctcgcctgacaccacaccagacatacagatcctgccaaaaccacttttaccaaaaaacacactctccaaacacaccatcacctcctctcaaccacttccaccccttatctcataccccaaaccattttatccc

SEQ ID NO: 303813 - DNA, 1078 bp, Homo sapiens
  misc_feature (793)..(793): n is a, c, g, or t
  misc_feature (796)..(796): n is a, c, g, or t
  misc_feature (799)..(799): n is a, c, g, or t
gtttgtgttgctccttttcgtctgcttctggccttttgaagatgattatatttatttttttgtggactacttgactgtgaggacccacaggtggacaaaagcaggcttgtaaatcgtcggcagtaattacggtctaggtacgaggctgggtgttcgggtgaacaggacccgtcgccatgggccgtgtgatccgtggacagaggaagggcgccgggtctgtgttccgcgcgcacgtgaagcaccgtaaaggcgctgcgcgcctgcgcgccgtggatttcgctgagcggcacggctacatcaagggcatcgtcaaggacatcatccacgacccgggccgcggcgcgcccctcgccaaggtggtcttccgggatccgtatcggtttaagaagcggacggagctgttcattgccgccgagggcattcacacgggccagtttgtgtattgcggcaagaaggcccagctcaacattggcaatgtgctccctgtgggcaccatgcctgagggtacaatcgtgtgctgcctggaggagaagcctggagaccgtggcaagctggcccgggcatcagggaactatgccaccgttatctcccacaatcctgtggagcatccttttggaggtggcaaccaccagcacatcggcaagccctccaccatccgcagagatgcccctgctggccgcaaagtgggtctcattgctgcccgccggactggacgtctccggggaaccaagactgtgcggagaaagagaactagtgctgagggcctcaataaagtttgtgtttatgccaaaancancangatagaacgcacaaaaacacaagagggcagccacacaataatactcggggaggcacagataagataaccaccatttgtaaaagggccaccaatagagaacatcattaaaagacgcgctataacaagacaggacaaacaccaggcctgtataaacacatttgttgagaggcacacaccacatacgtcgaacattaataagtgtagactcactcgctgttactgatatatcgaacatcatctgagacaagtgcacgctctagatcgataggaagaacctga

SEQ ID NO: 303814 - DNA, 928 bp, Homo sapiens
  misc_feature (833)..(833): n is a, c, g, or t
  misc_feature (840)..(840): n is a, c, g, or t
  misc_feature (844)..(844): n is a, c, g, or t
  misc_feature (846)..(847): n is a, c, g, or t
gtttgtgttgctccttttcgtctgcttctggccttttgaagatgattatatttatttttttgtggactacttgactgtgaggacccacaggtggacaaaagcaggcttgtaaatcgtcggcagtaattacggtctaggtacgaggctgggtgttcgggtgaacaggacccgtcgccatgggccgtgtgatccgtggacagaggaagggcgccgggtctgtgttccgcgcgcacgtgaagcaccgtaaaggcgctgcgcgcctgcgcgccgtggatttcgctgagcggcacggctacatcaagggcatcgtcaaggacatcatccacgacccgggccgcggcgcgcccctcgccaaggtggtcttccgggatccgtatcggtttaagaagcggacggagctgttcattgccgccgagggcattcacacgggccagtttgtgtattgcggcaagaaggcccagctcaacattggcaatgtgctccctgtgggcaccatgcctgagggtacaatcgtgtgctgcctggaggagaagcctggagaccgtggcaagctggcccgggcatcagggaactatgccaccgttatctcccacaaccctgagaccaagaagacccgtgtgaagctgccctccggctccaagaaggttatctcctcagccaacagagctgtggttggtgtggtggctggaggtggccgaattgacaaacccatcttgaaggctggccgggcgtaccacaaatataaggcacacgagtacggggtgtggccatgaatcctgtggagcggcacatgggagcggcacatgcgttgggagcggcacatgcgttgggancggcacntgcncnnggagcggcacatgcgttgggagcggcacatgcgttgggagcggcacatgcgttgggagcggcacatgcgttgggagcggca

SEQ ID NO: 303815 - DNA, 741 bp, Homo sapiens
gtttgtgttgctccttttcgtctgcttctggccttttgaagatgattatatttatttttttgtggactacttgactgtgaggacccacaggtggacaaaagcaggcttgtaaatcgtcggcagtaattacggtctaggtacgaggctgggtgttcgggtgaacaggacccgtcgccatgggccgtgtgatccgtggacagaggaagggcgccgggtctgtgttccgcgcgcacgtgaagcaccgtaaaggcgctgcgcgcctgcgcgccgtggatttcgctgagcggcacggctacatcaagggcatcgtcaaggacatcatccacgacccgggccgcggcgcgcccctcgccaaggtggtcttccgggatccgtatcggtttaagaagcggacggagctgttcattgccgccgagggcattcacacgggccagtttgtgtattgcggcaagaaggcccagctcaacattggcaatgtgctccctgtgggcaccatgcctgagggtacaatcgtgtgctgcctggaggagaagcctggagaccgtggcaagctggcccgggcatcagggaactatgccaccgttatctcccacaaccctgagaccaagaagacccgtgtgaagctgccctccggctccaagaaggttatctcctcagccaacagagctgtggttggtgtggtggctgaacccatcttgaagcgctggtccgcagcggacctggggatcctcttcgagtcga

SEQ ID NO: 303816 - DNA, 845 bp, Homo sapiens
gtttgtgttgctccttttcgtctgcttctggccttttgaagatgattatatttatttttttgtggactacttgactgtgaggacccacaggtggacaaaagcaggcttgtaaatcgtcggcagtaattacggtctaggtacgaggctgggtgttcgggtgaacaggacccgtcgccatgggccgtgtgatccgtggacagaggaagggcgccgggtctgtgttccgcgcgcacgtgaagcaccgtaaaggcgctgcgcgcctgcgcgccgtggatttcgctgagcggcacggctacatcaagggcatcgtcaaggacatcatccacgacccgggccgcggcgcgcccctcgccaaggtggtcttccgggatccgtatcggtttaagaagcggacggagctgttcattgccgccgagggcattcacacgggccagtttgtgtattgcggcaagaaggcccagctcaacattggcaatgtgctccctgtgggcaccatgcctgagggtacaatcgtgtgctgcctggaggagaagcctggagaccgtggcaagctggcccgggcagaggtggccgaattgacaaacccatcttgaaggctggccgggcgtaccacaaatataaggcaaagaggaactgctggccacgagtacggggtgtggccatgaatcctgtggagcatccttttggaggtggcaaccaccagcacatcggcaagccctccaccatccgcagagatgcccctgctggccgcaaagtgggtctcattgctgcccgccggactggacgtctccgggaaccaagactgtgcaggagaaagagaatacggctcgcgccgcaagtgctcc

SEQ ID NO: 303817 - DNA, 366 bp, Homo sapiens
atcttgaaggctggccgggcgtaccacaaatataaggcacacgagtacggggtgtggccatgaatgtaagtaacccagaaatgcagggttgggtattgaagttacagtggccacactgttgggtaggcaagtcccatccacaggtgtccctgcaggagggggatctacggtgggaggagcagcaggtggtggtttgtagtcacgggactgttgatcctgctccagcactcctgaaggaggtgggctcaccctccttcaccgtttctccgcaagaaacggaggctgggaggggcagtgggggcctgagctggaaagagtcagcctgactggggttgtctagcggcacatgctgtggagaggggcttc

SEQ ID NO: 303818 - DNA, 2162 bp, Homo sapiens
ggcgcaaccaagaacgcctcaatccccgagacgtggagtatggcactatcgaagggctcatcaccaccaatgttggagacagcactttagcagatttattggatcattcgtgtacatcaggaagtggctctggtcttccttttctggtacaaagaacagtggctcgccagattacactgttggagtgtgtcgggaaaggcaggtatggtgaggtgtggaggggcagctggcaaggggaaaatgttgccgtgaagatcttctcctcccgtgatgagaagtcatggttcagggaaacggaattgtacaacactgtgatgctgaggcatgaaaatatcttaggtttcattgcttcagacatgacatcaagacactccagtacccagctgtggttaattacacattatcatgaaatgggatcgttgtacgactatcttcagcttactactctggatacagttagctgccttcgaatagtgctgtccatagctagtggtcttgcacatttgcacatagagatatttgggacccaagggaaaccagccattgcccatcgagatttaaagagcaaaaatattctggttaagaagaatggacagtgttgcatagcagatttgggcctggcagtcatgcattcccagagcaccaatcagcttgatgtggggaacaatccccgtgtgggcaccaagcgctacatggcccccgaagttctagatgaaaccatccaggtggattgtttcgattcttataaaagggtcgatatttgggcctttggacttgttttgtgggaagtggccaggcggatggtgagcaatggtatagtggaggattacaagccaccgttctacgatgtggttcccaatgacccaagttttgaagatatgaggaaggtagtctgtgtggatcaacaaaggccaaacatacccaacagatggttctcagacccgacattaacctctctggccaagctaatgaaagaatgctggtatcaaaatccatccgcaagactcacagcactgcgtatcaaaaagactttgaccaaaattgataattccctcgacaaattgaaaactgactgttgacattttcatagtgtcaagaaggaagatttgacgttgttgtcattgtccagctgggacctaatgctggcctgactggttgtcagaatggaatccatctgtctccctccccaaatggctgctttgacaaggcagacgtcgtacccagccatgtgttggggagacatcaaaaccaccctaacctcgctcgatgactgtgaactgggcatttcacgaactgttcacactgcagagactaatgttggacagacactgttgcaaaggtagggactggaggaacacagagaaatcctaaaagagatctgggcattaagtcagtggctttgcatagctttcacaagtctcctagacactccccacgggaaactcaaggaggtggtgaatttttaatcagcaatattgcctgtgcttctcttctttattgcactaggaattctttgcattccttacttgcactgttactcttaattttaaagacccaacttgccaaaatgttggctgcgtactccactggtctgtctttggataataggaattcaatttggcaaaacaaaatgtaatgtcagactttgctgcattttacacatgtgctgatgtttacaatgatgccgaacattaggaattgtttatacacaactttgcaaattatttattacttgtgcacttagtagtttttacaaaactgctttgtgcatatgttaaagcttatttttatgtggtcttatgattttattacagaaatgtttttaacactatactctaaaatggacattttcttttattatcagttaaaatcacattttaagtgcttcacatttgtatgtgtgtagactgtaactttttttcagttcatatgcagaacgtatttagccattacccacgtgacaccaccgaatatattactgatttagaagcaaagatttcagtagaattttagtcctgaacgctacggggaaaatgcattttcttcagaattatccattacgtgcatttaaactctgccagaaaaaaataactattttgttttaatctactttttgtatttagtagttatttgtataaattaaataaactgttttcaagtca

SEQ ID NO: 303819 - DNA, 2356 bp, Homo sapiens
ggcgcaaccaagaacgcctcaatccccgagacgtggagtatggcactatcgaagggctcatcaccaccaatgttggagacagcactttagcagatttattggatcattcgtgtacatcaggaagtggctctggtcttccttttctggtacaaagaacagtggctcgccagattacactgttggagtgtgtcgggaaaggcaggtatggtgaggtgtggaggggcagctggcaaggggaaaatgttgccgtgaagatcttctcctcccgtgatgagaagtcatggttcagggaaacggaattgtacaacactgtgatgctgaggcatgaaaatatcttaggtttcattgcttcagacatgacatcaagacactccagtacccagctgtggttaattacacattatcatgaaatgggatcgttgtacgactatcttcagcttactactctggatacagttagctgccttcgaatagtgctgtccatagctagtggtcttgcacatttgcacatagagatatttgggacccaagggaaaccagccattgcccatcgagatttaaagagcaaaaatattctggttaagaagaatggacagtgttgcatagcagatttgggcctggcagtcatgcattcccagagcaccaatcagcttgatgtggggaacaatccccgtgtgggcaccaagcgctacatggcccccgaagttctagatgaaaccatccaggtggattgtttcgattcttataaaagggtcgatatttgggcctttggacttgttttgtgggaagtggccaggcggatggtgagcaatggtatagtggaggattacaagccaccgttctacgatgtggttcccaatgacccaagttttgaagatatgaggaaggtagtctgtgtggatcaacaaaggccaaacatacccaacagatggttctcagacccgacattaacctctctggccaagctaatgaaagaatgctggtatcaaaatccatccgcaagactcacagcactgcgtatcaaaaagactttgaccaaaattgataattccctcgacaaattgaaaactgactgttgacattttcatagtgtcaagaaggaagatttgacgttgttgtcattgtccagctgggacctaatgctggcctgactggttgtcagaatggaatccatctgtctccctccccaaatggctgctttgacaaggcagacgtcgtacccagccatgtgttggggagacatcaaaaccaccctaacctcgctcgatgactgtgaactgggcatttcacgaactgttcacactgcagagactaatgttggacagacactgttgcaaaggtagggactggaggaacacagagaaatcctaaaagagatctgggcattaagtcagtggctttgcatagctttcacaagtctcctagacactccccacgggaaactcaaggaggtggtgaatttttaatcagcaatattgcctgtgcttctcttctttattgcactaggaattctttgcattccttacttgcactgttactcttaattttaaagacccaacttgccaaaatgttggctgcgtactccactggtctgtctttggataataggaattcaatttggcaaaacaaaatgtaatgtcagactttgctgcattttacacatgtgctgatgtttacaatgatgccgaacattaggaattgtttatacacaactttgcaaattatttattacttgtgcacttagtagtttttacaaaactgctttgtgcatatgttaaagcttatttttatgtggtcttatgattttattacagaaatgtttttaacactatactctaaaatggacattttcttttattatcagttaaaatcacattttaagtgcttcacatttgtatgtgtgtagactgtaactttttttcagttcatatgcagaacgtatttagccattacccacgtgacaccaccgaatatattactgatttagaagcaaagatttcagtagaattttagtcctgaacgctacggggaaaatgcattttcttcagaattatccattacgtgcatttaaactctgccagaaaaaaataactattttgttttaatctactttttgtatttagtagttatttgtataaattaaataaactgttttcaagtcaaacagtgaaattgtttttcaaaatataaaaaagatctgtgtaacattatgcattttcttatgggagcaatagaagcacaaaactaatttgtaaattgaatttgctttttaaatctactcatgaacttatgtaagacatcataaggatgtcttacagcttgaatttggtataagaaaatttgtttcttcctttgg

SEQ ID NO: 303820 - DNA, 2179 bp, Homo sapiens
ggcgcaaccaagaacgcctcaatccccgagacgtggagtatggcactatcgaagggctcatcaccaccaatgttggagacagcactttagcagatttattggatcattcgtgtacatcaggaagtggctctggtcttccttttctggtacaaagaacagtggctcgccagattacactgttggagtgtgtcgggaaaggcaggtatggtgaggtgtggaggggcagctggcaaggggaaaatgttgccgtgaagatcttctcctcccgtgatgagaagtcatggttcagggaaacggaattgtacaacactgtgatgctgaggcatgaaaatatcttaggtttcattgcttcagacatgacatcaagacactccagtacccagctgtggttaattacacattatcatgaaatgggatcgttgtacgactatcttcagcttactactctggatacagttagctgccttcgaatagtgctgtccatagctagtggtcttgcacatttgcacatagagatatttgggacccaagggaaaccagccattgcccatcgagatttaaagagcaaaaatattctggttaagaagaatggacagtgttgcatagcagatttgggcctggcagtcatgcattcccagagcaccaatcagcttgatgtggggaacaatccccgtgtgggcaccaagcgctacatggcccccgaagttctagatgaaaccatccaggtggattgtttcgattcttataaaagggtcgatatttgggcctttggacttgttttgtgggaagtggccaggcggatggtgagcaatggtatagtggaggattacaagccaccgttctacgatgtggttcccaatgacccaagttttgaagatatgaggaaggtagtctgtgtggatcaacaaaggccaaacatacccaacagatggttctcagacccgacattaacctctctggccaagctaatgaaagaatgctggtatcaaaatccatccgcaagactcacagcactgcgtatcaaaaagactttgaccaaaattgataattccctcgacaaattgaaaactgactgttgacattttcatagtgtcaagaaggaagatttgacgttgttgtcattgtccagctgggacctaatgctggcctgactggttgtcagaatggaatccatctgtctccctccccaaatggctgctttgacaaggcagacgtcgtacccagccatgtgttggggagacatcaaaaccaccctaacctcgctcgatgactgtgaactgggcatttcacgaactgttcacactgcagagactaatgttggacagacactgttgcaaaggtagggactggaggaacacagagaaatcctaaaagagatctgggcattaagtcagtggctttgcatagctttcacaagtctcctagacactccccacgggaaactcaaggaggtggtgaatttttaatcagcaatattgcctgtgcttctcttctttattgcactaggaattctttgcattccttacttgcactgttactcttaattttaaagacccaacttgccaaaatgttggctgcgtactccactggtctgtctttggataataggaattcaatttggcaaaacaaaatgtaatgtcagactttgctgcattttacacatgtgctgatgtttacaatgatgccgaacattaggaattgtttatacacaactttgcaaattatttattacttgtgcacttagtagtttttacaaaactgctttgtgcatatgttaaagcttatttttatgtggtcttatgattttattacagaaatgtttttaacactatactctaaaatggacattttcttttattatcagttaaaatcacattttaagtgcttcacatttgtatgtgtgtagactgtaactttttttcagttcatatgcagaacgtatttagccattacccacgtgacaccaccgaatatattactgatttagaagcaaagatttcagtagaattttagtcctgaacgctacggggaaaatgcattttcttcagaattatccattacgtgcatttaaactctgccagaaaaaaataactattttgttttaatctacttttttgacttgaaaacagtttatttaatttagcacaaataactactaaatacaaaaagtaggtcgagc

SEQ ID NO: 303821 - DNA, 514 bp, Homo sapiens
agaatacagtactcaggttttagatttgatgttcttttaggatggttgatgaatggtctgttcctaaaatatcaacatgctgaagggcttggcactatcattatgggtgagcacaaagatattattgctatctgaaacttaaggaatgtaaaatatcttttaaagtattacttataatgaaatgaatatgaaattttcctattagcagtgcccttttaaggaataaatgctattatttttctctgttgatgcttctgtaaacctcctcttagggcaattggtcagtttaattactttttgttacagatgacatttactgtgtaggtcgctatttctaaatactttaagttataatgtggaatcctcatgtatattaatttttttcttgctctctccaggtttcattgcttcagacatgacatcaagacactccagtacccagctgtggttaattacacattatcatgaaatgggatcgttgtacgactatcttcagcttactactctggataca

SEQ ID NO: 303822 - DNA, 988 bp, Homo sapiens
agcggacggaggtgcgaccgggtcccggcctgagtcgcggccacccgcaggtctgagctgtgggctgaggcagcgcagccgctgccgcagggtgcgcgatgccttgaacctgggaaactatgtgaagcaacactctggattttgaaagacatcttttcatcatgggacagcaaatttcggatcagacacagttggttattaacaagttaccagaaaaagtagcaaaacatgttacgttggttcgagagagtggctccttaacttatgaagaatttcttgggagagtagctgagcttaatgatgtaacggctaaagtggcttctggccaggaaaaacatcttctctttgaggtacaacctgggtctgattcctctgctttttggaaagtggttgtacgggtggtctgtaccaagattaacaaaagcagtggcattgtggaggcatcacggatcatgaatttataccagtttattcaactttataaagatatcacaagtcaagcagcaggagtattggcacagagctccacctctgaagaacctgatgaaaactcatcctctgtaacatcttgtcaggctagtctttggatgggaagggtgaagcagctgaccgatgaggaggagtgttgtatctgtatggatgggcgggctgacctcatcctgccttgtgctcacagcttttgtcagaagtgtattgataaatgatgactggagcaaatgaatcttgggtggtatcagatgcacccactgaagatgatatggctaactatattcttaacatggctgatgaggcaggccagccccacaggccatgaccttgaagtgaaagtcttctgttgctattgtgggctcaaatatttggtcatgggggaagaatgtagggttgtggcactggcacagacacaggaaaatccattttccccactcttttatttttgctattctgatcatttgtcccccttttaaaaataaacttcccatgtcttcca

SEQ ID NO: 303823 - DNA, 1028 bp, Homo sapiens
agcggacggaggtgcgaccgggtcccggcctgagtcgcggccacccgcaggtctgagctgtgggctgaggcagcgcagccgctgccgcagggtgcgcgatgccttgaacctgggaaactatgtgaagcaacactctggattttgaaagacatcttttcatcatgggacagcaaatttcggatcagacacagttggttattaacaagttaccagaaaaagtagcaaaacatgttacgttggttcgagagagtggctccttaacttatgaagaatttcttgggagagtagctgagcttaatgatgtaacggctaaagtggcttctggccaggaaaaacatcttctctttgaggtacaacctgggtctgattcctctgctttttggaaagtggttgtacgggtggtctgtaccaagattaacaaaagcagtggcattgtggaggcatcacggatcatgaatttataccagtttattcaactttataaagatatcacaagtcaagcagcaggagtattggcacagagctccacctctgaagaacctgatgaaaactcatcctctgtaacatcttgtcaggctagtctttggatgggaagggtgaagcagctgaccgatgaggaggagtgttgtatctgtatggatgggcgggctgacctcatcctgccttgtgctcacagcttttgtcagaagtgtattgataaatggagtgatcgacacaggaattgccctatttgtcgcctacagatgactggagcaaatgaatcttgggtggtatcagatgcacccactgaagatgatatggctaactatattcttaacatggctgatgaggcaggccagccccacaggccatgaccttgaagtgaaagtcttctgttgctattgtgggctcaaatatttggtcatgggggaagaatgtagggttgtggcactggcacagacacaggaaaatccattttccccactcttttatttttgctattctgatcatttgtcccccttttaaaaataaacttcccatgtcttcca

SEQ ID NO: 303824 - DNA, 1435 bp, Homo sapiens
agcggacggaggtgcgaccgggtcccggcctgagtcgcggccacccgcaggtctgagctgtgggctgaggcagcgcagccgctgccgcagggtgcgcgatgccttgaacctgggaaactatgtgaagcaacactctggattttgaaagacatcttttcatcatgggacagcaaatttcggatcagacacagttggttattaacaagttaccagaaaaagtagcaaaacatgttacgttggttcgagagagtggctccttaacttatgaagaatttcttgggagagtagctgagcttaatgatgtaacggctaaagtggcttctggccaggaaaaacatcttctctttgaggtacaacctgggtctgattcctctgctttttggaaagtggttgtacgggtggtctgtaccaagattaacaaaagcagtggcattgtggaggcatcacggatcatgaatttataccagtttattcaactttataaagatatcacaagtcaagcagcaggagtattggcacagagctccacctctgaagaacctgatgaaaactcatcctctgtaacatcttgtcaggctagtctttggatgggaagggtgaagcagctgaccgatgaggaggagtgttgtatctgtatggatgggcgggctgacctcatcctgccttgtgctcacagcttttgtcagaagtgtattgataaatggtaagttacctactgcattcatgggctgggccaaggtcagtgggatagtgtacatgaataaactttgaaaagtgcaaaaatactgtagttaagtatgagagagattttattctttagtactttgaattttatggcatgccttctactggttaaaactatttttgtttttacacctaacatttattaaatatgggggtgtaccttagttttgacacttttcttttgctgtatgaaaatttgtgcctgacttaagtctaaaatcaaacatttccctttttcctcctttttttctcctcatttctacatttattctgtgtatgtgtttagaaggaataaattcttgaatactggacctcagggaactttagagatcagctagtcaagttcattattttacaaaataagacttgagcgtttaggataatttataaaatacatacaataaactacatgtatttaatgtacagtttaatatgttttggcatatatacacacccataaaagttatgaatttttataaatggaatcatataatatgtgctttttttgtctggcttctttcattcagtctaattaccttggtatttattcatgttgtagcatgtatcaatagttcatgcctttttattgctgagtaatgtctgttatgtggataccatagcttgtttattcacctattgagggaaattagattgtttccatattttctattacaaaataaaggtactagat

SEQ ID NO: 303825 - DNA, 1127 bp, Homo sapiens
agcggacggaggtgcgaccgggtcccggcctgagtcgcggccacccgcaggtctgagctgtgggctgaggcagcgcagccgctgccgcagggtgcgcgatgccttgaacctgggaaactatgtgaagcaacactctggattttgaaagacatcttttcatcatgggacagcaaatttcggatcagacacagttggttattaacaagttaccagaaaaagtagcaaaacatgttacgttggttcgagagagtggctccttaacttatgaagaatttcttgggagagtagctgagcttaatgatgtcacaggatatttctgactggatttgattcttaaaaccaatttccatgggtcagaattggcatttcagacgtgcagtgatctccgagaactgtagaattaaacctatacaggacgaagcttggcagctagaaaacagagctggaaactggcacggctgaattattttcaccgaagactttgtttcctaagaacggctaaagtggcttctggccaggaaaaacatcttctctttgaggtacaacctgggtctgattcctctgctttttggaaagtggttgtacgggtggtctgtaccaagattaacaaaagcagtggcattgtggaggcatcacggatcatgaatttataccagtttattcaactttataaagatatcacaagtcaagcagcaggagtattggcacagagctccacctctgaagaacctgatgaaaactcatcctctgtaacatcttgtcaggctagtctttggatgggaaggtatataatgcataagtattgtatttcacttattttctaatatgaaaacaactgaaatctattaatatttttgctgttgctcattgtagcatcttaaatcttttttttttctcagttggtattgtatctgagatcagttttggggttattctgtgcttcggatgttgttacagtgctaaattaaagtggcttggcagggccactttaatattaatgtttctgtcacactggtctccaggaatccgctctatatgcatgcatttattgacaaaggagatagttaacaccttccttataataggtatttaggttcttagacagtcaaagctttttagggaattag

SEQ ID NO: 303826 - DNA, 659 bp, Homo sapiens
agcggacggaggtgcgaccgggtcccggcctgagtcgcggccacccgcaggtctgagctgtgggctgaggcagcgcagccgctgccgcagggtgcgcgatgccttgaacctgggaaactatgtgaagcaacactctggattttgaaagacatcttttcatcatgggacagcaaatttcggatcagacacagttggttattaacaagttaccagaaaaagtagcaaaacatgttacgttggttcgagagagtggctccttaacttatgaagaatttcttgggagagtagctgagcttaatgatgtaacggctaaagtggcttctggccaggaaaaacatcttctctttgaggtacaacctgggtctgattcctctgctttttggaaagtggttgtacgggtggtctgtaccaagattaacaaaagcagtggcattgtggaggcatcacggatcatgaatttataccagtttattcaactttataaagatatcacaagtcaagcagcaggagtattgcctcatcatctcacttcttttatcctggtgaacccgatcctccgccaccgcccgtccggtttgtttttgggtgggaaggggcccccccctgaccctgagggtgtgtctttgttctggtcgcttgtccaactgcatcaaaaaaat

SEQ ID NO: 303827 - DNA, 3837 bp, Homo sapiens
agcggacggaggtgcgaccgggtcccggcctgagtcgcggccacccgcaggtctgagctgtgggctgaggcagcgcagccgctgccgcagggtgcgcgatgccttgaacctgggaaactatgtgaagcaacactctggattttgaaagacatcttttcatcatgggacagcaaatttcggatcagacacagttggttattaacaagttaccagaaaaagtagcaaaacatgttacgttggttcgagagagtggctccttaacttatgaagaatttcttgggagagtagctgagcttaatgatgtaacggctaaagtggcttctggccaggaaaaacatcttctctttgaggtacaacctgggtctgattcctctgctttttggaaagtggttgtacgggtggtctgtaccaagattaacaaaagcagtggcattgtggaggcatcacggatcatgaatttataccagtttattcaactttataaagatatcacaagtcaagcagcaggagtattggcacagagctccacctctgaagaacctgatgaaaactcatcctctgtaacatcttgtcaggctagtctttggatgggaagggtgaagcagctgaccgatgaggaggagtgttgtatctgtatggatgggcgggctgacctcatcctgccttgtgctcacagcttttgtcagaagtgtattgataaatggagtgatcgacacaggaattgccctatttgtcgcctacagatgactggagcaaatgaatcttgggtggtatcagatgcacccactgaagatgatatggctaactatattcttaacatggctgatgaggcaggccagccccacaggccatgaccttgaagtgaaagtcttctgttgctattgtgggctcaaatatttggtcatgggggaagaatgtagggttgtggcactggcacagacacaggaaaatccattttccccactcttttatttttgctattctgatcatttgtcccccttttaaaaataaacttcccatgtcttccatttgtggtactaaaatttgctactgttttagaccatattttcctattatttatctgttcaaatttgtattattacaactaatagctcttgaattctttgctaaaggtaacagcaacacttccagaggcttctaaaacactactgttttgcagggcaggagtattctggaatctttttacttagatataaaataaacctcgaatattaaaaagttgtagccatctgagagaggaaagtttaagtgactgaaaatgtagaatacttcaacgtgcatgttactacttaaaactagtctttctgctggaatctaaggagtatatatatatatgcccccttgtggttaattattgctcctttaataatttttacttgaaatgatccacaattatttcataactttagcagtgtgttttggaactactgtacttaaaggtttgtttgtttgtttttgccatactgtataatttgggtgaggtctacaaaattgggtgtgactttcctttgcaaatggatttctcctggggaattttcttggctgttctggaaatgctttcccacagctgggtaactgttctaaatggctttgataatgctcacacatcttggagtttcagaaggaaattattctgcatcacaaatactaaattttatatttctaaattactataggtcatttaatattggtttatggtgcttttatttccttaacttgaaaacatctttctgagatttcagagtcctcaaatttcttagattaagagacaagaggccagtgcagtggttcacacctgtaatcccagcactttgggaggccgaggtgggtggatcatttgaggttaggagtttgagaccagcctggccaacatggcgaaatcctctctctactaaaatacaaaaattagctgggcatggtggcaggtgcctgtaatctcagctactcgggaggctgaggcagaattgcttgaacccaggaggtggaggttgcagtgagccgagatcacaccactgcactccagcctgggagacagaacgagactcctaatcaaaaaaaaacacaagaaaatagagtgaggcttttttaccgtatatacataaaatacttatgaaaattagaagataatttggcattccctactgtttcactgtacttccattgaaatactctttccattaaaatattctgaaacaatatagtaataatggaattgtgatcttcagttgcacctcaaccattttttttgcttatgaactaaaatttctaacattaacatttcggcatgtaataaaacaagggcctatctcctttaaaatttaacattccatgtaacttttctgacttatcattcataagttgcaaatattactattttcctaaaccagggtacacaatttaagttgccacttattgatgacagaatttctggatagtaggattttaataggcgagcaaataaaattcaaatcaatttcaaggaaaaacatctggccaggggtagcttgatttcgcccccaaaaatactgaagactaatccattgacattcataatgggacagctaagtaccaaatagctaactactccctatggaggtttatgcaagcagagtaccaggggttccatcatatcaacctggcaatgcacttggtggttgtgtgaccttgagaaagtctcttactcttgtttatgtgttcttactttagaaactgagactttatttgtggttttcacactatttcagcagcaaaaactttttcaaggaaaatcttacagaacctttaaacacgtgtgcatacacacataccctataccccactatataaaagtcatattattataaatttccttattatataaactttatatactataaatgtgattaagtcaatgaataaaaacattaatgcattggtgatatccagcatgtttgaatttggtgagtaacacacatatagtgggagtcgttttttttaaaaaaattttttaattaaattcaagtcaaatttgcagaaccctgtatctcctccatagattcttagtattccatggaacatattttgaaaaccttgggatagatgatccactgaaatcttttccagctctaagattttaaattgtccttttagattagacttgctgagtttaattcagattacctaattttaaaatgtttctgaaaagtgaacagagttaccttacagagttttggatctttccagggatagccaatgattttatcccccagaatccttcacctttcaaggagttatttaacaatgagcccagtgactcaatagggcccaaacctttttattttacaatatgagctccaagacacttactgatctactgtgaatataaaatgttattagccttatcaaataaataaatgagcacagctctttgttcgctctattgaactgggtgataattatttagatgtgaatgttaggtcagttctactgtaataactaatcgtaaaagttgtaaatttgtttaatggatgaaatgtacactttttgtattctgtacagctttgtcttttttaaatatgaagtacttaaatgtacttactatgataggaaatataatgtgtgccttctaggatttgtgaagtggtttcatgaactctaaggaatttgttttccctatcctaactcagtaacagagggtttactccgattatgtatagaaccttagtttgagaaaatgaattttactatgtactgaatttagaggttgagaataataggatctgtgttattcttagtacccactgataaattgtgcaataaataatctttcgcaagtga

SEQ ID NO: 303828 - DNA, 4101 bp, Homo sapiens
agcggacggaggtgcgaccgggtcccggcctgagtcgcggccacccgcaggtctgagctgtgggctgaggcagcgcagccgctgccgcagggtgcgcgatgccttgaacctgggaaactatgtgaagcaacactctggattttgaaagacatcttttcatcatgggacagcaaatttcggatcagacacagttggttattaacaagttaccagaaaaagtagcaaaacatgttacgttggttcgagagagtggctccttaacttatgaagaatttcttgggagagtagctgagcttaatgatgtaacggctaaagtggcttctggccaggaaaaacatcttctctttgaggtacaacctgggtctgattcctctgctttttggaaagtggttgtacgggtggtctgtaccaagattaacaaaagcagtggcattgtggaggcatcacggatcatgaatttataccagtttattcaactttataaagatatcacaagtcaagcagcaggagtattggcacagagctccacctctgaagaacctgatgaaaactcatcctctgtaacatcttgtcaggctagtctttggatgggaagggtgaagcagctgaccgatgaggaggagtgttgtatctgtatggatgggcgggctgacctcatcctgccttgtgctcacagcttttgtcagaagtgtattgataaatggagtgatcgacacaggaattgccctatttgtcgcctacagatgactggagcaaatgaatcttgggtggtatcagatgcacccactgaagatgatatggctaactatattcttaacatggctgatgaggcaggccagccccacaggccatgaccttgaagtgaaagtcttctgttgctattgtgggctcaaatatttggtcatgggggaagaatgtagggttgtggcactggcacagacacaggaaaatccattttccccactcttttatttttgctattctgatcatttgtcccccttttaaaaataaacttcccatgtcttccatttgtggtactaaaatttgctactgttttagaccatattttcctattatttatctgttcaaatttgtattattacaactaatagctcttgaattctttgctaaaggtaacagcaacacttccagaggcttctaaaacactactgttttgcagggcaggagtattctggaatctttttacttagatataaaataaacctcgaatattaaaaagttgtagccatctgagagaggaaagtttaagtgactgaaaatgtagaatacttcaacgtgcatgttactacttaaaactagtctttctgctggaatctaaggagtatatatatatatgcccccttgtggttaattattgctcctttaataatttttacttgaaatgatccacaattatttcataactttagcagtgtgttttggaactactgtacttaaaggtttgtttgtttgtttttgccatactgtataatttgggtgaggtctacaaaattgggtgtgactttcctttgcaaatggatttctcctggggaattttcttggctgttctggaaatgctttcccacagctgggtaactgttctaaatggctttgataatgctcacacatcttggagtttcagaaggaaattattctgcatcacaaatactaaattttatatttctaaattactataggtcatttaatattggtttatggtgcttttatttccttaacttgaaaacatctttctgagatttcagagtcctcaaatttcttagattaagagacaagaggccagtgcagtggttcacacctgtaatcccagcactttgggaggccgaggtgggtggatcatttgaggttaggagtttgagaccagcctggccaacatggcgaaatcctctctctactaaaatacaaaaattagctgggcatggtggcaggtgcctgtaatctcagctactcgggaggctgaggcagaattgcttgaacccaggaggtggaggttgcagtgagccgagatcacaccactgcactccagcctgggagacagaacgagactcctaatcaaaaaaaaacacaagaaaatagagtgaggcttttttaccgtatatacataaaatacttatgaaaattagaagataatttggcattccctactgtttcactgtacttccattgaaatactctttccattaaaatattctgaaacaatatagtaataatggaattgtgatcttcagttgcacctcaaccattttttttgcttatgaactaaaatttctaacattaacatttcggcatgtaataaaacaagggcctatctcctttaaaatttaacattccatgtaacttttctgacttatcattcataagttgcaaatattactattttcctaaaccagggtacacaatttaagttgccacttattgatgacagaatttctggatagtaggattttaataggcgagcaaataaaattcaaatcaatttcaaggaaaaacatctggccaggggtagcttgatttcgcccccaaaaatactgaagactaatccattgacattcataatgggacagctaagtaccaaatagctaactactccctatggaggtttatgcaagcagagtaccaggggttccatcatatcaacctggcaatgcacttggtggttgtgtgaccttgagaaagtctcttactcttgtttatgtgttcttactttagaaactgagactttatttgtggttttcacactatttcagcagcaaaaactttttcaaggaaaatcttacagaacctttaaacacgtgtgcatacacacataccctataccccactatataaaagtcatattattataaatttccttattatataaactttatatactataaatgtgattaagtcaatgaataaaaacattaatgcattggtgatatccagcatgtttgaatttggtgagtaacacacatatagtgggagtcgttttttttaaaaaaattttttaattaaattcaagtcaaatttgcagaaccctgtatctcctccatagattcttagtattccatggaacatattttgaaaaccttgggatagatgatccactgaaatcttttccagctctaagattttaaattgtccttttagattagacttgctgagtttaattcagattacctaattttaaaatgtttctgaaaagtgaacagagttaccttacagagttttggatctttccagggatagccaatgattttatcccccagaatccttcacctttcaaggagttatttaacaatgagcccagtgactcaatagggcccaaacctttttattttacaatatgagctccaagacacttactgatctactgtgaatataaaatgttattagccttatcaaataaataaatgagcacagctctttgttcgctctattgaactgggtgataattatttagatgtgaatgttaggtcagttctactgtaataactaatcgtaaaagttgtaaatttgtttaatggatgaaatgtacactttttgtattctgtacagctttgtcttttttaaatatgaagtacttaaatgtacttactatgataggaaatataatgtgtgccttctaggatttgtgaagtggtttcatgaactctaaggaatttgttttccctatcctaactcagtaacagagggtttactccgattatgtatagaaccttagtttgagaaaatgaattttactatgtactgaatttagaggttgagaataataggatctgtgttattcttagtacccactgataaattgtgcaataaataatctttcgcaagtgaattttagctaattgaagagattattttcctatgtaatttcacattctaatatactaaatgtttatattccttagagaactattttatattgtgcgctgggggcttgtgatgtttgtgtgctgttttaaaattcatttcaaattggactcgatttccttatatctaatatatatctgggagaaaaggctgcttgaaaatatcttttgattcagtgatttttaacattgggaagttgagtttattaaaaggtagtctgaagaattt

SEQ ID NO: 303829 - DNA, 2803 bp, Homo sapiens
agcggacggaggtgcgaccgggtcccggcctgagtcgcggccacccgcaggtctgagctgtgggctgaggcagcgcagccgctgccgcagggtgcgcgatgccttgaacctgggaaactatgtgaagcaacactctggattttgaaagacatcttttcatcatgggacagcaaatttcggatcagacacagttggttattaacaagttaccagaaaaagtagcaaaacatgttacgttggttcgagagagtggctccttaacttatgaagaatttcttgggagagtagctgagcttaatgatgtaacggctaaagtggcttctggccaggaaaaacatcttctctttgaggtacaacctgggtctgattcctctgctttttggaaagtggttgtacgggtggtctgtaccaagattaacaaaagcagtggcattgtggaggcatcacggatcatgaatttataccagtttattcaactttataaagatatcacaagtcaagcagcaggagtattggcacagagctccacctctgaagaacctgatgaaaactcatcctctgtaacatcttgtcaggctagtctttggatgggaagggtgaagcagctgaccgatgaggaggagtgttgtatctgtatggatgggcgggctgacctcatcctgccttgtgctcacagcttttgtcagaagtgtattgataaatggagtgatcgacacaggaattgccctatttgtcgcctacagatgactggagcaaatgaatcttgggtggtatcagatgcacccactgaagatgatatggctaactatattcttaacatggctgatgaggcaggccagccccacaggccatgaccttgaagtgaaagtcttctgttgctattgtgggctcaaatatttggtcatgggggaagaatgtagggttgtggcactggcacagacacaggaaaatccattttccccactcttttatttttgctattctgatcatttgtcccccttttaaaaataaacttcccatgtcttccatttgtggtactaaaatttgctactgttttagaccatattttcctattatttatctgttcaaatttgtattattacaactaatagctcttgaattctttgctaaaggtaacagcaacacttccagaggcttctaaaacactactgttttgcagggcaggagtattctggaatctttttacttagatataaaataaacctcgaatattaaaaagttgtagccatctgagagaggaaagtttaagtgactgaaaatgtagaatacttcaacgtgcatgttactacttaaaactagtctttctgctggaatctaaggagtatatatatatatgcccccttgtggttaattattgctcctttaataatttttacttgaaatgatccacaattatttcataactttagcagtgtgttttggaactactgtacttaaaggtttgtttgtttgtttttgccatactgtataatttgggtgaggtctacaaaattgggtgtgactttcctttgcaaatggatttctcctggggaattttcttggctgttctggaaatgctttcccacagctgggtaactgttctaaatggctttgataatgctcacacatcttggagtttcagaaggaaattattctgcatcacaaatactaaattttatatttctaaattactataggtcatttaatattggtttatggtgcttttatttccttaacttgaaaacatctttctgagatttcagagtcctcaaatttcttagattaagagacaagaggccagtgcagtggttcacacctgtaatcccagcactttgggaggccgaggtgggtggatcatttgaggttaggagtttgagaccagcctggccaacatggcgaaatcctctctctactaaaatacaaaaattagctgggcatggtggcaggtgcctgtaatctcagctactcgggaggctgaggcagaattgcttgaacccaggaggtggaggttgcagtgagccgagatcacaccactgcactccagcctgggagacagaacgagactcctaatcaaaaaaaaacacaagaaaatagagtgaggcttttttaccgtatatacataaaatacttatgaaaattagaagataatttggcattccctactgtttcactgtacttccattgaaatactctttccattaaaatattctgaaacaatatagtaataatggaattgtgatcttcagttgcacctcaaccattttttttgcttatgaactaaaatttctaacattaacatttcggcatgtaataaaacaagggcctatctcctttaaaatttaacattccatgtaacttttctgacttatcattcataagttgcaaatattactattttcctaaaccagggtacacaatttaagttgccacttattgatgacagaatttctggatagtaggattttaataggcgagcaaataaaattcaaatcaatttcaaggaaaaacatctggccaggggtagcttgatttcgcccccaaaaatactgaagactaatcccagcactttgggaggccgaggtgggtggatcatttgaggttaggagtttgagaccagcctggccaacatggcgaaatcctctctctactaaaatacaaaaattagctgggcatggtggcaggtgcctgtaatctcagctactcgggaggctgaggcagaactgcttgaacccaggaggtggaggttgcagtgagccgagatcacaccactgcactccagcctgggagacagaacgagactccc

SEQ ID NO: 303830 - DNA, 3882 bp, Homo sapiens
ggttccagttgcccggggtggcggtggcttgtcccgcctcggggtggttctgagggacccggagagagtttttccttctctatcccaaaacggttgtttgaatattgccgccggctcagtcattcggccgccggacttagctgttggttaaatgtccagaaactatgtgaagcaacactctggattttgaaagacatcttttcatcatgggacagcaaatttcggatcagacacagttggttattaacaagttaccagaaaaagtagcaaaacatgttacgttggttcgagagagtggctccttaacttatgaagaatttcttgggagagtagctgagcttaatgatgtaacggctaaagtggcttctggccaggaaaaacatcttctctttgaggtacaacctgggtctgattcctctgctttttggaaagtggttgtacgggtggtctgtaccaagattaacaaaagcagtggcattgtggaggcatcacggatcatgaatttataccagtttattcaactttataaagatatcacaagtcaagcagcaggagtattggcacagagctccacctctgaagaacctgatgaaaactcatcctctgtaacatcttgtcaggctagtctttggatgggaagggtgaagcagctgaccgatgaggaggagtgttgtatctgtatggatgggcgggctgacctcatcctgccttgtgctcacagcttttgtcagaagtgtattgataaatggagtgatcgacacaggaattgccctatttgtcgcctacagatgactggagcaaatgaatcttgggtggtatcagatgcacccactgaagatgatatggctaactatattcttaacatggctgatgaggcaggccagccccacaggccatgaccttgaagtgaaagtcttctgttgctattgtgggctcaaatatttggtcatgggggaagaatgtagggttgtggcactggcacagacacaggaaaatccattttccccactcttttatttttgctattctgatcatttgtcccccttttaaaaataaacttcccatgtcttccatttgtggtactaaaatttgctactgttttagaccatattttcctattatttatctgttcaaatttgtattattacaactaatagctcttgaattctttgctaaaggtaacagcaacacttccagaggcttctaaaacactactgttttgcagggcaggagtattctggaatctttttacttagatataaaataaacctcgaatattaaaaagttgtagccatctgagagaggaaagtttaagtgactgaaaatgtagaatacttcaacgtgcatgttactacttaaaactagtctttctgctggaatctaaggagtatatatatatatgcccccttgtggttaattattgctcctttaataatttttacttgaaatgatccacaattatttcataactttagcagtgtgttttggaactactgtacttaaaggtttgtttgtttgtttttgccatactgtataatttgggtgaggtctacaaaattgggtgtgactttcctttgcaaatggatttctcctggggaattttcttggctgttctggaaatgctttcccacagctgggtaactgttctaaatggctttgataatgctcacacatcttggagtttcagaaggaaattattctgcatcacaaatactaaattttatatttctaaattactataggtcatttaatattggtttatggtgcttttatttccttaacttgaaaacatctttctgagatttcagagtcctcaaatttcttagattaagagacaagaggccagtgcagtggttcacacctgtaatcccagcactttgggaggccgaggtgggtggatcatttgaggttaggagtttgagaccagcctggccaacatggcgaaatcctctctctactaaaatacaaaaattagctgggcatggtggcaggtgcctgtaatctcagctactcgggaggctgaggcagaattgcttgaacccaggaggtggaggttgcagtgagccgagatcacaccactgcactccagcctgggagacagaacgagactcctaatcaaaaaaaaacacaagaaaatagagtgaggcttttttaccgtatatacataaaatacttatgaaaattagaagataatttggcattccctactgtttcactgtacttccattgaaatactctttccattaaaatattctgaaacaatatagtaataatggaattgtgatcttcagttgcacctcaaccattttttttgcttatgaactaaaatttctaacattaacatttcggcatgtaataaaacaagggcctatctcctttaaaatttaacattccatgtaacttttctgacttatcattcataagttgcaaatattactattttcctaaaccagggtacacaatttaagttgccacttattgatgacagaatttctggatagtaggattttaataggcgagcaaataaaattcaaatcaatttcaaggaaaaacatctggccaggggtagcttgatttcgcccccaaaaatactgaagactaatccattgacattcataatgggacagctaagtaccaaatagctaactactccctatggaggtttatgcaagcagagtaccaggggttccatcatatcaacctggcaatgcacttggtggttgtgtgaccttgagaaagtctcttactcttgtttatgtgttcttactttagaaactgagactttatttgtggttttcacactatttcagcagcaaaaactttttcaaggaaaatcttacagaacctttaaacacgtgtgcatacacacataccctataccccactatataaaagtcatattattataaatttccttattatataaactttatatactataaatgtgattaagtcaatgaataaaaacattaatgcattggtgatatccagcatgtttgaatttggtgagtaacacacatatagtgggagtcgttttttttaaaaaaattttttaattaaattcaagtcaaatttgcagaaccctgtatctcctccatagattcttagtattccatggaacatattttgaaaaccttgggatagatgatccactgaaatcttttccagctctaagattttaaattgtccttttagattagacttgctgagtttaattcagattacctaattttaaaatgtttctgaaaagtgaacagagttaccttacagagttttggatctttccagggatagccaatgattttatcccccagaatccttcacctttcaaggagttatttaacaatgagcccagtgactcaatagggcccaaacctttttattttacaatatgagctccaagacacttactgatctactgtgaatataaaatgttattagccttatcaaataaataaatgagcacagctctttgttcgctctattgaactgggtgataattatttagatgtgaatgttaggtcagttctactgtaataactaatcgtaaaagttgtaaatttgtttaatggatgaaatgtacactttttgtattctgtacagctttgtcttttttaaatatgaagtacttaaatgtacttactatgataggaaatataatgtgtgccttctaggatttgtgaagtggtttcatgaactctaaggaatttgttttccctatcctaactcagtaacagagggtttactccgattatgtatagaaccttagtttgagaaaatgaattttactatgtactgaatttagaggttgagaataataggatctgtgttattcttagtacccactgataaattgtgcaataaataatctttcgcaagtga

SEQ ID NO: 303831 - DNA, 4026 bp, Homo sapiens
agcggacggaggtgcgaccgggtcccggcctgagtcgcggccacccgcaggtctgagctgtgggctgaggcagcgcagccgctgccgcagggtgcgcgatgccttgaacctgggaaactatgtgaagcaacactctggattttgaaagacatcttttcatcatgggacagcaaatttcggatcagacacagttggttattaacaagttaccagaaaaagtagcaaaacatgttacgttggttcgagagagtggctccttaacttatgaagaatttcttgggagagtagctgagcttaatgatgtcacaggatatttctgactggatttgattcttaaaaccaatttccatgggtcagaattggcatttcagacgtgcagtgatctccgagaactgtagaattaaacctatacaggacgaagcttggcagctagaaaacagagctggaaactggcacggctgaattattttcaccgaagactttgtttcctaagaacggctaaagtggcttctggccaggaaaaacatcttctctttgaggtacaacctgggtctgattcctctgctttttggaaagtggttgtacgggtggtctgtaccaagattaacaaaagcagtggcattgtggaggcatcacggatcatgaatttataccagtttattcaactttataaagatatcacaagtcaagcagcaggagtattggcacagagctccacctctgaagaacctgatgaaaactcatcctctgtaacatcttgtcaggctagtctttggatgggaagggtgaagcagctgaccgatgaggaggagtgttgtatctgtatggatgggcgggctgacctcatcctgccttgtgctcacagcttttgtcagaagtgtattgataaatggagtgatcgacacaggaattgccctatttgtcgcctacagatgactggagcaaatgaatcttgggtggtatcagatgcacccactgaagatgatatggctaactatattcttaacatggctgatgaggcaggccagccccacaggccatgaccttgaagtgaaagtcttctgttgctattgtgggctcaaatatttggtcatgggggaagaatgtagggttgtggcactggcacagacacaggaaaatccattttccccactcttttatttttgctattctgatcatttgtcccccttttaaaaataaacttcccatgtcttccatttgtggtactaaaatttgctactgttttagaccatattttcctattatttatctgttcaaatttgtattattacaactaatagctcttgaattctttgctaaaggtaacagcaacacttccagaggcttctaaaacactactgttttgcagggcaggagtattctggaatctttttacttagatataaaataaacctcgaatattaaaaagttgtagccatctgagagaggaaagtttaagtgactgaaaatgtagaatacttcaacgtgcatgttactacttaaaactagtctttctgctggaatctaaggagtatatatatatatgcccccttgtggttaattattgctcctttaataatttttacttgaaatgatccacaattatttcataactttagcagtgtgttttggaactactgtacttaaaggtttgtttgtttgtttttgccatactgtataatttgggtgaggtctacaaaattgggtgtgactttcctttgcaaatggatttctcctggggaattttcttggctgttctggaaatgctttcccacagctgggtaactgttctaaatggctttgataatgctcacacatcttggagtttcagaaggaaattattctgcatcacaaatactaaattttatatttctaaattactataggtcatttaatattggtttatggtgcttttatttccttaacttgaaaacatctttctgagatttcagagtcctcaaatttcttagattaagagacaagaggccagtgcagtggttcacacctgtaatcccagcactttgggaggccgaggtgggtggatcatttgaggttaggagtttgagaccagcctggccaacatggcgaaatcctctctctactaaaatacaaaaattagctgggcatggtggcaggtgcctgtaatctcagctactcgggaggctgaggcagaattgcttgaacccaggaggtggaggttgcagtgagccgagatcacaccactgcactccagcctgggagacagaacgagactcctaatcaaaaaaaaacacaagaaaatagagtgaggcttttttaccgtatatacataaaatacttatgaaaattagaagataatttggcattccctactgtttcactgtacttccattgaaatactctttccattaaaatattctgaaacaatatagtaataatggaattgtgatcttcagttgcacctcaaccattttttttgcttatgaactaaaatttctaacattaacatttcggcatgtaataaaacaagggcctatctcctttaaaatttaacattccatgtaacttttctgacttatcattcataagttgcaaatattactattttcctaaaccagggtacacaatttaagttgccacttattgatgacagaatttctggatagtaggattttaataggcgagcaaataaaattcaaatcaatttcaaggaaaaacatctggccaggggtagcttgatttcgcccccaaaaatactgaagactaatccattgacattcataatgggacagctaagtaccaaatagctaactactccctatggaggtttatgcaagcagagtaccaggggttccatcatatcaacctggcaatgcacttggtggttgtgtgaccttgagaaagtctcttactcttgtttatgtgttcttactttagaaactgagactttatttgtggttttcacactatttcagcagcaaaaactttttcaaggaaaatcttacagaacctttaaacacgtgtgcatacacacataccctataccccactatataaaagtcatattattataaatttccttattatataaactttatatactataaatgtgattaagtcaatgaataaaaacattaatgcattggtgatatccagcatgtttgaatttggtgagtaacacacatatagtgggagtcgttttttttaaaaaaattttttaattaaattcaagtcaaatttgcagaaccctgtatctcctccatagattcttagtattccatggaacatattttgaaaaccttgggatagatgatccactgaaatcttttccagctctaagattttaaattgtccttttagattagacttgctgagtttaattcagattacctaattttaaaatgtttctgaaaagtgaacagagttaccttacagagttttggatctttccagggatagccaatgattttatcccccagaatccttcacctttcaaggagttatttaacaatgagcccagtgactcaatagggcccaaacctttttattttacaatatgagctccaagacacttactgatctactgtgaatataaaatgttattagccttatcaaataaataaatgagcacagctctttgttcgctctattgaactgggtgataattatttagatgtgaatgttaggtcagttctactgtaataactaatcgtaaaagttgtaaatttgtttaatggatgaaatgtacactttttgtattctgtacagctttgtcttttttaaatatgaagtacttaaatgtacttactatgataggaaatataatgtgtgccttctaggatttgtgaagtggtttcatgaactctaaggaatttgttttccctatcctaactcagtaacagagggtttactccgattatgtatagaaccttagtttgagaaaatgaattttactatgtactgaatttagaggttgagaataataggatctgtgttattcttagtacccactgataaattgtgcaataaataatctttcgcaagtga

SEQ ID NO: 303832 - DNA, 919 bp, Homo sapiens
gcgcgggcctggttggtaaagtagtatatggtcatacctgtttcctagagaggatcctggtcaatgactattcgctgtgccatattcgccgaatacacatgaatgctccgtcgatagactgctcgttctgccacagggatccatatgggaactgctggtcgattacgaggatcctattgacaaggtctgtttcccagcgtcttctcgattatcaattgatcgctctccgagcattagacttgctgagtttaattcagattacctaattttaaaatgtttctgaaaagtgaacagagttaccttacagagttttggatctttccagggatagccaatgattttatcccccagaatccttcacctttcaaggagttatttaacaatgagcccagtgactcaatagggcccaaacctttttattttacaatatgagctccaagacacttactgatctactgtgaatataaaatgttattagccttatcaaataaataaatgagcacagctctttgttcgctctattgaactgggtgataattatttagatgtgaatgttaggtcagttctactgtaataactaatcgtaaaagttgtaaatttgtttaatggatgaaatgtacactttttgtattctgtacagctttgtcttttttaaatatgaagtacttaaatgtacttactatgataggaaatataatgtgtgccttctaggatttgtgaagtggtttcatgaactctaaggaatttgttttccctatcctaactcagtaacagagggtttactccgattatgtatagaaccttagtttgagaaaatgaattttactatgtactgaatttagaggttgagaataataggatctgtgttattcttagtacccactgataaattgtgcaataaataatctttcgcaagtga

SEQ ID NO: 303833 - DNA, 938 bp, Homo sapiens
agcggacggaggtgcgaccgggtcccggcctgagtcgcggccacccgcaggtctgagctgtgggctgaggcagcgcagccgctgccgcagggtgcgcgatgccttgaacctgggaaactatgtgaagcaacactctggattttgaaagacatcttttcatcatgggacagcaaatttcggatcagacacagttggttattaacaagttaccagaaaaagtagcaaaacatgttacgttggttcgagagagtggctccttaacttatgaagaatttcttgggagagtagctgagcttaatgatgtaacggctaaagtggcttctggccaggaaaaacatcttctctttgaggtacaacctgggtctgattcctctgctttttggaaagtggttgtacgggtggtctgtaccaagattaacaaaagcagtggcattgtggaggcatcacggatcatgaatttataccagtttattcaactttataaagatatcacaagtcaagcagcaggagtattggcacagagctccacctctgaagaacctgatgaaaactcatcctctgtaacatcttgtcaggctagtctttggatgggaaggtatataatgcataagtattgtatttcacttattttctaatatgaaaacaactgaaatctattaatatttttgctgttgctcattgtagcatcttaaatcttttttttttctcagttggtattgtatctgagatcagttttggggttattctgtgcttcggatgttgttacagtgctaaattaaagtggcttggcagggccactttaatattaatgtttctgtcacactggtctccaggaatccgctctatatgcatgcatttattgacaaaggagatagttaacaccttccttataataggtatttaggttcttagacagtcaaagctttttagggaattag

SEQ ID NO: 303834 - DNA, 494 bp, Homo sapiens
gcctcccaaagtgttgatattacaggcgtgagccaccatgacctgccttgtttatattttgacgggttgatttgcaagagaatgtgacttcagaagaaagaaaagggtgatggtaggaagtatattctgtgccagcacctctggtcatctaggccagcatcctaggaattatccagttctctctctttgccacttcatgtatgttgaggtaatcagtgaagagcgttagtcccacctcctaaatattggtctggtcttacgcttctttcctctacctttatcattagcttaatttgagccttcatctcccacatagttattgagtctcacgcttcagtcctttctttctaacccatctttcatattttcgtcccatttaatgattctccaaatagaacctttttatgatttcccactttatacagaatagccgaagcctttattgatgtttacatgcttacccgcctggcccttgccccatactcttttcttag

SEQ ID NO: 303835 - DNA, 3197 bp, Homo sapiens
acttccgccccgggggcggctcgggccacgcccacctgtcctgcagcactggatgctttgtgagttggggattgttgcgtcccatatctggacccagaagggacttccctgctcggctggctctcggtttctctgctttcctccggagaaataacagcgtcttccgcgccgcgcatggagcctcccggccgccgcgagtgtccctttccttcctggcgctttcctgggttgcttctggcggccatggtgttgctgctgtactccttctccgatgcctgtgaggagccaccaacatttgaagctatggagctcattggtaaaccaaaaccctactatgagattggtgaacgagtagattataagtgtaaaaaaggatacttctatatacctcctcttgccacccatactatttgtgatcggaatcatacatggctacctgtctcagatgacgcctgttatagagaaacatgtccatatatacgggatcctttaaatggccaagcagtccctgcaaatgggacttacgagtttggttatcagatgcactttatttgtaatgagggttattacttaattggtgaagaaattctatattgtgaacttaaaggatcagtagcaatttggagcggtaagcccccaatatgtgaaaaggttttgtgtacaccacctccaaaaataaaaaatggaaaacacacctttagtgaagtagaagtatttgagtatcttgatgcagtaacttatagttgtgatcctgcacctggaccagatccattttcacttattggagagagcacgatttattgtggtgacaattcagtgtggagtcgtgctgctccagagtgtaaagtggtcaaatgtcgatttccagtagtcgaaaatggaaaacagatatcaggatttggaaaaaaattttactacaaagcaacagttatgtttgaatgcgataagggtttttacctcgatggcagcgacacaattgtctgtgacagtaacagtacttgggatcccccagttccaaagtgtcttaaaggtcctaggcctacttacaagcctccagtctcaaattatccaggatatcctaaacctgaggaaggaatacttgacagtttggatgtttgggtcattgctgtgattgttattgccatagttgttggagttgcagtaatttgtgttgtcccgtacagatatcttcaaaggaggaagaagaaagggaaagcagatggtggagctgaatatgccacttaccagactaaatcaaccactccagcagagcagagaggctgaatagattccacaacctggtttgccagttcatcttttgactctattaaaatcttcaatagttgttattctgtagtttcactctcatgagtgcaactgtggcttagctaatattgcaatgtggcttgaatgtaggtagcatcctttgatgcttctttgaaacttgtatgaatttgggtatgaacagattgcctgctttcccttaaataacacttagatttattggaccagtcagcacagcatgcctggttgtattaaagcagggatatgctgtattttataaaattggcaaaattagagaaatatagttcacaatgaaattatattttctttgtaaagaaagtggcttgaaatcttttttgttcaaagattaatgccaactcttaagattattctttcaccaactatagaatgtattttatatatcgttcattgtaaaaagcccttaaaaatatgtgtatactactttggctcttgtgcataaaaacaagaacactgaaaattgggaatatgcacaaacttggcttctttaaccaagaatattattggaaaattctctaaaagttaatagggtaaattctctattttttgtaatgtgttcggtgatttcagaaagctagaaagtgtatgtgtggcatttgttttcactttttaaaacatccctaactgatcgaatatatcagtaatttcagaatcagatgcatcctttcataagaagtgagaggactctgacagccataacaggagtgccacttcatggtgcgaagtgaacactgtagtcttgttgttttcccaaagagaactccgtatgttctcttaggttgagtaacccactctgaattctggttacatgtgtttttctctccctccttaaataaagagaggggttaaacatgccctctaaaagtaggtggttttgaagagaataaattcatcagataacctcaagtcacatgagaatcttagtccatttacattgccttggctagtaaaagccatctatgtatatgtcttacctcatctcctaaaaggcagagtacaaagtaagccatgtatctcaggaaggtaacttcattttgtctatttgctgttgattgtaccaagggatggaagaagtaaatatagctcaggtagcactttatactcaggcagatctcagccctctactgagtcccttagccaagcagtttctttcaaagaagccagcaggcgaaaagcagggactgccactgcatttcatatcacactgttaaaagttgtgttttgaaattttatgtttagttgcacaaattgggccaaagaaacattgccttgaggaagatatgattggaaaatcaagagtgtagaagaataaatactgttttactgtccaaagacatgtttatagtgctctgtaaatgttcctttcctttgtagtctctggcaagatgctttaggaagataaaagtttgaggagaacaaacaggaattctgaattaagcacagagttgaagtttatacccgtttcacatgcttttcaagaatgtcgcaattactaagaagcagataatggtgttttttagaaacctaattgaagtatattcaaccaaatactttaatgtataaaataaatattatacaatatacttgtatagcagtttctgcttcacatttgattttttcaaatttaatatttatattagagatctatatatgtataaatatgtattttgtcaaatttgttacttaaatatatagagaccagttttctctggaagtttgtttaaatgacagaagcgtatatgaattcaagaaaatttaagctgcaaaaatgtatttgctataaaatgagaagtctcactgatagaggttctttattgctcattttttaaaaaatggactcttgaaatctgttaaaataaaattgtacatttgga

SEQ ID NO: 303836 - DNA, 3242 bp, Homo sapiens
acttccgccccgggggcggctcgggccacgcccacctgtcctgcagcactggatgctttgtgagttggggattgttgcgtcccatatctggacccagaagggacttccctgctcggctggctctcggtttctctgctttcctccggagaaataacagcgtcttccgcgccgcgcatggagcctcccggccgccgcgagtgtccctttccttcctggcgctttcctgggttgcttctggcggccatggtgttgctgctgtactccttctccgatgcctgtgaggagccaccaacatttgaagctatggagctcattggtaaaccaaaaccctactatgagattggtgaacgagtagattataagtgtaaaaaaggatacttctatatacctcctcttgccacccatactatttgtgatcggaatcatacatggctacctgtctcagatgacgcctgttatagagaaacatgtccatatatacgggatcctttaaatggccaagcagtccctgcaaatgggacttacgagtttggttatcagatgcactttatttgtaatgagggttattacttaattggtgaagaaattctatattgtgaacttaaaggatcagtagcaatttggagcggtaagcccccaatatgtgaaaaggttttgtgtacaccacctccaaaaataaaaaatggaaaacacacctttagtgaagtagaagtatttgagtatcttgatgcagtaacttatagttgtgatcctgcacctggaccagatccattttcacttattggagagagcacgatttattgtggtgacaattcagtgtggagtcgtgctgctccagagtgtaaagtggtcaaatgtcgatttccagtagtcgaaaatggaaaacagatatcaggatttggaaaaaaattttactacaaagcaacagttatgtttgaatgcgataagggtttttacctcgatggcagcgacacaattgtctgtgacagtaacagtacttgggatcccccagttccaaagtgtcttaaagtgtcgacttcttccactacaaaatctccagcgtccagtgcctcaggtcctaggcctacttacaagcctccagtctcaaattatccaggatatcctaaacctgaggaaggaatacttgacagtttggatgtttgggtcattgctgtgattgttattgccatagttgttggagttgcagtaatttgtgttgtcccgtacagatatcttcaaaggaggaagaagaaagggaaagcagatggtggagctgaatatgccacttaccagactaaatcaaccactccagcagagcagagaggctgaatagattccacaacctggtttgccagttcatcttttgactctattaaaatcttcaatagttgttattctgtagtttcactctcatgagtgcaactgtggcttagctaatattgcaatgtggcttgaatgtaggtagcatcctttgatgcttctttgaaacttgtatgaatttgggtatgaacagattgcctgctttcccttaaataacacttagatttattggaccagtcagcacagcatgcctggttgtattaaagcagggatatgctgtattttataaaattggcaaaattagagaaatatagttcacaatgaaattatattttctttgtaaagaaagtggcttgaaatcttttttgttcaaagattaatgccaactcttaagattattctttcaccaactatagaatgtattttatatatcgttcattgtaaaaagcccttaaaaatatgtgtatactactttggctcttgtgcataaaaacaagaacactgaaaattgggaatatgcacaaacttggcttctttaaccaagaatattattggaaaattctctaaaagttaatagggtaaattctctattttttgtaatgtgttcggtgatttcagaaagctagaaagtgtatgtgtggcatttgttttcactttttaaaacatccctaactgatcgaatatatcagtaatttcagaatcagatgcatcctttcataagaagtgagaggactctgacagccataacaggagtgccacttcatggtgcgaagtgaacactgtagtcttgttgttttcccaaagagaactccgtatgttctcttaggttgagtaacccactctgaattctggttacatgtgtttttctctccctccttaaataaagagaggggttaaacatgccctctaaaagtaggtggttttgaagagaataaattcatcagataacctcaagtcacatgagaatcttagtccatttacattgccttggctagtaaaagccatctatgtatatgtcttacctcatctcctaaaaggcagagtacaaagtaagccatgtatctcaggaaggtaacttcattttgtctatttgctgttgattgtaccaagggatggaagaagtaaatatagctcaggtagcactttatactcaggcagatctcagccctctactgagtcccttagccaagcagtttctttcaaagaagccagcaggcgaaaagcagggactgccactgcatttcatatcacactgttaaaagttgtgttttgaaattttatgtttagttgcacaaattgggccaaagaaacattgccttgaggaagatatgattggaaaatcaagagtgtagaagaataaatactgttttactgtccaaagacatgtttatagtgctctgtaaatgttcctttcctttgtagtctctggcaagatgctttaggaagataaaagtttgaggagaacaaacaggaattctgaattaagcacagagttgaagtttatacccgtttcacatgcttttcaagaatgtcgcaattactaagaagcagataatggtgttttttagaaacctaattgaagtatattcaaccaaatactttaatgtataaaataaatattatacaatatacttgtatagcagtttctgcttcacatttgattttttcaaatttaatatttatattagagatctatatatgtataaatatgtattttgtcaaatttgttacttaaatatatagagaccagttttctctggaagtttgtttaaatgacagaagcgtatatgaattcaagaaaatttaagctgcaaaaatgtatttgctataaaatgagaagtctcactgatagaggttctttattgctcattttttaaaaaatggactcttgaaatctgttaaaataaaattgtacatttgga

SEQ ID NO: 303837 - DNA, 3250 bp, Homo sapiens
tggccgtccgcaaagtgctcagatacagccatgcagaacgcgtgactaacatatacacggacacgcacgagagcagggccacgcccacctgtcctgcagcactggatgctttgtgagttggggattgttgcgtcccatatctggacccagaagggacttccctgctcggctggctctcggtttctctgctttcctccggagaaataacagcgtcttccgcgccgcgcatggagcctcccggccgccgcgagtgtccctttccttcctggcgctttcctgggttgcttctggcggccatggtgttgctgctgtactccttctccgatgcctgtgaggagccaccaacatttgaagctatggagctcattggtaaaccaaaaccctactatgagattggtgaacgagtagattataagtgtaaaaaaggatacttctatatacctcctcttgccacccatactatttgtgatcggaatcatacatggctacctgtctcagatgacgcctgttatagagaaacatgtccatatatacgggatcctttaaatggccaagcagtccctgcaaatgggacttacgagtttggttatcagatgcactttatttgtaatgagggttattacttaattggtgaagaaattctatattgtgaacttaaaggatcagtagcaatttggagcggtaagcccccaatatgtgaaaaggttttgtgtacaccacctccaaaaataaaaaatggaaaacacacctttagtgaagtagaagtatttgagtatcttgatgcagtaacttatagttgtgatcctgcacctggaccagatccattttcacttattggagagagcacgatttattgtggtgacaattcagtgtggagtcgtgctgctccagagtgtaaagtggtcaaatgtcgatttccagtagtcgaaaatggaaaacagatatcaggatttggaaaaaaattttactacaaagcaacagttatgtttgaatgcgataagggtttttacctcgatggcagcgacacaattgtctgtgacagtaacagtacttgggatcccccagttccaaagtgtcttaaaggtcctaggcctacttacaagcctccagtctcaaattatccaggatatcctaaacctgaggaaggaatacttgacagtttggatgtttgggtcattgctgtgattgttattgccatagttgttggagttgcagtaatttgtgttgtcccgtacagatatcttcaaaggaggaagaagaaagggaaagcagatggtggagctgaatatgccacttaccagactaaatcaaccactccagcagagcagagaggctgaatagattccacaacctggtttgccagttcatcttttgactctattaaaatcttcaatagttgttattctgtagtttcactctcatgagtgcaactgtggcttagctaatattgcaatgtggcttgaatgtaggtagcatcctttgatgcttctttgaaacttgtatgaatttgggtatgaacagattgcctgctttcccttaaataacacttagatttattggaccagtcagcacagcatgcctggttgtattaaagcagggatatgctgtattttataaaattggcaaaattagagaaatatagttcacaatgaaattatattttctttgtaaagaaagtggcttgaaatcttttttgttcaaagattaatgccaactcttaagattattctttcaccaactatagaatgtattttatatatcgttcattgtaaaaagcccttaaaaatatgtgtatactactttggctcttgtgcataaaaacaagaacactgaaaattgggaatatgcacaaacttggcttctttaaccaagaatattattggaaaattctctaaaagttaatagggtaaattctctattttttgtaatgtgttcggtgatttcagaaagctagaaagtgtatgtgtggcatttgttttcactttttaaaacatccctaactgatcgaatatatcagtaatttcagaatcagatgcatcctttcataagaagtgagaggactctgacagccataacaggagtgccacttcatggtgcgaagtgaacactgtagtcttgttgttttcccaaagagaactccgtatgttctcttaggttgagtaacccactctgaattctggttacatgtgtttttctctccctccttaaataaagagaggggttaaacatgccctctaaaagtaggtggttttgaagagaataaattcatcagataacctcaagtcacatgagaatcttagtccatttacattgccttggctagtaaaagccatctatgtatatgtcttacctcatctcctaaaaggcagagtacaaagtaagccatgtatctcaggaaggtaacttcattttgtctatttgctgttgattgtaccaagggatggaagaagtaaatatagctcaggtagcactttatactcaggcagatctcagccctctactgagtcccttagccaagcagtttctttcaaagaagccagcaggcgaaaagcagggactgccactgcatttcatatcacactgttaaaagttgtgttttgaaattttatgtttagttgcacaaattgggccaaagaaacattgccttgaggaagatatgattggaaaatcaagagtgtagaagaataaatactgttttactgtccaaagacatgtttatagtgctctgtaaatgttcctttcctttgtagtctctggcaagatgctttaggaagataaaagtttgaggagaacaaacaggaattctgaattaagcacagagttgaagtttatacccgtttcacatgcttttcaagaatgtcgcaattactaagaagcagataatggtgttttttagaaacctaattgaagtatattcaaccaaatactttaatgtataaaataaatattatacaatatacttgtatagcagtttctgcttcacatttgattttttcaaatttaatatttatattagagatctatatatgtataaatatgtattttgtcaaatttgttacttaaatatatagagaccagttttctctggaagtttgtttaaatgacagaagcgtatatgaattcaagaaaatttaagctgcaaaaatgtatttgctataaaatgagaagtctcactgatagaggttctttattgctcattttttaaaaaatggactcttgaaatctgttaaaataaaattgtacatttgga

SEQ ID NO: 303838 - DNA, 3335 bp, Homo sapiens
acttccgccccgggggcggctcgggccacgcccacctgtcctgcagcactggatgctttgtgagttggggattgttgcgtcccatatctggacccagaagggacttccctgctcggctggctctcggtttctctgctttcctccggagaaataacagcgtcttccgcgccgcgcatggagcctcccggccgccgcgagtgtccctttccttcctggcgctttcctgggttgcttctggcggccatggtgttgctgctgtactccttctccgatgcctgtgaggagccaccaacatttgaagctatggagctcattggtaaaccaaaaccctactatgagattggtgaacgagtagattataagtgtaaaaaaggatacttctatatacctcctcttgccacccatactatttgtgatcggaatcatacatggctacctgtctcagatgacgcctgttatagagaaacatgtccatatatacgggatcctttaaatggccaagcagtccctgcaaatgggacttacgagtttggttatcagatgcactttatttgtaatgagggttattacttaattggtgaagaaattctatattgtgaacttaaaggatcagtagcaatttggagcggtaagcccccaatatgtgaaaaggttttgtgtacaccacctccaaaaataaaaaatggaaaacacacctttagtgaagtagaagtatttgagtatcttgatgcagtaacttatagttgtgatcctgcacctggaccagatccattttcacttattggagagagcacgatttattgtggtgacaattcagtgtggagtcgtgctgctccagagtgtaaagtggtcaaatgtcgatttccagtagtcgaaaatggaaaacagatatcaggatttggaaaaaaattttactacaaagcaacagttatgtttgaatgcgataagggtttttacctcgatggcagcgacacaattgtctgtgacagtaacagtacttgggatcccccagttccaaagtgtcttaaagtgtcgacttcttccactacaaaatctccagcgtccagtgcctcaggtcctaggcctacttacaagcctccagtctcaaattatccaggatatcctaaacctgaggaaggaatacttgacagtttggatgtttgggtcattgctgtgattgttattgccatagttgttggagttgcagtaatttgtgttgtcccgtacagatatcttcaaaggaggaagaagaaaggcacatacctaactgatgagacccacagagaagtaaaatttacttctctctgagaaggagagatgagagaaaggtttgcttttatcattaaaaggaaagcagatggtggagctgaatatgccacttaccagactaaatcaaccactccagcagagcagagaggctgaatagattccacaacctggtttgccagttcatcttttgactctattaaaatcttcaatagttgttattctgtagtttcactctcatgagtgcaactgtggcttagctaatattgcaatgtggcttgaatgtaggtagcatcctttgatgcttctttgaaacttgtatgaatttgggtatgaacagattgcctgctttcccttaaataacacttagatttattggaccagtcagcacagcatgcctggttgtattaaagcagggatatgctgtattttataaaattggcaaaattagagaaatatagttcacaatgaaattatattttctttgtaaagaaagtggcttgaaatcttttttgttcaaagattaatgccaactcttaagattattctttcaccaactatagaatgtattttatatatcgttcattgtaaaaagcccttaaaaatatgtgtatactactttggctcttgtgcataaaaacaagaacactgaaaattgggaatatgcacaaacttggcttctttaaccaagaatattattggaaaattctctaaaagttaatagggtaaattctctattttttgtaatgtgttcggtgatttcagaaagctagaaagtgtatgtgtggcatttgttttcactttttaaaacatccctaactgatcgaatatatcagtaatttcagaatcagatgcatcctttcataagaagtgagaggactctgacagccataacaggagtgccacttcatggtgcgaagtgaacactgtagtcttgttgttttcccaaagagaactccgtatgttctcttaggttgagtaacccactctgaattctggttacatgtgtttttctctccctccttaaataaagagaggggttaaacatgccctctaaaagtaggtggttttgaagagaataaattcatcagataacctcaagtcacatgagaatcttagtccatttacattgccttggctagtaaaagccatctatgtatatgtcttacctcatctcctaaaaggcagagtacaaagtaagccatgtatctcaggaaggtaacttcattttgtctatttgctgttgattgtaccaagggatggaagaagtaaatatagctcaggtagcactttatactcaggcagatctcagccctctactgagtcccttagccaagcagtttctttcaaagaagccagcaggcgaaaagcagggactgccactgcatttcatatcacactgttaaaagttgtgttttgaaattttatgtttagttgcacaaattgggccaaagaaacattgccttgaggaagatatgattggaaaatcaagagtgtagaagaataaatactgttttactgtccaaagacatgtttatagtgctctgtaaatgttcctttcctttgtagtctctggcaagatgctttaggaagataaaagtttgaggagaacaaacaggaattctgaattaagcacagagttgaagtttatacccgtttcacatgcttttcaagaatgtcgcaattactaagaagcagataatggtgttttttagaaacctaattgaagtatattcaaccaaatactttaatgtataaaataaatattatacaatatacttgtatagcagtttctgcttcacatttgattttttcaaatttaatatttatattagagatctatatatgtataaatatgtattttgtcaaatttgttacttaaatatatagagaccagttttctctggaagtttgtttaaatgacagaagcgtatatgaattcaagaaaatttaagctgcaaaaatgtatttgctataaaatgagaagtctcactgatagaggttctttattgctcattttttaaaaaatggactcttgaaatctgttaaaataaaattgtacatttgga

SEQ ID NO: 303839 - DNA, 3287 bp, Homo sapiens
acttccgccccgggggcggctcgggccacgcccacctgtcctgcagcactggatgctttgtgagttggggattgttgcgtcccatatctggacccagaagggacttccctgctcggctggctctcggtttctctgctttcctccggagaaataacagcgtcttccgcgccgcgcatggagcctcccggccgccgcgagtgtccctttccttcctggcgctttcctgggttgcttctggcggccatggtgttgctgctgtactccttctccgatgcctgtgaggagccaccaacatttgaagctatggagctcattggtaaaccaaaaccctactatgagattggtgaacgagtagattataagtgtaaaaaaggatacttctatatacctcctcttgccacccatactatttgtgatcggaatcatacatggctacctgtctcagatgacgcctgttatagagaaacatgtccatatatacgggatcctttaaatggccaagcagtccctgcaaatgggacttacgagtttggttatcagatgcactttatttgtaatgagggttattacttaattggtgaagaaattctatattgtgaacttaaaggatcagtagcaatttggagcggtaagcccccaatatgtgaaaaggttttgtgtacaccacctccaaaaataaaaaatggaaaacacacctttagtgaagtagaagtatttgagtatcttgatgcagtaacttatagttgtgatcctgcacctggaccagatccattttcacttattggagagagcacgatttattgtggtgacaattcagtgtggagtcgtgctgctccagagtgtaaagtggtcaaatgtcgatttccagtagtcgaaaatggaaaacagatatcaggatttggaaaaaaattttactacaaagcaacagttatgtttgaatgcgataagggtttttacctcgatggcagcgacacaattgtctgtgacagtaacagtacttgggatcccccagttccaaagtgtcttaaagtgctgcctccatctagtacaaaacctccagctttgagtcattcagtgtcgacttcttccactacaaaatctccagcgtccagtgcctcaggtcctaggcctacttacaagcctccagtctcaaattatccaggatatcctaaacctgaggaaggaatacttgacagtttggatgtttgggtcattgctgtgattgttattgccatagttgttggagttgcagtaatttgtgttgtcccgtacagatatcttcaaaggaggaagaagaaagggaaagcagatggtggagctgaatatgccacttaccagactaaatcaaccactccagcagagcagagaggctgaatagattccacaacctggtttgccagttcatcttttgactctattaaaatcttcaatagttgttattctgtagtttcactctcatgagtgcaactgtggcttagctaatattgcaatgtggcttgaatgtaggtagcatcctttgatgcttctttgaaacttgtatgaatttgggtatgaacagattgcctgctttcccttaaataacacttagatttattggaccagtcagcacagcatgcctggttgtattaaagcagggatatgctgtattttataaaattggcaaaattagagaaatatagttcacaatgaaattatattttctttgtaaagaaagtggcttgaaatcttttttgttcaaagattaatgccaactcttaagattattctttcaccaactatagaatgtattttatatatcgttcattgtaaaaagcccttaaaaatatgtgtatactactttggctcttgtgcataaaaacaagaacactgaaaattgggaatatgcacaaacttggcttctttaaccaagaatattattggaaaattctctaaaagttaatagggtaaattctctattttttgtaatgtgttcggtgatttcagaaagctagaaagtgtatgtgtggcatttgttttcactttttaaaacatccctaactgatcgaatatatcagtaatttcagaatcagatgcatcctttcataagaagtgagaggactctgacagccataacaggagtgccacttcatggtgcgaagtgaacactgtagtcttgttgttttcccaaagagaactccgtatgttctcttaggttgagtaacccactctgaattctggttacatgtgtttttctctccctccttaaataaagagaggggttaaacatgccctctaaaagtaggtggttttgaagagaataaattcatcagataacctcaagtcacatgagaatcttagtccatttacattgccttggctagtaaaagccatctatgtatatgtcttacctcatctcctaaaaggcagagtacaaagtaagccatgtatctcaggaaggtaacttcattttgtctatttgctgttgattgtaccaagggatggaagaagtaaatatagctcaggtagcactttatactcaggcagatctcagccctctactgagtcccttagccaagcagtttctttcaaagaagccagcaggcgaaaagcagggactgccactgcatttcatatcacactgttaaaagttgtgttttgaaattttatgtttagttgcacaaattgggccaaagaaacattgccttgaggaagatatgattggaaaatcaagagtgtagaagaataaatactgttttactgtccaaagacatgtttatagtgctctgtaaatgttcctttcctttgtagtctctggcaagatgctttaggaagataaaagtttgaggagaacaaacaggaattctgaattaagcacagagttgaagtttatacccgtttcacatgcttttcaagaatgtcgcaattactaagaagcagataatggtgttttttagaaacctaattgaagtatattcaaccaaatactttaatgtataaaataaatattatacaatatacttgtatagcagtttctgcttcacatttgattttttcaaatttaatatttatattagagatctatatatgtataaatatgtattttgtcaaatttgttacttaaatatatagagaccagttttctctggaagtttgtttaaatgacagaagcgtatatgaattcaagaaaatttaagctgcaaaaatgtatttgctataaaatgagaagtctcactgatagaggttctttattgctcattttttaaaaaatggactcttgaaatctgttaaaataaaattgtacatttgga

SEQ ID NO: 303840 - DNA, 3290 bp, Homo sapiens
acttccgccccgggggcggctcgggccacgcccacctgtcctgcagcactggatgctttgtgagttggggattgttgcgtcccatatctggacccagaagggacttccctgctcggctggctctcggtttctctgctttcctccggagaaataacagcgtcttccgcgccgcgcatggagcctcccggccgccgcgagtgtccctttccttcctggcgctttcctgggttgcttctggcggccatggtgttgctgctgtactccttctccgatgcctgtgaggagccaccaacatttgaagctatggagctcattggtaaaccaaaaccctactatgagattggtgaacgagtagattataagtgtaaaaaaggatacttctatatacctcctcttgccacccatactatttgtgatcggaatcatacatggctacctgtctcagatgacgcctgttatagagaaacatgtccatatatacgggatcctttaaatggccaagcagtccctgcaaatgggacttacgagtttggttatcagatgcactttatttgtaatgagggttattacttaattggtgaagaaattctatattgtgaacttaaaggatcagtagcaatttggagcggtaagcccccaatatgtgaaaaggttttgtgtacaccacctccaaaaataaaaaatggaaaacacacctttagtgaagtagaagtatttgagtatcttgatgcagtaacttatagttgtgatcctgcacctggaccagatccattttcacttattggagagagcacgatttattgtggtgacaattcagtgtggagtcgtgctgctccagagtgtaaagtggtcaaatgtcgatttccagtagtcgaaaatggaaaacagatatcaggatttggaaaaaaattttactacaaagcaacagttatgtttgaatgcgataagggtttttacctcgatggcagcgacacaattgtctgtgacagtaacagtacttgggatcccccagttccaaagtgtcttaaaggtcctaggcctacttacaagcctccagtctcaaattatccaggatatcctaaacctgaggaaggaatacttgacagtttggatgtttgggtcattgctgtgattgttattgccatagttgttggagttgcagtaatttgtgttgtcccgtacagatatcttcaaaggaggaagaagaaaggcacatacctaactgatgagacccacagagaagtaaaatttacttctctctgagaaggagagatgagagaaaggtttgcttttatcattaaaaggaaagcagatggtggagctgaatatgccacttaccagactaaatcaaccactccagcagagcagagaggctgaatagattccacaacctggtttgccagttcatcttttgactctattaaaatcttcaatagttgttattctgtagtttcactctcatgagtgcaactgtggcttagctaatattgcaatgtggcttgaatgtaggtagcatcctttgatgcttctttgaaacttgtatgaatttgggtatgaacagattgcctgctttcccttaaataacacttagatttattggaccagtcagcacagcatgcctggttgtattaaagcagggatatgctgtattttataaaattggcaaaattagagaaatatagttcacaatgaaattatattttctttgtaaagaaagtggcttgaaatcttttttgttcaaagattaatgccaactcttaagattattctttcaccaactatagaatgtattttatatatcgttcattgtaaaaagcccttaaaaatatgtgtatactactttggctcttgtgcataaaaacaagaacactgaaaattgggaatatgcacaaacttggcttctttaaccaagaatattattggaaaattctctaaaagttaatagggtaaattctctattttttgtaatgtgttcggtgatttcagaaagctagaaagtgtatgtgtggcatttgttttcactttttaaaacatccctaactgatcgaatatatcagtaatttcagaatcagatgcatcctttcataagaagtgagaggactctgacagccataacaggagtgccacttcatggtgcgaagtgaacactgtagtcttgttgttttcccaaagagaactccgtatgttctcttaggttgagtaacccactctgaattctggttacatgtgtttttctctccctccttaaataaagagaggggttaaacatgccctctaaaagtaggtggttttgaagagaataaattcatcagataacctcaagtcacatgagaatcttagtccatttacattgccttggctagtaaaagccatctatgtatatgtcttacctcatctcctaaaaggcagagtacaaagtaagccatgtatctcaggaaggtaacttcattttgtctatttgctgttgattgtaccaagggatggaagaagtaaatatagctcaggtagcactttatactcaggcagatctcagccctctactgagtcccttagccaagcagtttctttcaaagaagccagcaggcgaaaagcagggactgccactgcatttcatatcacactgttaaaagttgtgttttgaaattttatgtttagttgcacaaattgggccaaagaaacattgccttgaggaagatatgattggaaaatcaagagtgtagaagaataaatactgttttactgtccaaagacatgtttatagtgctctgtaaatgttcctttcctttgtagtctctggcaagatgctttaggaagataaaagtttgaggagaacaaacaggaattctgaattaagcacagagttgaagtttatacccgtttcacatgcttttcaagaatgtcgcaattactaagaagcagataatggtgttttttagaaacctaattgaagtatattcaaccaaatactttaatgtataaaataaatattatacaatatacttgtatagcagtttctgcttcacatttgattttttcaaatttaatatttatattagagatctatatatgtataaatatgtattttgtcaaatttgttacttaaatatatagagaccagttttctctggaagtttgtttaaatgacagaagcgtatatgaattcaagaaaatttaagctgcaaaaatgtatttgctataaaatgagaagtctcactgatagaggttctttattgctcattttttaaaaaatggactcttgaaatctgttaaaataaaattgtacatttgga

SEQ ID NO: 303841 - DNA, 3380 bp, Homo sapiens
acttccgccccgggggcggctcgggccacgcccacctgtcctgcagcactggatgctttgtgagttggggattgttgcgtcccatatctggacccagaagggacttccctgctcggctggctctcggtttctctgctttcctccggagaaataacagcgtcttccgcgccgcgcatggagcctcccggccgccgcgagtgtccctttccttcctggcgctttcctgggttgcttctggcggccatggtgttgctgctgtactccttctccgatgcctgtgaggagccaccaacatttgaagctatggagctcattggtaaaccaaaaccctactatgagattggtgaacgagtagattataagtgtaaaaaaggatacttctatatacctcctcttgccacccatactatttgtgatcggaatcatacatggctacctgtctcagatgacgcctgttatagagaaacatgtccatatatacgggatcctttaaatggccaagcagtccctgcaaatgggacttacgagtttggttatcagatgcactttatttgtaatgagggttattacttaattggtgaagaaattctatattgtgaacttaaaggatcagtagcaatttggagcggtaagcccccaatatgtgaaaaggttttgtgtacaccacctccaaaaataaaaaatggaaaacacacctttagtgaagtagaagtatttgagtatcttgatgcagtaacttatagttgtgatcctgcacctggaccagatccattttcacttattggagagagcacgatttattgtggtgacaattcagtgtggagtcgtgctgctccagagtgtaaagtggtcaaatgtcgatttccagtagtcgaaaatggaaaacagatatcaggatttggaaaaaaattttactacaaagcaacagttatgtttgaatgcgataagggtttttacctcgatggcagcgacacaattgtctgtgacagtaacagtacttgggatcccccagttccaaagtgtcttaaagtgctgcctccatctagtacaaaacctccagctttgagtcattcagtgtcgacttcttccactacaaaatctccagcgtccagtgcctcaggtcctaggcctacttacaagcctccagtctcaaattatccaggatatcctaaacctgaggaaggaatacttgacagtttggatgtttgggtcattgctgtgattgttattgccatagttgttggagttgcagtaatttgtgttgtcccgtacagatatcttcaaaggaggaagaagaaaggcacatacctaactgatgagacccacagagaagtaaaatttacttctctctgagaaggagagatgagagaaaggtttgcttttatcattaaaaggaaagcagatggtggagctgaatatgccacttaccagactaaatcaaccactccagcagagcagagaggctgaatagattccacaacctggtttgccagttcatcttttgactctattaaaatcttcaatagttgttattctgtagtttcactctcatgagtgcaactgtggcttagctaatattgcaatgtggcttgaatgtaggtagcatcctttgatgcttctttgaaacttgtatgaatttgggtatgaacagattgcctgctttcccttaaataacacttagatttattggaccagtcagcacagcatgcctggttgtattaaagcagggatatgctgtattttataaaattggcaaaattagagaaatatagttcacaatgaaattatattttctttgtaaagaaagtggcttgaaatcttttttgttcaaagattaatgccaactcttaagattattctttcaccaactatagaatgtattttatatatcgttcattgtaaaaagcccttaaaaatatgtgtatactactttggctcttgtgcataaaaacaagaacactgaaaattgggaatatgcacaaacttggcttctttaaccaagaatattattggaaaattctctaaaagttaatagggtaaattctctattttttgtaatgtgttcggtgatttcagaaagctagaaagtgtatgtgtggcatttgttttcactttttaaaacatccctaactgatcgaatatatcagtaatttcagaatcagatgcatcctttcataagaagtgagaggactctgacagccataacaggagtgccacttcatggtgcgaagtgaacactgtagtcttgttgttttcccaaagagaactccgtatgttctcttaggttgagtaacccactctgaattctggttacatgtgtttttctctccctccttaaataaagagaggggttaaacatgccctctaaaagtaggtggttttgaagagaataaattcatcagataacctcaagtcacatgagaatcttagtccatttacattgccttggctagtaaaagccatctatgtatatgtcttacctcatctcctaaaaggcagagtacaaagtaagccatgtatctcaggaaggtaacttcattttgtctatttgctgttgattgtaccaagggatggaagaagtaaatatagctcaggtagcactttatactcaggcagatctcagccctctactgagtcccttagccaagcagtttctttcaaagaagccagcaggcgaaaagcagggactgccactgcatttcatatcacactgttaaaagttgtgttttgaaattttatgtttagttgcacaaattgggccaaagaaacattgccttgaggaagatatgattggaaaatcaagagtgtagaagaataaatactgttttactgtccaaagacatgtttatagtgctctgtaaatgttcctttcctttgtagtctctggcaagatgctttaggaagataaaagtttgaggagaacaaacaggaattctgaattaagcacagagttgaagtttatacccgtttcacatgcttttcaagaatgtcgcaattactaagaagcagataatggtgttttttagaaacctaattgaagtatattcaaccaaatactttaatgtataaaataaatattatacaatatacttgtatagcagtttctgcttcacatttgattttttcaaatttaatatttatattagagatctatatatgtataaatatgtattttgtcaaatttgttacttaaatatatagagaccagttttctctggaagtttgtttaaatgacagaagcgtatatgaattcaagaaaatttaagctgcaaaaatgtatttgctataaaatgagaagtctcactgatagaggttctttattgctcattttttaaaaaatggactcttgaaatctgttaaaataaaattgtacatttgga

SEQ ID NO: 303842 - DNA, 3825 bp, Homo sapiens
acttccgccccgggggcggctcgggccacgcccacctgtcctgcagcactggatgctttgtgagttggggattgttgcgtcccatatctggacccagaagggacttccctgctcggctggctctcggtttctctgctttcctccggagaaataacagcgtcttccgcgccgcgcatggagcctcccggccgccgcgagtgtccctttccttcctggcgctttcctgggttgcttctggcggccatggtgttgctgctgtactccttctccgatgcctgtgaggagccaccaacatttgaagctatggagctcattggtaaaccaaaaccctactatgagattggtgaacgagtagattataagtgtaaaaaaggatacttctatatacctcctcttgccacccatactatttgtgatcggaatcatacatggctacctgtctcagatgacgcctgttatagagaaacatgtccatatatacgggatcctttaaatggccaagcagtccctgcaaatgggacttacgagtttggttatcagatgcactttatttgtaatgagggttattacttaattggtgaagaaattctatattgtgaacttaaaggatcagtagcaatttggagcggtaagcccccaatatgtgaaaaggttttgtgtacaccacctccaaaaataaaaaatggaaaacacacctttagtgaagtagaagtatttgagtatcttgatgcagtaacttatagttgtgatcctgcacctggaccagatccattttcacttattggagagagcacgatttattgtggtgacaattcagtgtggagtcgtgctgctccagagtgtaaagtggtcaaatgtcgatttccagtagtcgaaaatggaaaacagatatcaggatttggaaaaaaattttactacaaagcaacagttatgtttgaatgcgataagggtttttacctcgatggcagcgacacaattgtctgtgacagtaacagtacttgggatcccccagttccaaagtgtcttaaaggtacaaaggttatcttttttctgtcttggtttgttattgttgttgctgttcattttagactttatttctttgatattaactatcagtcatacaaaataactgaaaagaaacaattttagtatttaactctgtcttgtattcatttctatgccagatgaatgacacgaaattcacataaaattctgctgttgtgattttttgtgcttttccagggttcttagcacgttatgtacattgcatgggtatatgcttttaatatttttatgtataaaaagtgaattacaacaactttttggaattgaaacatgggcatttttatctaagtaagtcaacaatggcataattcatataaatgaaatgagagcaataactcccaagtggttgatcttctaacattattttgtttcctagtgctgcctccatctagtacaaaacctccagctttgagtcattcaggtttagtagcttcttccttatatgtcttcttccttatatgttacaagatataaggaattcctggagaaattgccagcaataactcccaagtgtttggtccaatctacattattattttgttttccagtgtcgacttcttccactacaaaatctccagcgtccagtgcctcaggtcctaggcctacttacaagcctccagtctcaaattatccaggatatcctaaacctgaggaaggaatacttgacagtttggatgtttgggtcattgctgtgattgttattgccatagttgttggagttgcagtaatttgtgttgtcccgtacagatatcttcaaaggaggaagaagaaagggaaagcagatggtggagctgaatatgccacttaccagactaaatcaaccactccagcagagcagagaggctgaatagattccacaacctggtttgccagttcatcttttgactctattaaaatcttcaatagttgttattctgtagtttcactctcatgagtgcaactgtggcttagctaatattgcaatgtggcttgaatgtaggtagcatcctttgatgcttctttgaaacttgtatgaatttgggtatgaacagattgcctgctttcccttaaataacacttagatttattggaccagtcagcacagcatgcctggttgtattaaagcagggatatgctgtattttataaaattggcaaaattagagaaatatagttcacaatgaaattatattttctttgtaaagaaagtggcttgaaatcttttttgttcaaagattaatgccaactcttaagattattctttcaccaactatagaatgtattttatatatcgttcattgtaaaaagcccttaaaaatatgtgtatactactttggctcttgtgcataaaaacaagaacactgaaaattgggaatatgcacaaacttggcttctttaaccaagaatattattggaaaattctctaaaagttaatagggtaaattctctattttttgtaatgtgttcggtgatttcagaaagctagaaagtgtatgtgtggcatttgttttcactttttaaaacatccctaactgatcgaatatatcagtaatttcagaatcagatgcatcctttcataagaagtgagaggactctgacagccataacaggagtgccacttcatggtgcgaagtgaacactgtagtcttgttgttttcccaaagagaactccgtatgttctcttaggttgagtaacccactctgaattctggttacatgtgtttttctctccctccttaaataaagagaggggttaaacatgccctctaaaagtaggtggttttgaagagaataaattcatcagataacctcaagtcacatgagaatcttagtccatttacattgccttggctagtaaaagccatctatgtatatgtcttacctcatctcctaaaaggcagagtacaaagtaagccatgtatctcaggaaggtaacttcattttgtctatttgctgttgattgtaccaagggatggaagaagtaaatatagctcaggtagcactttatactcaggcagatctcagccctctactgagtcccttagccaagcagtttctttcaaagaagccagcaggcgaaaagcagggactgccactgcatttcatatcacactgttaaaagttgtgttttgaaattttatgtttagttgcacaaattgggccaaagaaacattgccttgaggaagatatgattggaaaatcaagagtgtagaagaataaatactgttttactgtccaaagacatgtttatagtgctctgtaaatgttcctttcctttgtagtctctggcaagatgctttaggaagataaaagtttgaggagaacaaacaggaattctgaattaagcacagagttgaagtttatacccgtttcacatgcttttcaagaatgtcgcaattactaagaagcagataatggtgttttttagaaacctaattgaagtatattcaaccaaatactttaatgtataaaataaatattatacaatatacttgtatagcagtttctgcttcacatttgattttttcaaatttaatatttatattagagatctatatatgtataaatatgtattttgtcaaatttgttacttaaatatatagagaccagttttctctggaagtttgtttaaatgacagaagcgtatatgaattcaagaaaatttaagctgcaaaaatgtatttgctataaaatgagaagtctcactgatagaggttctttattgctcattttttaaaaaatggactcttgaaatctgttaaaataaaattgtacatttgga

SEQ ID NO: 303843 - DNA, 3144 bp, Homo sapiens
acttccgccccgggggcggctcgggccacgcccacctgtcctgcagcactggatgctttgtgagttggggattgttgcgtcccatatctggacccagaagggacttccctgctcggctggctctcggtttctctgctttcctccggagaaataacagcgtcttccgcgccgcgcatggagcctcccggccgccgcgagtgtccctttccttcctggcgctttcctgggttgcttctggcggccatggtgttgctgctgtactccttctccgatgcctgtgaggagccaccaacatttgaagctatggagctcattggtaaaccaaaaccctactatgagattggtgaacgagtagattataagtgtaaaaaaggatacttctatatacctcctcttgccacccatactatttgtgatcggaatcatacatggctacctgtctcagatgacgcctgttatagagaaacatgtccatatatacgggatcctttaaatggccaagcagtccctgcaaatgggacttacgagtttggttatcagatgcactttatttgtaatgagggttattacttaattggtgaagaaattctatattgtgaacttaaaggatcagtagcaatttggagcggtaagcccccaatatgtgaaaaggttttgtgtacaccacctccaaaaataaaaaatggaaaacacacctttagtgaagtagaagtatttgagtatcttgatgcagtaacttatagttgtgatcctgcacctggaccagatccattttcacttattggagagagcacgatttattgtggtgacaattcagtgtggagtcgtgctgctccagagtgtaaagtggtcaaatgtcgatttccagtagtcgaaaatggaaaacagatatcaggatttggaaaaaaattttactacaaagcaacagttatgtttgaatgcgataagggtttttacctcgatggcagcgacacaattgtctgtgacagtaacagtacttgggatcccccagttccaaagtgtcttaaaggtcctaggcctacttacaagcctccagtctcaaattatccaggatatcctaaacctgaggaaggaatacttgacagtttggatgtttgggtcattgctgtgattgttattgccatagttgttggagttgcagtaatttgtgttgtcccgtacagatatcttcaaaggaggaagaagaaagggaaagcagatggtggagctgaatatgccacttaccagactaaatcaaccactccagcagagcagagaggctgaatagattccacaacctggtttgccagttcatcttttgactctattaaaatcttcaatagttgttattctgtagtttcactctcatgagtgcaactgtggcttagctaatattgcaatgtggcttgaatgtaggtagcatcctttgatgcttctttgaaacttgtatgaatttgggtatgaacagattgcctgctttcccttaaataacacttagatttattggaccagtcagcacagcatgcctggttgtattaaagcagggatatgctgtattttataaaattggctggcttgaaatcttttttgttcaaagattaatgccaactcttaagattattctttcaccaactatagaatgtattttatatatcgttcattgtaaaaagcccttaaaaatatgtgtatactactttggctcttgtgcataaaaacaagaacactgaaaattgggaatatgcacaaacttggcttctttaaccaagaatattattggaaaattctctaaaagttaatagggtaaattctctattttttgtaatgtgttcggtgatttcagaaagctagaaagtgtatgtgtggcatttgttttcactttttaaaacatccctaactgatcgaatatatcagtaatttcagaatcagatgcatcctttcataagaagtgagaggactctgacagccataacaggagtgccacttcatggtgcgaagtgaacactgtagtcttgttgttttcccaaagagaactccgtatgttctcttaggttgagtaacccactctgaattctggttacatgtgtttttctctccctccttaaataaagagaggggttaaacatgccctctaaaagtaggtggttttgaagagaataaattcatcagataacctcaagtcacatgagaatcttagtccatttacattgccttggctagtaaaagccatctatgtatatgtcttacctcatctcctaaaaggcagagtacaaagtaagccatgtatctcaggaaggtaacttcattttgtctatttgctgttgattgtaccaagggatggaagaagtaaatatagctcaggtagcactttatactcaggcagatctcagccctctactgagtcccttagccaagcagtttctttcaaagaagccagcaggcgaaaagcagggactgccactgcatttcatatcacactgttaaaagttgtgttttgaaattttatgtttagttgcacaaattgggccaaagaaacattgccttgaggaagatatgattggaaaatcaagagtgtagaagaataaatactgttttactgtccaaagacatgtttatagtgctctgtaaatgttcctttcctttgtagtctctggcaagatgctttaggaagataaaagtttgaggagaacaaacaggaattctgaattaagcacagagttgaagtttatacccgtttcacatgcttttcaagaatgtcgcaattactaagaagcagataatggtgttttttagaaacctaattgaagtatattcaaccaaatactttaatgtataaaataaatattatacaatatacttgtatagcagtttctgcttcacatttgattttttcaaatttaatatttatattagagatctatatatgtataaatatgtattttgtcaaatttgttacttaaatatatagagaccagttttctctggaagtttgtttaaatgacagaagcgtatatgaattcaagaaaatttaagctgcaaaaatgtatttgctataaaatgagaagtctcactgatagaggttctttattgctcattttttaaaaaatggactcttgaaatctgttaaaataaaattgtacatttgga

SEQ ID NO: 303844 - DNA, 3783 bp, Homo sapiens
acttccgccccgggggcggctcgggccacgcccacctgtcctgcagcactggatgctttgtgagttggggattgttgcgtcccatatctggacccagaagggacttccctgctcggctggctctcggtttctctgctttcctccggagaaataacagcgtcttccgcgccgcgcatggagcctcccggccgccgcgagtgtccctttccttcctggcgctttcctgggttgcttctggcggccatggtgttgctgctgtactccttctccgatgcctgtgaggagccaccaacatttgaagctatggagctcattggtaaaccaaaaccctactatgagattggtgaacgagtagattataagtgtaaaaaaggatacttctatatacctcctcttgccacccatactatttgtgatcggaatcatacatggctacctgtctcagatgacgcctgttatagagaaacatgtccatatatacgggatcctttaaatggccaagcagtccctgcaaatgggacttacgagtttggttatcagatgcactttatttgtaatgagggttattacttaattggtgaagaaattctatattgtgaacttaaaggatcagtagcaatttggagcggtaagcccccaatatgtgaaaaggttttgtgtacaccacctccaaaaataaaaaatggaaaacacacctttagtgaagtagaagtatttgagtatcttgatgcagtaacttatagttgtgatcctgcacctggaccagatccattttcacttattggagagagcacgatttattgtggtgacaattcagtgtggagtcgtgctgctccagagtgtaaagtggtcaaatgtcgatttccagtagtcgaaaatggaaaacagatatcaggatttggaaaaaaattttactacaaagcaacagttatgtttgaatgcgataagggtttttacctcgatggcagcgacacaattgtctgtgacagtaacagtacttgggatcccccagttccaaagtgtcttaaaggtacaaaggttatcttttttctgtcttggtttgttattgttgttgctgttcattttagactttatttctttgatattaactatcagtcatacaaaataactgaaaagaaacaattttagtatttaactctgtcttgtattcatttctatgccagatgaatgacacgaaattcacataaaattctgctgttgtgattttttgtgcttttccagggttcttagcacgttatgtacattgcatgggtatatgcttttaatatttttatgtataaaaagtgaattacaacaactttttggaattgaaacatgggcatttttatctaagtaagtcaacaatggcataattcatataaatgaaatgagagcaataactcccaagtggttgatcttctaacattattttgtttcctagtgctgcctccatctagtacaaaacctccagctttgagtcattcaggtttagtagcttcttccttatatgtcttcttccttatatgttacaagatataaggaattcctggagaaattgccagcaataactcccaagtgtttggtccaatctacattattattttgttttccagtgtcgacttcttccactacaaaatctccagcgtccagtgcctcaggatatcctaaacctgaggaaggaatacttgacagtttggatgtttgggtcattgctgtgattgttattgccatagttgttggagttgcagtaatttgtgttgtcccgtacagatatcttcaaaggaggaagaagaaagggaaagcagatggtggagctgaatatgccacttaccagactaaatcaaccactccagcagagcagagaggctgaatagattccacaacctggtttgccagttcatcttttgactctattaaaatcttcaatagttgttattctgtagtttcactctcatgagtgcaactgtggcttagctaatattgcaatgtggcttgaatgtaggtagcatcctttgatgcttctttgaaacttgtatgaatttgggtatgaacagattgcctgctttcccttaaataacacttagatttattggaccagtcagcacagcatgcctggttgtattaaagcagggatatgctgtattttataaaattggcaaaattagagaaatatagttcacaatgaaattatattttctttgtaaagaaagtggcttgaaatcttttttgttcaaagattaatgccaactcttaagattattctttcaccaactatagaatgtattttatatatcgttcattgtaaaaagcccttaaaaatatgtgtatactactttggctcttgtgcataaaaacaagaacactgaaaattgggaatatgcacaaacttggcttctttaaccaagaatattattggaaaattctctaaaagttaatagggtaaattctctattttttgtaatgtgttcggtgatttcagaaagctagaaagtgtatgtgtggcatttgttttcactttttaaaacatccctaactgatcgaatatatcagtaatttcagaatcagatgcatcctttcataagaagtgagaggactctgacagccataacaggagtgccacttcatggtgcgaagtgaacactgtagtcttgttgttttcccaaagagaactccgtatgttctcttaggttgagtaacccactctgaattctggttacatgtgtttttctctccctccttaaataaagagaggggttaaacatgccctctaaaagtaggtggttttgaagagaataaattcatcagataacctcaagtcacatgagaatcttagtccatttacattgccttggctagtaaaagccatctatgtatatgtcttacctcatctcctaaaaggcagagtacaaagtaagccatgtatctcaggaaggtaacttcattttgtctatttgctgttgattgtaccaagggatggaagaagtaaatatagctcaggtagcactttatactcaggcagatctcagccctctactgagtcccttagccaagcagtttctttcaaagaagccagcaggcgaaaagcagggactgccactgcatttcatatcacactgttaaaagttgtgttttgaaattttatgtttagttgcacaaattgggccaaagaaacattgccttgaggaagatatgattggaaaatcaagagtgtagaagaataaatactgttttactgtccaaagacatgtttatagtgctctgtaaatgttcctttcctttgtagtctctggcaagatgctttaggaagataaaagtttgaggagaacaaacaggaattctgaattaagcacagagttgaagtttatacccgtttcacatgcttttcaagaatgtcgcaattactaagaagcagataatggtgttttttagaaacctaattgaagtatattcaaccaaatactttaatgtataaaataaatattatacaatatacttgtatagcagtttctgcttcacatttgattttttcaaatttaatatttatattagagatctatatatgtataaatatgtattttgtcaaatttgttacttaaatatatagagaccagttttctctggaagtttgtttaaatgacagaagcgtatatgaattcaagaaaatttaagctgcaaaaatgtatttgctataaaatgagaagtctcactgatagaggttctttattgctcattttttaaaaaatggactcttgaaatctgttaaaataaaattgtacatttgga

SEQ ID NO: 303845 - DNA, 3133 bp, Homo sapiens
acttccgccccgggggcggctcgggccacgcccacctgtcctgcagcactggatgctttgtgagttggggattgttgcgtcccatatctggacccagaagggacttccctgctcggctggctctcggtttctctgctttcctccggagaaataacagcgtcttccgcgccgcgcatggagcctcccggccgccgcgagtgtccctttccttcctggcgctttcctgggttgcttctggcggccatggtgttgctgctgtactccttctccgatgcctgtgaggagccaccaacatttgaagctatggagctcattggtaaaccaaaaccctactatgagattggtgaacgagtagattataagtgtaaaaaaggatacttctatatacctcctcttgccacccatactatttgtgatcggaatcatacatggctacctgtctcagatgacgcctgttatagagaaacatgtccatatatacgggatcctttaaatggccaagcagtccctgcaaatgggacttacgagtttggttatcagatgcactttatttgtaatgagggttattacttaattggtgaagaaattctatattgtgaacttaaaggatcagtagcaatttggagcggtaagcccccaatatgtgaaaaggttttgtgtacaccacctccaaaaataaaaaatggaaaacacacctttagtgaagtagaagtatttgagtatcttgatgcagtaacttatagttgtgatcctgcacctggaccagatccattttcacttattggagagagcacgatttattgtggtgacaattcagtgtggagtcgtgctgctccagagtgtaaagtggtcaaatgtcgatttccagtagtcgaaaatggaaaacagatatcaggatttggaaaaaaattttactacaaagcaacagttatgtttgaatgcgataagggtttttacctcgatggcagcgacacaattgtctgtgacagtaacagtacttgggatcccccagttccaaagtgtcttaaaggtcctaggcctacttacaagcctccagtctcaaattatccaggatatcctaaacctgaggaaggaatacttgacagtttggatgtttgggtcattgctgtgattgttattgccataggaaagcagatggtggagctgaatatgccacttaccagactaaatcaaccactccagcagagcagagaggctgaatagattccacaacctggtttgccagttcatcttttgactctattaaaatcttcaatagttgttattctgtagtttcactctcatgagtgcaactgtggcttagctaatattgcaatgtggcttgaatgtaggtagcatcctttgatgcttctttgaaacttgtatgaatttgggtatgaacagattgcctgctttcccttaaataacacttagatttattggaccagtcagcacagcatgcctggttgtattaaagcagggatatgctgtattttataaaattggcaaaattagagaaatatagttcacaatgaaattatattttctttgtaaagaaagtggcttgaaatcttttttgttcaaagattaatgccaactcttaagattattctttcaccaactatagaatgtattttatatatcgttcattgtaaaaagcccttaaaaatatgtgtatactactttggctcttgtgcataaaaacaagaacactgaaaattgggaatatgcacaaacttggcttctttaaccaagaatattattggaaaattctctaaaagttaatagggtaaattctctattttttgtaatgtgttcggtgatttcagaaagctagaaagtgtatgtgtggcatttgttttcactttttaaaacatccctaactgatcgaatatatcagtaatttcagaatcagatgcatcctttcataagaagtgagaggactctgacagccataacaggagtgccacttcatggtgcgaagtgaacactgtagtcttgttgttttcccaaagagaactccgtatgttctcttaggttgagtaacccactctgaattctggttacatgtgtttttctctccctccttaaataaagagaggggttaaacatgccctctaaaagtaggtggttttgaagagaataaattcatcagataacctcaagtcacatgagaatcttagtccatttacattgccttggctagtaaaagccatctatgtatatgtcttacctcatctcctaaaaggcagagtacaaagtaagccatgtatctcaggaaggtaacttcattttgtctatttgctgttgattgtaccaagggatggaagaagtaaatatagctcaggtagcactttatactcaggcagatctcagccctctactgagtcccttagccaagcagtttctttcaaagaagccagcaggcgaaaagcagggactgccactgcatttcatatcacactgttaaaagttgtgttttgaaattttatgtttagttgcacaaattgggccaaagaaacattgccttgaggaagatatgattggaaaatcaagagtgtagaagaataaatactgttttactgtccaaagacatgtttatagtgctctgtaaatgttcctttcctttgtagtctctggcaagatgctttaggaagataaaagtttgaggagaacaaacaggaattctgaattaagcacagagttgaagtttatacccgtttcacatgcttttcaagaatgtcgcaattactaagaagcagataatggtgttttttagaaacctaattgaagtatattcaaccaaatactttaatgtataaaataaatattatacaatatacttgtatagcagtttctgcttcacatttgattttttcaaatttaatatttatattagagatctatatatgtataaatatgtattttgtcaaatttgttacttaaatatatagagaccagttttctctggaagtttgtttaaatgacagaagcgtatatgaattcaagaaaatttaagctgcaaaaatgtatttgctataaaatgagaagtctcactgatagaggttctttattgctcattttttaaaaaatggactcttgaaatctgttaaaataaaattgtacatttgga

SEQ ID NO: 303846 - DNA, 3357 bp, Homo sapiens
ggatttcttaactagcaccgagttaagcatattttctcattaattgtcagcatttcttgtgatgactagaacagaacttagcatggccttccaaataaatacaggcgtattaggccgttttcgtattgctctaaagaaatacctgagactgggtaatttataaagaaaagaagtttaattggctcatgtttctacaagctgtacaggaagcatggtgctggcatctgctgggggtttgggtaggcctcgggaaacttaacaaccattgggaaagacagaaggagagcaaggtgtctcacatggcaggagcaggaggagcaaggtggggaggacgggaggtgttgcgcacttttaaataaccagatctcccaagcactcagtatcacgagaacagcaccaaggggacggtgctaaaccattcatgagaaatccacccccatgattcagacccctcccaccaggccccacctccaacattgtggactacaatttgacatgcgatttggtggggacacagatccaaaccatatcaataggtatttacactttaagaaaatgagatttgttctgaaagttagttactacattaatggtttgaatttgggatgatatatttgctcatagaaaccttcttttaaatccatattgaattcacaaacagcttgtagaaaccctatattgacaaatttattgaagacacagaaattttactaatgctgtcttaatcttttacatttcctttcctctttttcttcatttttaagaggttttgtgtacaccacctccaaaaataaaaaatggaaaacacacctttagtgaagtagaagtatttgagtatcttgatgcagtaacttatagttgtgatcctgcacctggaccagatccattttcacttattggagagagcacgatttattgtggtgacaattcagtgtggagtcgtgctgctccagagtgtaaagtggtcaaatgtcgatttccagtagtcgaaaatggaaaacagatatcaggatttggaaaaaaattttactacaaagcaacagttatgtttgaatgcgataagggtttttacctcgatggcagcgacacaattgtctgtgacagtaacagtacttgggatcccccagttccaaagtgtcttaaagtgtcgacttcttccactacaaaatctccagcgtccagtgcctcaggtcctaggcctacttacaagcctccagtctcaaattatccaggatatcctaaacctgaggaaggaatacttgacagtttggatgtttgggtcattgctgtgattgttattgccatagttgttggagttgcagtaatttgtgttgtcccgtacagatatcttcaaaggaggaagaagaaagggaaagcagatggtggagctgaatatgccacttaccagactaaatcaaccactccagcagagcagagaggctgaatagattccacaacctggtttgccagttcatcttttgactctattaaaatcttcaatagttgttattctgtagtttcactctcatgagtgcaactgtggcttagctaatattgcaatgtggcttgaatgtaggtagcatcctttgatgcttctttgaaacttgtatgaatttgggtatgaacagattgcctgctttcccttaaataacacttagatttattggaccagtcagcacagcatgcctggttgtattaaagcagggatatgctgtattttataaaattggcaaaattagagaaatatagttcacaatgaaattatattttctttgtaaagaaagtggcttgaaatcttttttgttcaaagattaatgccaactcttaagattattctttcaccaactatagaatgtattttatatatcgttcattgtaaaaagcccttaaaaatatgtgtatactactttggctcttgtgcataaaaacaagaacactgaaaattgggaatatgcacaaacttggcttctttaaccaagaatattattggaaaattctctaaaagttaatagggtaaattctctattttttgtaatgtgttcggtgatttcagaaagctagaaagtgtatgtgtggcatttgttttcactttttaaaacatccctaactgatcgaatatatcagtaatttcagaatcagatgcatcctttcataagaagtgagaggactctgacagccataacaggagtgccacttcatggtgcgaagtgaacactgtagtcttgttgttttcccaaagagaactccgtatgttctcttaggttgagtaacccactctgaattctggttacatgtgtttttctctccctccttaaataaagagaggggttaaacatgccctctaaaagtaggtggttttgaagagaataaattcatcagataacctcaagtcacatgagaatcttagtccatttacattgccttggctagtaaaagccatctatgtatatgtcttacctcatctcctaaaaggcagagtacaaagtaagccatgtatctcaggaaggtaacttcattttgtctatttgctgttgattgtaccaagggatggaagaagtaaatatagctcaggtagcactttatactcaggcagatctcagccctctactgagtcccttagccaagcagtttctttcaaagaagccagcaggcgaaaagcagggactgccactgcatttcatatcacactgttaaaagttgtgttttgaaattttatgtttagttgcacaaattgggccaaagaaacattgccttgaggaagatatgattggaaaatcaagagtgtagaagaataaatactgttttactgtccaaagacatgtttatagtgctctgtaaatgttcctttcctttgtagtctctggcaagatgctttaggaagataaaagtttgaggagaacaaacaggaattctgaattaagcacagagttgaagtttatacccgtttcacatgcttttcaagaatgtcgcaattactaagaagcagataatggtgttttttagaaacctaattgaagtatattcaaccaaatactttaatgtataaaataaatattatacaatatacttgtatagcagtttctgcttcacatttgattttttcaaatttaatatttatattagagatctatatatgtataaatatgtattttgtcaaatttgttacttaaatatatagagaccagttttctctggaagtttgtttaaatgacagaagcgtatatgaattcaagaaaatttaagctgcaaaaatgtatttgctataaaatgagaagtctcactgatagaggttctttattgctcattttttaaaaaatggactcttgaaatctgttaaaataaaattgtacatttgga

SEQ ID NO: 303847 - DNA, 3920 bp, Homo sapiens
tagcaactccaagctgctcacaactgaaaggcaggaaaagtccttatttactgaaataaaatagaagacttttgcagggactcctggtcaaccactgtgcttatgactggagagattattttgatatgatggaaggaattatcctgatttcagcactaccatctctggtttcactttgcttccagcagaagcaagagacaatagtaattgtgggtagcacttcagtctgggcagactgtgcttagttaacatcatttctgtggtcttcagtttccctttagtataatgtgagtgttgaactgaaatctcaatcactggcttctaatttggttatatatttcctatctccctaatattttaaaggatcgaagagaattatgcatgttaacatagtaattaagataccttcttataggctgggtggggtagctcacacctgtaataccagaactttgggaggccgaggtgggtggatcacgaggtcagaagttcaagaccagcctggctaagttggtgaaaccccatctctactaaaaatacaaaaattagcggggtgcggtggcaggcacttgtaatcccagctgctcgggaggccgaggcaggagaatcgcttgaacccagtgggcagaggttgcagtgagccaagatcatgccactgcactccagcctgggtgacagagtgagactctgtctcaaaacaaaaaccttcttataattcctgtaagagcttggtaactggtagcctcctgagttgagtgctgtagggtttgaggggcaggaagagatgagttttttagtggactgatacatgagcaaaacaagattgcatgtgaaatttatactcagtgaggcatccgggcttaactcacatgctcctagtgggtatatgcactaatactacgtttgttgatacagtcttttgaaagagttgatgataagcatttcataaagtatttataaaacactggtatagcttagtgttggagagcagaagagagaattgcttgggattgtcaatgatttcttatcatctgctagaggaagacttaataacaacatcatgatgttaaggtagatctaaatgtgttaacaagaagaaaagttgaggaagtcctaagtggaaaagagaaagatgtaaattatgtagtatcatactacttacagtttttaaaaagatacatatgtttaccccaagcacattccctttttttttttttgagacagagtcttgctctgtcacccaggatggcgtgcagtggcgcggtcttggctcactgcaacctccgcctcccgggttcaagcggttctcctgccacctcagactcccaagtagctggtattacaggcacccgccactatgccggctagttttttgtgtttttagtagagacggggtttctccatgatggcctggctagtctcgaactcctgacctcaagtgattcacctgcctcggcctcccacagtgctgggattacaggcgtgagccaccacacccatcctcacattactttcatgatggttatcttctaagatttccattataaaatacagagtgtggtgagcattcttgtacatacatcttacatacttgtgcaaatatatatgtaggttaaattctaagatgtggaattgcaaagtttgtaaagtgtgtagttttcatttgataaacttaaaaaatcaatatcaaaattaaagtcataattttatattgataaggccctggtgaattataaaatcaaacttatttttcgtcctaggcctacttacaagcctccagtctcaaattatccaggatatcctaaacctgaggaaggaatacttgacagtttggatgtttgggtcattgctgtgattgttattgccatagttgttggagttgcagtaatttgtgttgtcccgtacagatatcttcaaaggaggaagaagaaagggaaagcagatggtggagctgaatatgccacttaccagactaaatcaaccactccagcagagcagagaggctgaatagattccacaacctggtttgccagttcatcttttgactctattaaaatcttcaatagttgttattctgtagtttcactctcatgagtgcaactgtggcttagctaatattgcaatgtggcttgaatgtaggtagcatcctttgatgcttctttgaaacttgtatgaatttgggtatgaacagattgcctgctttcccttaaataacacttagatttattggaccagtcagcacagcatgcctggttgtattaaagcagggatatgctgtattttataaaattggcaaaattagagaaatatagttcacaatgaaattatattttctttgtaaagaaagtggcttgaaatcttttttgttcaaagattaatgccaactcttaagattattctttcaccaactatagaatgtattttatatatcgttcattgtaaaaagcccttaaaaatatgtgtatactactttggctcttgtgcataaaaacaagaacactgaaaattgggaatatgcacaaacttggcttctttaaccaagaatattattggaaaattctctaaaagttaatagggtaaattctctattttttgtaatgtgttcggtgatttcagaaagctagaaagtgtatgtgtggcatttgttttcactttttaaaacatccctaactgatcgaatatatcagtaatttcagaatcagatgcatcctttcataagaagtgagaggactctgacagccataacaggagtgccacttcatggtgcgaagtgaacactgtagtcttgttgttttcccaaagagaactccgtatgttctcttaggttgagtaacccactctgaattctggttacatgtgtttttctctccctccttaaataaagagaggggttaaacatgccctctaaaagtaggtggttttgaagagaataaattcatcagataacctcaagtcacatgagaatcttagtccatttacattgccttggctagtaaaagccatctatgtatatgtcttacctcatctcctaaaaggcagagtacaaagtaagccatgtatctcaggaaggtaacttcattttgtctatttgctgttgattgtaccaagggatggaagaagtaaatatagctcaggtagcactttatactcaggcagatctcagccctctactgagtcccttagccaagcagtttctttcaaagaagccagcaggcgaaaagcagggactgccactgcatttcatatcacactgttaaaagttgtgttttgaaattttatgtttagttgcacaaattgggccaaagaaacattgccttgaggaagatatgattggaaaatcaagagtgtagaagaataaatactgttttactgtccaaagacatgtttatagtgctctgtaaatgttcctttcctttgtagtctctggcaagatgctttaggaagataaaagtttgaggagaacaaacaggaattctgaattaagcacagagttgaagtttatacccgtttcacatgcttttcaagaatgtcgcaattactaagaagcagataatggtgttttttagaaacctaattgaagtatattcaaccaaatactttaatgtataaaataaatattatacaatatacttgtatagcagtttctgcttcacatttgattttttcaaatttaatatttatattagagatctatatatgtataaatatgtattttgtcaaatttgttacttaaatatatagagaccagttttctctggaagtttgtttaaatgacagaagcgtatatgaattcaagaaaatttaagctgcaaaaatgtatttgctataaaatgagaagtctcactgatagaggttctttattgctcattttttaaaaaatggactcttgaaatctgttaaaataaaattgtacatttgga

SEQ ID NO: 303848 - DNA, 2911 bp, Homo sapiens
tagcaactccaagctgctcacaactgaaaggcaggaaaagtccttatttactgaaataaaatagaagacttttgcagggactcctggtcaaccactgtgcttatgactggagagattattttgatatgatggaaggaattatcctgatttcagcactaccatctctggtttcactttgcttccagcagaagcaagagacaatagtaattgtgggtagcacttcagtctgggcagactgtgcttagttaacatcatttctgtggtcttcagtttccctttagtataatgtgagtgttgaactgaaatctcaatcactggcttctaatttggttatatatttcctatctccctaatattttaaaggatcgaagagaattatgcatgttaacatagtaattaagataccttcttataggctgggtggggtagctcacacacctgcctcggcctcccacagtgctgggattacaggcgtgagccaccacacccatcctcacattactttcatgatggttatcttctaagatttccattataaaatacagagtgtggtgagcattcttgtacatacatcttacatacttgtgcaaatatatatgtaggttaaattctaagatgtggaattgcaaagtttgtaaagtgtgtagttttcatttgataaacttaaaaaatcaatatcaaaattaaagtcataattttatattgataaggccctggtgaattataaaatcaaacttatttttcgtcctaggcctacttacaagcctccagtctcaaattatccaggatatcctaaacctgaggaaggaatacttgacagtttggatgtttgggtcattgctgtgattgttattgccatagttgttggagttgcagtaatttgtgttgtcccgtacagatatcttcaaaggaggaagaagaaagggaaagcagatggtggagctgaatatgccacttaccagactaaatcaaccactccagcagagcagagaggctgaatagattccacaacctggtttgccagttcatcttttgactctattaaaatcttcaatagttgttattctgtagtttcactctcatgagtgcaactgtggcttagctaatattgcaatgtggcttgaatgtaggtagcatcctttgatgcttctttgaaacttgtatgaatttgggtatgaacagattgcctgctttcccttaaataacacttagatttattggaccagtcagcacagcatgcctggttgtattaaagcagggatatgctgtattttataaaattggcaaaattagagaaatatagttcacaatgaaattatattttctttgtaaagaaagtggcttgaaatcttttttgttcaaagattaatgccaactcttaagattattctttcaccaactatagaatgtattttatatatcgttcattgtaaaaagcccttaaaaatatgtgtatactactttggctcttgtgcataaaaacaagaacactgaaaattgggaatatgcacaaacttggcttctttaaccaagaatattattggaaaattctctaaaagttaatagggtaaattctctattttttgtaatgtgttcggtgatttcagaaagctagaaagtgtatgtgtggcatttgttttcactttttaaaacatccctaactgatcgaatatatcagtaatttcagaatcagatgcatcctttcataagaagtgagaggactctgacagccataacaggagtgccacttcatggtgcgaagtgaacactgtagtcttgttgttttcccaaagagaactccgtatgttctcttaggttgagtaacccactctgaattctggttacatgtgtttttctctccctccttaaataaagagaggggttaaacatgccctctaaaagtaggtggttttgaagagaataaattcatcagataacctcaagtcacatgagaatcttagtccatttacattgccttggctagtaaaagccatctatgtatatgtcttacctcatctcctaaaaggcagagtacaaagtaagccatgtatctcaggaaggtaacttcattttgtctatttgctgttgattgtaccaagggatggaagaagtaaatatagctcaggtagcactttatactcaggcagatctcagccctctactgagtcccttagccaagcagtttctttcaaagaagccagcaggcgaaaagcagggactgccactgcatttcatatcacactgttaaaagttgtgttttgaaattttatgtttagttgcacaaattgggccaaagaaacattgccttgaggaagatatgattggaaaatcaagagtgtagaagaataaatactgttttactgtccaaagacatgtttatagtgctctgtaaatgttcctttcctttgtagtctctggcaagatgctttaggaagataaaagtttgaggagaacaaacaggaattctgaattaagcacagagttgaagtttatacccgtttcacatgcttttcaagaatgtcgcaattactaagaagcagataatggtgttttttagaaacctaattgaagtatattcaaccaaatactttaatgtataaaataaatattatacaatatacttgtatagcagtttctgcttcacatttgattttttcaaatttaatatttatattagagatctatatatgtataaatatgtattttgtcaaatttgttacttaaatatatagagaccagttttctctggaagtttgtttaaatgacagaagcgtatatgaattcaagaaaatttaagctgcaaaaatgtatttgctataaaatgagaagtctcactgatagaggttctttattgctcattttttaaaaaatggactcttgaaatctgttaaaataaaattgtacatttgga

SEQ ID NO: 303849 - DNA, 2757 bp, Homo sapiens
tggccgtccgcaaagtgctcagatacagccatgcagaacgcgtgactaacatatacacggacacgcacgagagcagggccacgcccacctgtcctgcagcactggatgctttgtgagttggggattgttgcgtcccatatctggacccagaagggacttccctgctcggctggctctcggtttctctgctttcctccggagaaataacagcgtcttccgcgccgcgcatggagcctcccggccgccgcgagtgtccctttccttcctggcgctttcctgggttgcttctggcggccatggtgttgctgctgtactccttctccgacctgcctcggcctcccacagtgctgggattacaggcgtgagccaccacacccatcctcacattactttcatgatggttatcttctaagatttccattataaaatacagagtgtggtgagcattcttgtacatacatcttacatacttgtgcaaatatatatgtaggttaaattctaagatgtggaattgcaaagtttgtaaagtgtgtagttttcatttgataaacttaaaaaatcaatatcaaaattaaagtcataattttatattgataaggccctggtgaattataaaatcaaacttatttttcgatatcctaaacctgaggaaggaatacttgacagtttggatgtttgggtcattgctgtgattgttattgccatagttgttggagttgcagtaatttgtgttgtcccgtacagatatcttcaaaggaggaagaagaaagggaaagcagatggtggagctgaatatgccacttaccagactaaatcaaccactccagcagagcagagaggctgaatagattccacaacctggtttgccagttcatcttttgactctattaaaatcttcaatagttgttattctgtagtttcactctcatgagtgcaactgtggcttagctaatattgcaatgtggcttgaatgtaggtagcatcctttgatgcttctttgaaacttgtatgaatttgggtatgaacagattgcctgctttcccttaaataacacttagatttattggaccagtcagcacagcatgcctggttgtattaaagcagggatatgctgtattttataaaattggcaaaattagagaaatatagttcacaatgaaattatattttctttgtaaagaaagtggcttgaaatcttttttgttcaaagattaatgccaactcttaagattattctttcaccaactatagaatgtattttatatatcgttcattgtaaaaagcccttaaaaatatgtgtatactactttggctcttgtgcataaaaacaagaacactgaaaattgggaatatgcacaaacttggcttctttaaccaagaatattattggaaaattctctaaaagttaatagggtaaattctctattttttgtaatgtgttcggtgatttcagaaagctagaaagtgtatgtgtggcatttgttttcactttttaaaacatccctaactgatcgaatatatcagtaatttcagaatcagatgcatcctttcataagaagtgagaggactctgacagccataacaggagtgccacttcatggtgcgaagtgaacactgtagtcttgttgttttcccaaagagaactccgtatgttctcttaggttgagtaacccactctgaattctggttacatgtgtttttctctccctccttaaataaagagaggggttaaacatgccctctaaaagtaggtggttttgaagagaataaattcatcagataacctcaagtcacatgagaatcttagtccatttacattgccttggctagtaaaagccatctatgtatatgtcttacctcatctcctaaaaggcagagtacaaagtaagccatgtatctcaggaaggtaacttcattttgtctatttgctgttgattgtaccaagggatggaagaagtaaatatagctcaggtagcactttatactcaggcagatctcagccctctactgagtcccttagccaagcagtttctttcaaagaagccagcaggcgaaaagcagggactgccactgcatttcatatcacactgttaaaagttgtgttttgaaattttatgtttagttgcacaaattgggccaaagaaacattgccttgaggaagatatgattggaaaatcaagagtgtagaagaataaatactgttttactgtccaaagacatgtttatagtgctctgtaaatgttcctttcctttgtagtctctggcaagatgctttaggaagataaaagtttgaggagaacaaacaggaattctgaattaagcacagagttgaagtttatacccgtttcacatgcttttcaagaatgtcgcaattactaagaagcagataatggtgttttttagaaacctaattgaagtatattcaaccaaatactttaatgtataaaataaatattatacaatatacttgtatagcagtttctgcttcacatttgattttttcaaatttaatatttatattagagatctatatatgtataaatatgtattttgtcaaatttgttacttaaatatatagagaccagttttctctggaagtttgtttaaatgacagaagcgtatatgaattcaagaaaatttaagctgcaaaaatgtatttgctataaaatgagaagtctcactgatagaggttctttattgctcattttttaaaaaatggactcttgaaatctgttaaaataaaattgtacatttgga

SEQ ID NO: 303850 - DNA, 4013 bp, Homo sapiens
tagcaactccaagctgctcacaactgaaaggcaggaaaagtccttatttactgaaataaaatagaagacttttgcagggactcctggtcaaccactgtgcttatgactggagagattattttgatatgatggaaggaattatcctgatttcagcactaccatctctggtttcactttgcttccagcagaagcaagagacaatagtaattgtgggtagcacttcagtctgggcagactgtgcttagttaacatcatttctgtggtcttcagtttccctttagtataatgtgagtgttgaactgaaatctcaatcactggcttctaatttggttatatatttcctatctccctaatattttaaaggatcgaagagaattatgcatgttaacatagtaattaagataccttcttataggctgggtggggtagctcacacctgtaataccagaactttgggaggccgaggtgggtggatcacgaggtcagaagttcaagaccagcctggctaagttggtgaaaccccatctctactaaaaatacaaaaattagcggggtgcggtggcaggcacttgtaatcccagctgctcgggaggccgaggcaggagaatcgcttgaacccagtgggcagaggttgcagtgagccaagatcatgccactgcactccagcctgggtgacagagtgagactctgtctcaaaacaaaaaccttcttataattcctgtaagagcttggtaactggtagcctcctgagttgagtgctgtagggtttgaggggcaggaagagatgagttttttagtggactgatacatgagcaaaacaagattgcatgtgaaatttatactcagtgaggcatccgggcttaactcacatgctcctagtgggtatatgcactaatactacgtttgttgatacagtcttttgaaagagttgatgataagcatttcataaagtatttataaaacactggtatagcttagtgttggagagcagaagagagaattgcttgggattgtcaatgatttcttatcatctgctagaggaagacttaataacaacatcatgatgttaaggtagatctaaatgtgttaacaagaagaaaagttgaggaagtcctaagtggaaaagagaaagatgtaaattatgtagtatcatactacttacagtttttaaaaagatacatatgtttaccccaagcacattccctttttttttttttgagacagagtcttgctctgtcacccaggatggcgtgcagtggcgcggtcttggctcactgcaacctccgcctcccgggttcaagcggttctcctgccacctcagactcccaagtagctggtattacaggcacccgccactatgccggctagttttttgtgtttttagtagagacggggtttctccatgatggcctggctagtctcgaactcctgacctcaagtgattcacctgcctcggcctcccacagtgctgggattacaggcgtgagccaccacacccatcctcacattactttcatgatggttatcttctaagatttccattataaaatacagagtgtggtgagcattcttgtacatacatcttacatacttgtgcaaatatatatgtaggttaaattctaagatgtggaattgcaaagtttgtaaagtgtgtagttttcatttgataaacttaaaaaatcaatatcaaaattaaagtcataattttatattgataaggccctggtgaattataaaatcaaacttatttttcgtcctaggcctacttacaagcctccagtctcaaattatccaggatatcctaaacctgaggaaggaatacttgacagtttggatgtttgggtcattgctgtgattgttattgccatagttgttggagttgcagtaatttgtgttgtcccgtacagatatcttcaaaggaggaagaagaaaggcacatacctaactgatgagacccacagagaagtaaaatttacttctctctgagaaggagagatgagagaaaggtttgcttttatcattaaaaggaaagcagatggtggagctgaatatgccacttaccagactaaatcaaccactccagcagagcagagaggctgaatagattccacaacctggtttgccagttcatcttttgactctattaaaatcttcaatagttgttattctgtagtttcactctcatgagtgcaactgtggcttagctaatattgcaatgtggcttgaatgtaggtagcatcctttgatgcttctttgaaacttgtatgaatttgggtatgaacagattgcctgctttcccttaaataacacttagatttattggaccagtcagcacagcatgcctggttgtattaaagcagggatatgctgtattttataaaattggcaaaattagagaaatatagttcacaatgaaattatattttctttgtaaagaaagtggcttgaaatcttttttgttcaaagattaatgccaactcttaagattattctttcaccaactatagaatgtattttatatatcgttcattgtaaaaagcccttaaaaatatgtgtatactactttggctcttgtgcataaaaacaagaacactgaaaattgggaatatgcacaaacttggcttctttaaccaagaatattattggaaaattctctaaaagttaatagggtaaattctctattttttgtaatgtgttcggtgatttcagaaagctagaaagtgtatgtgtggcatttgttttcactttttaaaacatccctaactgatcgaatatatcagtaatttcagaatcagatgcatcctttcataagaagtgagaggactctgacagccataacaggagtgccacttcatggtgcgaagtgaacactgtagtcttgttgttttcccaaagagaactccgtatgttctcttaggttgagtaacccactctgaattctggttacatgtgtttttctctccctccttaaataaagagaggggttaaacatgccctctaaaagtaggtggttttgaagagaataaattcatcagataacctcaagtcacatgagaatcttagtccatttacattgccttggctagtaaaagccatctatgtatatgtcttacctcatctcctaaaaggcagagtacaaagtaagccatgtatctcaggaaggtaacttcattttgtctatttgctgttgattgtaccaagggatggaagaagtaaatatagctcaggtagcactttatactcaggcagatctcagccctctactgagtcccttagccaagcagtttctttcaaagaagccagcaggcgaaaagcagggactgccactgcatttcatatcacactgttaaaagttgtgttttgaaattttatgtttagttgcacaaattgggccaaagaaacattgccttgaggaagatatgattggaaaatcaagagtgtagaagaataaatactgttttactgtccaaagacatgtttatagtgctctgtaaatgttcctttcctttgtagtctctggcaagatgctttaggaagataaaagtttgaggagaacaaacaggaattctgaattaagcacagagttgaagtttatacccgtttcacatgcttttcaagaatgtcgcaattactaagaagcagataatggtgttttttagaaacctaattgaagtatattcaaccaaatactttaatgtataaaataaatattatacaatatacttgtatagcagtttctgcttcacatttgattttttcaaatttaatatttatattagagatctatatatgtataaatatgtattttgtcaaatttgttacttaaatatatagagaccagttttctctggaagtttgtttaaatgacagaagcgtatatgaattcaagaaaatttaagctgcaaaaatgtatttgctataaaatgagaagtctcactgatagaggttctttattgctcattttttaaaaaatggactcttgaaatctgttaaaataaaattgtacatttgga

SEQ ID NO: 303851 - DNA, 3820 bp, Homo sapiens
tagcaactccaagctgctcacaactgaaaggcaggaaaagtccttatttactgaaataaaatagaagacttttgcagggactcctggtcaaccactgtgcttatgactggagagattattttgatatgatggaaggaattatcctgatttcagcactaccatctctggtttcactttgcttccagcagaagcaagagacaatagtaattgtgggtagcacttcagtctgggcagactgtgcttagttaacatcatttctgtggtcttcagtttccctttagtataatgtgagtgttgaactgaaatctcaatcactggcttctaatttggttatatatttcctatctccctaatattttaaaggatcgaagagaattatgcatgttaacatagtaattaagataccttcttataggctgggtggggtagctcacacctgtaataccagaactttgggaggccgaggtgggtggatcacgaggtcagaagttcaagaccagcctggctaagttggtgaaaccccatctctactaaaaatacaaaaattagcggggtgcggtggcaggcacttgtaatcccagctgctcgggaggccgaggcaggagaatcgcttgaacccagtgggcagaggttgcagtgagccaagatcatgccactgcactccagcctgggtgacagagtgagactctgtctcaaaacaaaaaccttcttataattcctgtaagagcttggtaactggtagcctcctgagttgagtgctgtagggtttgaggggcaggaagagatgagttttttagtggactgatacatgagcaaaacaagattgcatgtgaaatttatactcagtgaggcatccgggcttaactcacatgctcctagtgggtatatgcactaatactacgtttgttgatacagtcttttgaaagagttgatgataagcatttcataaagtatttataaaacactggtatagcttagtgttggagagcagaagagagaattgcttgggattgtcaatgatttcttatcatctgctagaggaagacttaataacaacatcatgatgttaaggtagatctaaatgtgttaacaagaagaaaagttgaggaagtcctaagtggaaaagagaaagatgtaaattatgtagtatcatactacttacagtttttaaaaagatacatatgtttaccccaagcacattccctttttttttttttgagacagagtcttgctctgtcacccaggatggcgtgcagtggcgcggtcttggctcactgcaacctccgcctcccgggttcaagcggttctcctgccacctcagactcccaagtagctggtattacaggcacccgccactatgccggctagttttttgtgtttttagtagagacggggtttctccatgatggcctggctagtctcgaactcctgacctcaagtgattcacctgcctcggcctcccacagtgctgggattacaggcgtgagccaccacacccatcctcacattactttcatgatggttatcttctaagatttccattataaaatacagagtgtggtcctaggcctacttacaagcctccagtctcaaattatccaggatatcctaaacctgaggaaggaatacttgacagtttggatgtttgggtcattgctgtgattgttattgccatagttgttggagttgcagtaatttgtgttgtcccgtacagatatcttcaaaggaggaagaagaaaggcacatacctaactgatgagacccacagagaagtaaaatttacttctctctgagaaggagagatgagagaaaggtttgcttttatcattaaaaggaaagcagatggtggagctgaatatgccacttaccagactaaatcaaccactccagcagagcagagaggctgaatagattccacaacctggtttgccagttcatcttttgactctattaaaatcttcaatagttgttattctgtagtttcactctcatgagtgcaactgtggcttagctaatattgcaatgtggcttgaatgtaggtagcatcctttgatgcttctttgaaacttgtatgaatttgggtatgaacagattgcctgctttcccttaaataacacttagatttattggaccagtcagcacagcatgcctggttgtattaaagcagggatatgctgtattttataaaattggcaaaattagagaaatatagttcacaatgaaattatattttctttgtaaagaaagtggcttgaaatcttttttgttcaaagattaatgccaactcttaagattattctttcaccaactatagaatgtattttatatatcgttcattgtaaaaagcccttaaaaatatgtgtatactactttggctcttgtgcataaaaacaagaacactgaaaattgggaatatgcacaaacttggcttctttaaccaagaatattattggaaaattctctaaaagttaatagggtaaattctctattttttgtaatgtgttcggtgatttcagaaagctagaaagtgtatgtgtggcatttgttttcactttttaaaacatccctaactgatcgaatatatcagtaatttcagaatcagatgcatcctttcataagaagtgagaggactctgacagccataacaggagtgccacttcatggtgcgaagtgaacactgtagtcttgttgttttcccaaagagaactccgtatgttctcttaggttgagtaacccactctgaattctggttacatgtgtttttctctccctccttaaataaagagaggggttaaacatgccctctaaaagtaggtggttttgaagagaataaattcatcagataacctcaagtcacatgagaatcttagtccatttacattgccttggctagtaaaagccatctatgtatatgtcttacctcatctcctaaaaggcagagtacaaagtaagccatgtatctcaggaaggtaacttcattttgtctatttgctgttgattgtaccaagggatggaagaagtaaatatagctcaggtagcactttatactcaggcagatctcagccctctactgagtcccttagccaagcagtttctttcaaagaagccagcaggcgaaaagcagggactgccactgcatttcatatcacactgttaaaagttgtgttttgaaattttatgtttagttgcacaaattgggccaaagaaacattgccttgaggaagatatgattggaaaatcaagagtgtagaagaataaatactgttttactgtccaaagacatgtttatagtgctctgtaaatgttcctttcctttgtagtctctggcaagatgctttaggaagataaaagtttgaggagaacaaacaggaattctgaattaagcacagagttgaagtttatacccgtttcacatgcttttcaagaatgtcgcaattactaagaagcagataatggtgttttttagaaacctaattgaagtatattcaaccaaatactttaatgtataaaataaatattatacaatatacttgtatagcagtttctgcttcacatttgattttttcaaatttaatatttatattagagatctatatatgtataaatatgtattttgtcaaatttgttacttaaatatatagagaccagttttctctggaagtttgtttaaatgacagaagcgtatatgaattcaagaaaatttaagctgcaaaaatgtatttgctataaaatgagaagtctcactgatagaggttctttattgctcattttttaaaaaatggactcttgaaatctgttaaaataaaattgtacatttgga

SEQ ID NO: 303852 - DNA, 3143 bp, Homo sapiens
acttccgccccgggggcggctcgggccacgcccacctgtcctgcagcactggatgctttgtgagttggggattgttgcgtcccatatctggacccagaagggacttccctgctcggctggctctcggtttctctgctttcctccggagaaataacagcgtcttccgcgccgcgcatggagcctcccggccgccgcgagtgtccctttccttcctggcgctttcctgggttgcttctggcggccatggtgttgctgctgtactccttctccgatgcctgtgaggagccaccaacatttgaagctatggagctcattggtaaaccaaaaccctactatgagattggtgaacgagtagattataagtgtaaaaaaggatacttctatatacctcctcttgccacccatactatttgtgatcggaatcatacatggctacctgtctcagatgacgcctgttatagagaaacatgtccatatatacgggatcctttaaatggccaagcagtccctgcaaatgggacttacgagtttggttatcagatgcactttatttgtaatgagggttattacttaattggtgaagaaattctatattgtgaacttaaaggatcagtagcaatttggagcggtaagcccccaatatgtgaaaaggttttgtgtacaccacctccaaaaataaaaaatggaaaacacacctttagtgaagtagaagtatttgagtatcttgatgcagtaacttatagttgtgatcctgcacctggaccagatccattttcacttattggagagagcacgatttattgtggtgacaattcagtgtggagtcgtgctgctccagagtgtaaagtggtcaaatgtcgatttccagtagtcgaaaatggaaaacagatatcaggatttggaaaaaaattttactacaaagcaacagttatgtttgaatgcgataagggtttttacctcgatggcagcgacacaattgtctgtgacagtaacagtacttgggatcccccagttccaaagtgtcttaaaggtcctaggcctacttacaagcctccagtctcaaattatccaggatatcctaaacctgaggaaggaatacttgacagtttggatgtttgggtcattgctgtgattgttattgccatagttgttggagttgcagtaatttgtgttgtcccgtacagatatcttcaaaggaggaagaagaaagggaaagcagatggtggagctgaatatgccacttaccagactaaatcaaccactccagcagagcagagaggctgaatagattccacaacctggtttgccagttcatcttttgactctattaaaatcttcaatagttgttattctgtagtttcactctcatgagtgcaactgtggcttagctaatattgcaatgtggcttgaatgtaggtagcatcctttgatgcttctttgaaacttgtatgaatttgggtatgaacagattgcctgctttcccttaaataacacttagatttattggaccagtcagcacagcatgcctggttgtattaaagcagggatatgctgtattttataaaattggcaaaattagagaaatatagttcacaatgaaattatattttctttgtaaagaaagtggcttgaaatcttttttgttcaaagattaatgccaactcttaagattattctttcaccaactatagaatgtattttatatatcgttcattgtaaaaagcccttaaaaatatgtgtatactactttggctcttgtgcataaaaacaagaacactgaaaattgggaatatgcacaaacttggcttctttaaccaagaatattattggaaaattctctaaaagttaatagggtaaattctctattttttgtaatgtgttcggtgatttcagaaagctagaaagtgtatgtgtggcatttgttttcactttttaaaacatccctaactgatcgaatatatcagtaatttcagaatcagatgcatcctttcataagaagtgagaggactctgacagccataacaggagtgccacttcatggtgcgaagtgaacactgtagtcttgttgttttcccaaagagaactccgtatgttctcttaggttgagtaacccactctgaattctggttacatgtgtttttctctccctccttaaataaagagaggggttaaacatgccctctaaaagtaggtggttttgaagagaataaattcatcagataacctcaagtcacatgagaatcttagtccatttacattgccttggctagtaaaagccatctatgtatatgtcttacctcatctcgtctatttgctgttgattgtaccaagggatggaagaagtaaatatagctcaggtagcactttatactcaggcagatctcagccctctactgagtcccttagccaagcagtttctttcaaagaagccagcaggcgaaaagcagggactgccactgcatttcatatcacactgttaaaagttgtgttttgaaattttatgtttagttgcacaaattgggccaaagaaacattgccttgaggaagatatgattggaaaatcaagagtgtagaagaataaatactgttttactgtccaaagacatgtttatagtgctctgtaaatgttcctttcctttgtagtctctggcaagatgctttaggaagataaaagtttgaggagaacaaacaggaattctgaattaagcacagagttgaagtttatacccgtttcacatgcttttcaagaatgtcgcaattactaagaagcagataatggtgttttttagaaacctaattgaagtatattcaaccaaatactttaatgtataaaataaatattatacaatatacttgtatagcagtttctgcttcacatttgattttttcaaatttaatatttatattagagatctatatatgtataaatatgtattttgtcaaatttgttacttaaatatatagagaccagttttctctggaagtttgtttaaatgacagaagcgtatatgaattcaagaaaatttaagctgcaaaaatgtatttgctataaaatgagaagtctcactgatagaggttctttattgctcattttttaaaaaatggactcttgaaatctgttaaaataaaattgtacatttgga

SEQ ID NO: 303853 - DNA, 3253 bp, Homo sapiens
  misc_feature (3237)..(3237): n is a, c, g, or t
  misc_feature (3240)..(3240): n is a, c, g, or t
  misc_feature (3245)..(3245): n is a, c, g, or t
acttccgccccgggggcggctcgggccacgcccacctgtcctgcagcactggatgctttgtgagttggggattgttgcgtcccatatctggacccagaagggacttccctgctcggctggctctcggtttctctgctttcctccggagaaataacagcgtcttccgcgccgcgcatggagcctcccggccgccgcgagtgtccctttccttcctggcgctttcctgggttgcttctggcggccatggtgttgctgctgtactccttctccgatgcctgtgaggagccaccaacatttgaagctatggagctcattggtaaaccaaaaccctactatgagattggtgaacgagtagattataagtgtaaaaaaggatacttctatatacctcctcttgccacccatactatttgtgatcggaatcatacatggctacctgtctcagatgacgcctgttatagagaaacatgtccatatatacgggatcctttaaatggccaagcagtccctgcaaatgggacttacgagtttggttatcagatgcactttatttgtaatgagggttattacttaattggtgaagaaattctatattgtgaacttaaaggatcagtagcaatttggagcggtaagcccccaatatgtgaaaaggttttgtgtacaccacctccaaaaataaaaaatggaaaacacacctttagtgaagtagaagtatttgagtatcttgatgcagtaacttatagttgtgatcctgcacctggaccagatccattttcacttattggagagagcacgatttattgtggtgacaattcagtgtggagtcgtgctgctccagagtgtaaagtggtcaaatgtcgatttccagtagtcgaaaatggaaaacagatatcaggatttggaaaaaaattttactacaaagcaacagttatgtttgaatgcgataagggtttttacctcgatggcagcgacacaattgtctgtgacagtaacagtacttgggatcccccagttccaaagtgtcttaaaggtcctaggcctacttacaagcctccagtctcaaattatccaggatatcctaaacctgaggaaggaatacttgacagtttggatgtttgggtcattgctgtgattgttattgccatagttgttggagttgcagtaatttgtgttgtcccgtacagatatcttcaaaggaggaagaagaaagggaaagcagatggtggagctgaatatgccacttaccagactaaatcaaccactccagcagagcagagaggctgaatagattccacaacctggtttgccagttcatcttttgactctattaaaatcttcaatagttgttattctgtagtttcactctcatgagtgcaactgtggcttagctaatattgcaatgtggcttgaatgtaggtagcatcctttgatgcttctttgaaacttgtatgaatttgggtatgaacagattgcctgctttcccttaaataacacttagatttattggaccagtcagcacagcatgcctggttgtattaaagcagggatatgctgtattttataaaattggcaaaattagagaaatatagttcacaatgaaattatattttctttgtaaagaaagtggcttgaaatcttttttgttcaaagattaatgccaactcttaagattattctttcaccaactatagaatgtattttatatatcgttcattgtaaaaagcccttaaaaatatgtgtatactactttggctcttgtgcataaaaacaagaacactgaaaattgggaatatgcacaaacttggcttctttaaccaagaatattattggaaaattctctaaaagttaatagggtaaattctctattttttgtaatgtgttcggtgatttcagaaagctagaaagtgtatgtgtggcatttgttttcactttttaaaacatccctaactgatcgaatatatcagtaatttcagaatcagatgcatcctttcataagaagtgagaggactctgacagccataacaggagtgccacttcatggtgcgaagtgaacactgtagtcttgttgttttcccaaagagaactccgtatgttctcttaggttgagtaacccactctgaattctggttacatgtgtttttctctccctccttaaataaagagaggggttaaacatgccctctaaaagtaggtggttttgaagagaataaattcatcagataacctcaagtcacatgagaatcttagtccatttacattgccttggctagtaaaagccatctatgtatatgtcttacctcatctcctaaaaggcagagtacaaagtaagccatgtatctcaggaaggtaacttcattttgtctatttgctgttgattgtaccaagggatggaagaagtaaatatagctcaggtagcactttatactcaggcagatctcagccctctactgagtcccttagccaagcagtttctttcaaagaagccagcaggcgaaaagcagggactgccactgcatttcatatcacactgttaaaagttgtgttttgaaattttatgtttagttgcacaaattgggccaaagaaacattgccttgaggaagatatgattggaaaatcaagagtgtagaagaataaatactgttttactgtccaaagacatgtttatagtgctctgtaaatgttcctttcctttgtagtctctggcaagatgctttaggaagataaaagtttgaggagaacaaacaggaattctgaattaagcacagagttgaagtttatacccgtttcacatgcttttcaagaatgtcgcaattactaagaagcagataatggtgttttttagaaacctaattgaagtatattcaaccaaatactttaatgtataaaataaatattatacaatatacttgtatagcagtttctgcttcacatttgattttttcaaatttaatatttatattagagatctatatatgtataaatatgtattttgtcaaatttgttacttaaatatatagagaccagttttctctggaagtttgtttaaatgacagaagcgtatatgaattcaagaaaatttaagctgcaaaaatgtatttgctataaaatgagaagtctcactgatagaggttctttattgctcattttttaaaaaatggactcttgaaatctgttaaaataaaattgtacatttggaaaaaaaaaaaaaaaaaaaaaaaaaaaaaaaaaaaaaaaanacnaaaanaaacaaaa

SEQ ID NO: 303854 - DNA, 3219 bp, Homo sapiens
acttccgccccgggggcggctcgggccacgcccacctgtcctgcagcactggatgctttgtgagttggggattgttgcgtcccatatctggacccagaagggacttccctgctcggctggctctcggtttctctgctttcctccggagaaataacagcgtcttccgcgccgcgcatggagcctcccggccgccgcgagtgtccctttccttcctggcgctttcctgggttgcttctggcggccatggtgttgctgctgtactccttctccgatgcctgtgaggagccaccaacatttgaagctatggagctcattggtaaaccaaaaccctactatgagattggtgaacgagtagattataagtgtaaaaaaggatacttctatatacctcctcttgccacccatactatttgtgatcggaatcatacatggctacctgtctcagatgacgcctgttatagagaaacatgtccatatatacgggatcctttaaatggccaagcagtccctgcaaatgggacttacgagtttggttatcagatgcactttatttgtaatgagggttattacttaattggtgaagaaattctatattgtgaacttaaaggatcagtagcaatttggagcggtaagcccccaatatgtgaaaaggttttgtgtacaccacctccaaaaataaaaaatggaaaacacacctttagtgaagtagaagtatttgagtatcttgatgcagtaacttatagttgtgatcctgcacctggaccagatccattttcacttattggagagagcacgatttattgtggtgacaattcagtgtggagtcgtgctgctccagagtgtaaagtggtcaaatgtcgatttccagtagtcgaaaatggaaaacagatatcaggatttggaaaaaaattttactacaaagcaacagttatgtttgaatgcgataagggtttttacctcgatggcagcgacacaattgtctgtgacagtaacagtacttgggatcccccagttccaaagtgtcttaaaggtcctaggcctacttacaagcctccagtctcaaattatccaggatatcctaaacctgaggaaggaatacttgacagtttggatgtttgggtcattgctgtgattgttattgccatagttgttggagttgcagtaatttgtgttgtcccgtacagatatcttcaaaggaggaagaagaaagggaaagcagatggtggagctgaatatgccacttaccagactaaatcaaccactccagcagagcagagaggctgaatagattccacaacctggtttgccagttcatcttttgactctattaaaatcttcaatagttgttattctgtagtttcactctcatgagtgcaactgtggcttagctaatattgcaatgtggcttgaatgtaggtagcatcctttgatgcttctttgaaacttgtatgaatttgggtatgaacagattgcctgctttcccttaaataacacttagatttattggaccagtcagcacagcatgcctggttgtattaaagcagggatatgctgtattttataaaattggcaaaattagagaaatatagttcacaatgaaattatattttctttgtaaagaaagtggcttgaaatcttttttgttcaaagattaatgccaactcttaagattattctttcaccaactatagaatgtattttatatatcgttcattgtaaaaagcccttaaaaatatgtgtatactactttggctcttgtgcataaaaacaagaacactgaaaattgggaatatgcacaaacttggcttctttaaccaagaatattattggaaaattctctaaaagttaatagggtaaattctctattttttgtaatgtgttcggtgatttcagaaagctagaaagtgtatgtgtggcatttgttttcactttttaaaacatccctaactgatcgaatatatcagtaatttcagaatcagatgcatcctttcataagaagtgagaggactctgacagccataacaggagtgccacttcatggtgcgaagtgaacactgtagtcttgttgttttcccaaagagaactccgtatgttctcttaggttgagtaacccactctgaattctggttacatgtgtttttctctccctccttaaataaagagaggggttaaacatgccctctaaaagtaggtggttttgaagagaataaattcatcagataacctcaagtcacatgagaatcttagtccatttacattgccttggctagtaaaagccatctatgtatatgtcttacctcatctcctaaaaggcagagtacaaagtaagccatgtatctcaggaaggtaacttcattttgtctatttgctgttgattgtaccaagggatggaagaagtaaatatagctcaggtagcactttatactcaggcagatctcagccctctactgagtcccttagccaagcagtttctttcaaagaagccagcaggcgaaaagcagggactgccactgcatttcatatcacactgttaaaagttgtgttttgaaattttatgtttagttgcacaaattgggccaaagaaacattgccttgaggaagatatgattggaaaatcaagagtgtagaagaataaatactgttttactgtccaaagacatgtttatagtgctctgtaaatgttcctttcctttgtagtctctggcaagatgctttaggaagataaaagtttgaggagaacaaacaggaattctgaattaagcacagagttgaagtttatacccgtttcacatgcttttcaagaatgtcgcaattactaagaagcagataatggtgttttttagaaacctaattgaagtatattcaaccaaatactttaatgtataaaataaatattatacaatatacttgtatagcagtttctgcttcacatttgattttttcaaatttaatatttatattagagatctatatatgtataaatatgtattttgtcaaatttgttacttaaatatatagagaccagttttctctggaagtttgtttaaatgacagaagcgtatatgaattcaagaaaatttaagctgcaaaaatgtatttgctataaaatgagaagtctcactgatagaggttctttattgctcattttttaaaaaatggactcttgaaatctgttaaaataaaattgtacatttggaagatgtttcatgatgatgtgtt

SEQ ID NO: 303855 - DNA, 1807 bp, Homo sapiens
ggtaaccacctatctattctttgtcttcatgaaatccaccgtgagtgaaatctcatccacttatgagtgagaacatgcagtatttgtctttctgtgcctggcttatttcactgagcatagtgacatccaggggaactgcatctttaacaacactcacgtgactgactcaggcatgtcatcatgatgtgaactccatgtgggcaggggcctagctagtatcattcactgctgtatgcctggccacatagtagacatcagtgagtgtttgctaaatggatagatgagtggtttgaaagttgaatcaggtggttctcactcacatttaccacagttctgggattgtaaaagcggtggcactgtctcatctgtttacttgtaaagcaataatattttcatattcttttagttcttcctctgtgaagaactgttgctgatctaatgtctcccagctatctggctccaggtaaattctctattttttgtaatgtgttcggtgatttcagaaagctagaaagtgtatgtgtggcatttgttttcactttttaaaacatccctaactgatcgaatatatcagtaatttcagaatcagatgcatcctttcataagaagtgagaggactctgacagccataacaggagtgccacttcatggtgcgaagtgaacactgtagtcttgttgttttcccaaagagaactccgtatgttctcttaggttgagtaacccactctgaattctggttacatgtgtttttctctccctccttaaataaagagaggggttaaacatgccctctaaaagtaggtggttttgaagagaataaattcatcagataacctcaagtcacatgagaatcttagtccatttacattgccttggctagtaaaagccatctatgtatatgtcttacctcatctcctaaaaggcagagtacaaagtaagccatgtatctcaggaaggtaacttcattttgtctatttgctgttgattgtaccaagggatggaagaagtaaatatagctcaggtagcactttatactcaggcagatctcagccctctactgagtcccttagccaagcagtttctttcaaagaagccagcaggcgaaaagcagggactgccactgcatttcatatcacactgttaaaagttgtgttttgaaattttatgtttagttgcacaaattgggccaaagaaacattgccttgaggaagatatgattggaaaatcaagagtgtagaagaataaatactgttttactgtccaaagacatgtttatagtgctctgtaaatgttcctttcctttgtagtctctggcaagatgctttaggaagataaaagtttgaggagaacaaacaggaattctgaattaagcacagagttgaagtttatacccgtttcacatgcttttcaagaatgtcgcaattactaagaagcagataatggtgttttttagaaacctaattgaagtatattcaaccaaatactttaatgtataaaataaatattatacaatatacttgtatagcagtttctgcttcacatttgattttttcaaatttaatatttatattagagatctatatatgtataaatatgtattttgtcaaatttgttacttaaatatatagagaccagttttctctggaagtttgtttaaatgacagaagcgtatatgaattcaagaaaatttaagctgcaaaaatgtatttgctataaaatgagaagtctcactgatagaggttctttattgctcattttttaaaaaatggactcttgaaatctgttaaaataaaattgtacatttgga

SEQ ID NO: 303856 - DNA, 3201 bp, Homo sapiens
  misc_feature (3103)..(3103): n is a, c, g, or t
  misc_feature (3113)..(3113): n is a, c, g, or t
  misc_feature (3116)..(3116): n is a, c, g, or t
  misc_feature (3118)..(3118): n is a, c, g, or t
  misc_feature (3124)..(3124): n is a, c, g, or t
  misc_feature (3137)..(3138): n is a, c, g, or t
acttccgccccgggggcggctcgggccacgcccacctgtcctgcagcactggatgctttgtgagttggggattgttgcgtcccatatctggacccagaagggacttccctgctcggctggctctcggtttctctgctttcctccggagaaataacagcgtcttccgcgccgcgcatggagcctcccggccgccgcgagtgtccctttccttcctggcgctttcctgggttgcttctggcggccatggtgttgctgctgtactccttctccgatgcctgtgaggagccaccaacatttgaagctatggagctcattggtaaaccaaaaccctactatgagattggtgaacgagtagattataagtgtaaaaaaggatacttctatatacctcctcttgccacccatactatttgtgatcggaatcatacatggctacctgtctcagatgacgcctgttatagagaaacatgtccatatatacgggatcctttaaatggccaagcagtccctgcaaatgggacttacgagtttggttatcagatgcactttatttgtaatgagggttattacttaattggtgaagaaattctatattgtgaacttaaaggatcagtagcaatttggagcggtaagcccccaatatgtgaaaaggttttgtgtacaccacctccaaaaataaaaaatggaaaacacacctttagtgaagtagaagtatttgagtatcttgatgcagtaacttatagttgtgatcctgcacctggaccagatccattttcacttattggagagagcacgatttattgtggtgacaattcagtgtggagtcgtgctgctccagagtgtaaagtggtcaaatgtcgatttccagtagtcgaaaatggaaaacagatatcaggatttggaaaaaaattttactacaaagcaacagttatgtttgaatgcgataagggtttttacctcgatggcagcgacacaattgtctgtgacagtaacagtacttgggatcccccagttccaaagtgtcttaaaggtcctaggcctacttacaagcctccagtctcaaattatccaggatatcctaaacctgaggaaggaatacttgacagtttggatgtttgggtcattgctgtgattgttattgccatagttgttggagttgcagtaatttgtgttgtcccgtacagatatcttcaaaggaggaagaagaaagggaaagcagatggtggagctgaatatgccacttaccagactaaatcaaccactccagcagagcagagaggctgaatagattccacaacctggtttgccagttcatcttttgactctattaaaatcttcaatagttgttattctgtagtttcactctcatgagtgcaactgtggcttagctaatattgcaatgtggcttgaatgtaggtagcatcctttgatgcttctttgaaacttgtatgaatttgggtatgaacagattgcctgctttcccttaaataacacttagatttattggaccagtcagcacagcatgcctggttgtattaaagcagggatatgctgtattttataaaattggcaaaattagagaaatatagttcacaatgaaattatattttctttgtaaagaaagtggcttgaaatcttttttgttcaaagattaatgccaactcttaagattattctttcaccaactatagaatgtattttatatatcgttcattgtaaaaagcccttaaaaatatgtgtatactactttggctcttgtgcataaaaacaagaacactgaaaattgggaatatgcacaaacttggcttctttaaccaagaatattattggaaaattctctaaaagttaatagggtaaattctctattttttgtaatgtgttcggtgatttcagaaagctagaaagtgtatgtgtggcatttgttttcactttttaaaacatccctaactgatcgaatatatcagtaatttcagaatcagatgcatcctttcataagaagtgagaggactctgacagccataacaggagtgccacttcatggtgcgaagtgaacactgtagtcttgttgttttcccaaagagaactccgtatgttctcttaggttgagtaacccactctgaattctggttacatgtgtttttctctccctccttaaataaagagaggggttaaacatgccctctaaaagtaggtggttttgaagagaataaattcatcagataacctcaagtcacatgagaatcttagtccatttacattgccttggctagtaaaagccatctatgtatatgtcttacctcatctcctaaaaggcagagtacaaagtaagccatgtatctcaggaaggtaacttcattttgtctatttgctgttgattgtaccaagggatggaagaagtaaatatagctcaggtagcactttatactcaggcagatctcagccctctactgagtcccttagccaagcagtttctttcaaagaagccagcaggcgaaaagcagggactgccactgcatttcatatcacactgttaaaagttgtgttttgaaattttatgtttagttgcacaaattgggccaaagaaacattgccttgaggaagatatgattggaaaatcaagagtgtagaagaataaatactgttttactgtccaaagacatgtttatagtgctctgtaaatgttcctttcctttgtagtctctggcaagatgctttaggaagataaaagtttgaggagaacaaacaggaattctgaattaagcacagagttgaagtttatacccgtttcacatgcttttcaagaatgtcgcaattactaagaagcagataatggtgttttttagaaacctaattgaagtatattcaaccaaatactttaatgtataaaataaatattatacaatatacttgtatagcagtttctgcttcacatttgattttttcaaatttaatatttatattagagatctatatatgtataaatatgtattttgtcaaatttgttacttaaatatatagagaccagttttctctggaagtttgtttaaatgacagaagcgtatatgaattcaagaaaatttaagctgcaaaaggtttggttaangggagtcacngananggctanggcatttaaaggnntgaatgtaaaaattgttgcgggcccaaaaaaaaaaaggggggcgcgaaataaatggggcgaaa

SEQ ID NO: 303857 - DNA, 3143 bp, Homo sapiens
acttccgccccgggggcggctcgggccacgcccacctgtcctgcagcactggatgctttgtgagttggggattgttgcgtcccatatctggacccagaagggacttccctgctcggctggctctcggtttctctgctttcctccggagaaataacagcgtcttccgcgccgcgcatggagcctcccggccgccgcgagtgtccctttccttcctggcgctttcctgggttgcttctggcggccatggtgttgctgctgtactccttctccgatgcctgtgaggagccaccaacatttgaagctatggagctcattggtaaaccaaaaccctactatgagattggtgaacgagtagattataagtgtaaaaaaggatacttctatatacctcctcttgccacccatactatttgtgatcggaatcatacatggctacctgtctcagatgacgcctgttatagagaaacatgtccatatatacgggatcctttaaatggccaagcagtccctgcaaatgggacttacgagtttggttatcagatgcactttatttgtaatgagggttattacttaattggtgaagaaattctatattgtgaacttaaaggatcagtagcaatttggagcggtaagcccccaatatgtgaaaaggttttgtgtacaccacctccaaaaataaaaaatggaaaacacacctttagtgaagtagaagtatttgagtatcttgatgcagtaacttatagttgtgatcctgcacctggaccagatccattttcacttattggagagagcacgatttattgtggtgacaattcagtgtggagtcgtgctgctccagagtgtaaagtggtcaaatgtcgatttccagtagtcgaaaatggaaaacagatatcaggatttggaaaaaaattttactacaaagcaacagttatgtttgaatgcgataagggtttttacctcgatggcagcgacacaattgtctgtgacagtaacagtacttgggatcccccagttccaaagtgtcttaaaggtcctaggcctacttacaagcctccagtctcaaattatccaggatatcctaaacctgaggaaggaatacttgacagtttggatgtttgggtcattgctgtgattgttattgccatagttgttggagttgcagtaatttgtgttgtcccgtacagatatcttcaaaggaggaagaagaaagggaaagcagatggtggagctgaatatgccacttaccagactaaatcaaccactccagcagagcagagaggctgaatagattccacaacctggtttgccagttcatcttttgactctattaaaatcttcaatagttgttattctgtagtttcactctcatgagtgcaactgtggcttagctaatattgcaatgtggcttgaatgtaggtagcatcctttgatgcttctttgaaacttgtatgaatttgggtatgaacagattgcctgctttcccttaaataacacttagatttattggaccagtcagcacagcatgcctggttgtattaaagcagggatatgctgtattttataaaattggcaaaattagagaaatatagttcacaatgaaattatattttctttgtaaagaaagtggcttgaaatcttttttgttcaaagattaatgccaactcttaagattattctttcaccaactatagaatgtattttatatatcgttcattgtaaaaagcccttaaaaatatgtgtatactactttggctcttgtgcataaaaacaagaacactgaaaattgggaatatgcacaaacttggcttctttaaccaagaatattattggaaaattctctaaaagttaatagggtaaattctctattttttgtaatgtgttcggtgatttcagaaagctagaaagtgtatgtgtggcatttgttttcactttttaaaacatccctaactgatcgaatatatcagtaatttcagaatcagatgcatcctttcataagaagtgagaggactctgacagccataacaggagtgccacttcatggtgcgaagtgaacactgtagtcttgttgttttcccaaagagaactccgtatgttctcttaggttgagtaacccactctgaattctggttacatgtgtttttctctccctccttaaataaagagaggggttaaacatgccctctaaaagtaggtggttttgaagagaataaattcatcagataacctcaagtcacatgagaatcttagtccatttacattgccttggctagtaaaagccatctatgtatatgtcttacctcatctcctaaaaggcagagtacaaagtaagccatgtatctcaggaaggtaacttcattttgtctatttgctgttgattgtaccaagggatggaagaagtaaatatagctcaggtagcactttatactcaggcagatctcagccctctactgagtcccttagccaagcagtttctttcaaagaagccagcaggcgaaaagcagggactgccactgcatttcatatcacactgttaaaagttgtgttttgaaattttatgtttagttgcacaaattgggccaaagaaacattgccttgaggaagatatgattggaaaatcaagagtgtagaagaataaatactgttttactgtccaaagacatgtttatagtgctctgtaaatgttcctttcctttgtagtctctggcaagatgctttaggaagataaaaccgtttcacatgcttttcaagaatgtcgcaattactaagaagcagataatggtgttttttagaaacctaattgaagtatattcaaccaaatactttaatgtataaaataaatattatacaatatacttgtatagcagtttctgcttcacatttgattttttcaaatttaatatttatattagagatctatatatgtataaatatgtattttgtcaaatttgttacttaaatatatagagaccagttttctctggaagtttgtttaaatgacagaagcgtatatgaattcaagaaaatttaagctgcaaaaatgtatttgctataaaatgagaagtctcactgatagaggttctttattgctcattttttaaaaaatggactcttgaaatctgttaaaataaaattgtacatttgga

SEQ ID NO: 303858 - DNA, 2889 bp, Homo sapiens
acttccgccccgggggcggctcgggccacgcccacctgtcctgcagcactggatgctttgtgagttggggattgttgcgtcccatatctggacccagaagggacttccctgctcggctggctctcggtttctctgctttcctccggagaaataacagcgtcttccgcgccgcgcatggagcctcccggccgccgcgagtgtccctttccttcctggcgctttcctgggttgcttctggcggccatggtgttgctgctgtactccttctccgatgcctgtgaggagccaccaacatttgaagctatggagctcattggtaaaccaaaaccctactatgagattggtgaacgagtagattataagtgtaaaaaaggatacttctatatacctcctcttgccacccatactatttgtgatcggaatcatacatggctacctgtctcagatgacgcctgttatagagaaacatgtccatatatacgggatcctttaaatggccaagcagtccctgcaaatgggacttacgagtttggttatcagatgcactttatttgtaatgagggttattacttaattggtgaagaaattctatattgtgaacttaaaggatcagtagcaatttggagcggtaagcccccaatatgtgaaaaggttttgtgtacaccacctccaaaaataaaaaatggaaaacacacctttagtgaagtagaagtatttgagtatcttgatgcagtaacttatagttgtgatcctgcacctggaccagatccattttcacttattggagagagcacgatttattgtggtgacaattcagtgtggagtcgtgctgctccagagtgtaaagtggtcaaatgtcgatttccagtagtcgaaaatggaaaacagatatcaggatttggaaaaaaattttactacaaagcaacagttatgtttgaatgcgataagggtttttacctcgatggcagcgacacaattgtctgtgacagtaacagtacttgggatcccccagttccaaagtgtcttaaaggtcctaggcctacttacaagcctccagtctcaaattatccaggatatcctaaacctgaggaaggaatacttgacagtttggatgtttgggtcattgctgtgattgttattgccatagttgttggagttgcagtaatttgtgttgtcccgtacagatatcttcaaaggaggaagaagaaagggaaagcagatggtggagctgaatatgccacttaccagactaaatcaaccactccagcagagcagagaggctgaatagattccacaacctggtttgccagttcatcttttgactctattaaaatcttcaatagttgttattctgtagtttcactctcatgagtgcaactgtggcttagctaatattgcaatgtggcttgaatgtaggtagcatcctttgatgcttctttgaaacttgtatgaatttgggtatgaacagattgcctgctttcccttaaataacacttagatttattggaccagtcagcacagcatgcctggttgtattaaagcagggatatgctgtattttataaaattggcaaaattagagaaatatagttcacaatgaaattatattttctttgtaaagaaagtggcttgaaatcttttttgttcaaagattaatgccaactcttaagattattctttcaccaactatagaatgtattttatatatcgttcattgtaaaaagcccttaaaaatatgtgtatactactttggctcttgtgcataaaaacaagaacactgaaaattgggaatatgcacaaacttggcttctttaaccaagaatattattggaaaattctctaaaagttaatagggtaaattctctattttttgtaatgtgttcggtgatttcagaaagctagaaagtgtatgtgtggcatttgttttcactttttaaaacatccctaactgatcgaatatatcagtaatttcagaatcagatgcatcctttcataagaagtgagaggactctgacagccataacaggagtgccacttcatggtgcgaagtgaacactgtagtcttgttgttttcccaaagagaactccgtatgttctcttaggttgagtaacccactctgaattctggttacatgtgtttttctctccctccttaaataaagagaggggttaaacatgccctctaaaagtaggtggttttgaagagaataaattcatcagataacctcaagtcacatgagaatcttagtccatttacattgccttggctagtaaaagccatctatgtatatgtcttacctcatctcctaaaaggcagagtacaaagtaagccatgtatctcaggaaggtaacttcattttgtctatttgctgttgattgtaccaagggatggaagaagtaaatatagctcaggtagcactttatactcaggcagatctcagccctctactgagtcccttagccaagcagtttctttcaaagaagccagcaggcgaaaagcagggactgccactgcatttcatatcacactgttaaaagttgtgttttgaaattttatgtttagttgcacaaattgggccaaagaaacattgccttgaggaagatatgattggaaaatcaagagtgtagaagaataaatactgttttactgtccaaagacatgtttatagtgctctgtaaatgttcctttcctttgtagtctctggcaagatgctttaggaagataaaatttgaggtatccgtgagggccctcacggattacctcaaacaatctgcctttacttgctgcagccaaaactaaagtcgtctagattcccctctcccatttcttcacttcttctagctccttaacaccactggtccaattctgcccaacaatttgggaaaatca

SEQ ID NO: 303859 - DNA, 2644 bp, Homo sapiens
acttccgccccgggggcggctcgggccacgcccacctgtcctgcagcactggatgctttgtgagttggggattgttgcgtcccatatctggacccagaagggacttccctgctcggctggctctcggtttctctgctttcctccggagaaataacagcgtcttccgcgccgcgcatggagcctcccggccgccgcgagtgtccctttccttcctggcgctttcctgggttgcttctggcggccatggtgttgctgctgtactccttctccgatgcctgtgaggagccaccaacatttgaagctatggagctcattggtaaaccaaaaccctactatgagattggtgaacgagtagattataagtgtaaaaaaggatacttctatatacctcctcttgccacccatactatttgtgatcggaatcatacatggctacctgtctcagatgacgcctgttatagagaaacatgtccatatatacgggatcctttaaatggccaagcagtccctgcaaatgggacttacgagtttggttatcagatgcactttatttgtaatgagggttattacttaattggtgaagaaattctatattgtgaacttaaaggatcagtagcaatttggagcggtaagcccccaatatgtgaaaaggttttgtgtacaccacctccaaaaataaaaaatggaaaacacacctttagtgaagtagaagtatttgagtatcttgatgcagtaacttatagttgtgatcctgcacctggaccagatccattttcacttattggagagagcacgatttattgtggtgacaattcagtgtggagtcgtgctgctccagagtgtaaagtggtcaaatgtcgatttccagtagtcgaaaatggaaaacagatatcaggatttggaaaaaaattttactacaaagcaacagttatgtttgaatgcgataagggtttttacctcgatggcagcgacacaattgtctgtgacagtaacagtacttgggatcccccagttccaaagtgtcttaaaggtcctaggcctacttacaagcctccagtctcaaattatccaggatatcctaaacctgaggaaggaatacttgacagtttggatgtttgggtcattgctgtgattgttattgccatagttgttggagttgcagtaatttgtgttgtcccgtacagatatcttcaaaggaggaagaagaaagggaaagcagatggtggagctgaatatgccacttaccagactaaatcaaccactccagcagagcagagaggctgaatagattccacaacctggtttgccagttcatcttttgactctattaaaatcttcaatagttgttattctgtagtttcactctcatgagtgcaactgtggcttagctaatattgcaatgtggcttgaatgtaggtagcatcctttgatgcttctttgaaacttgtatgaatttgggtatgaacagattgcctgctttcccttaaataacacttagatttattggaccagtcagcacagcatgcctggttgtattaaagcagggatatgctgtattttataaaattggcaaaattagagaaatatagttcacaatgaaattatattttctttgtaaagaaagtggcttgaaatcttttttgttcaaagattaatgccaactcttaagattattctttcaccaactatagaatgtattttatatatcgttcattgtaaaaagcccttaaaaatatgtgtatactactttggctcttgtgcataaaaacaagaacactgaaaattgggaatatgcacaaacttggcttctttaaccaagaatattattggaaaattctctaaaagttaatagggtaaattctctattttttgtaatgtgttcggtgatttcagaaagctagaaagtgtatgtgtggcatttgttttcactttttaaaacatccctaactgatcgaatatatcagtaatttcagaatcagatgcatcctttcataagaagtgagaggactctgacagccataacaggagtgccacttcatggtgcgaagtgaacactgtagtcttgttgttttcccaaagagaactccgtatgttctcttaggttgagtaacccactctgaattctggttacatgtgtttttctctccctccttaaataaagagaggggttaaacatgccctctaaaagtaggtggttttgaagagaataaattcatcagataacctcaagtcacatgagaatcttagtccatttacattgccttggctagtaaaagccatctatgtatatgtcttacctcatctcctaaaaggcagagtacaaagtaagccatgtatctcaggaaggtaacttcattttgtctatttgctgttgattgtaccaagggatggaagaagtaaatatagctcaggtagcactttatactcaggcagatctcagccctctactgagtcccttagccaagcagtttctttcaaagaagccagttttatgttaagtgcacaatttggccaaagaacattgctttgagagattgatggaaatcaagatgtgaagaataatctgtttactgccaagaatgttatagtgcttgtaatgtcctttccttgaagcttggcagatgtttaggaggataagtttggg

SEQ ID NO: 303860 - DNA, 930 bp, Homo sapiens
ctcaatacgtctcataagaacgtgcaagaggttacaaattagacaactgtgtcctcagggagaagctaagatctctgtctgtagactactattcgactcgtcgatcgtccaccggatgatcccacaggaggtatatctcatgtagtcgatctgcctcagtcagatctgagacctctaccgtgcagttcccttaggctaagtgacttgtctatacacccgtcaggcgaaaagcagggactgccactgcatttcatatcacactgttaaaagttgtgttttgaaattttatgtttagttgcacaaattgggccaaagaaacattgccttgaggaagatatgattggaaaatcaagagtgtagaagaataaatactgttttactgtccaaagacatgtttatagtgctctgtaaatgttcctttcctttgtagtctctggcaagatgctttaggaagataaaagtttgaggagaacaaacaggaattctgaattaagcacagagttgaagtttatacccgtttcacatgcttttcaagaatgtcgcaattactaagaagcagataatggtgttttttagaaacctaattgaagtatattcaaccaaatactttaatgtataaaataaatattatacaatatacttgtatagcagtttctgcttcacatttgattttttcaaatttaatatttatattagagatctatatatgtataaatatgtattttgtcaaatttgttacttaaatatatagagaccagttttctctggaagtttgtttaaatgacagaagcgtatatgaattcaagaaaatttaagctgcaaaaatgtatttgctataaaatgagaagtctcactgatagaggttctttattgctcattttttaaaaaatggactcttgaaatctgttaaaataaaattgtacatttgga

SEQ ID NO: 303861 - DNA, 2387 bp, Homo sapiens
acttccgccccgggggcggctcgggccacgcccacctgtcctgcagcactggatgctttgtgagttggggattgttgcgtcccatatctggacccagaagggacttccctgctcggctggctctcggtttctctgctttcctccggagaaataacagcgtcttccgcgccgcgcatggagcctcccggccgccgcgagtgtccctttccttcctggcgctttcctgggttgcttctggcggccatggtgttgctgctgtactccttctccgatgcctgtgaggagccaccaacatttgaagctatggagctcattggtaaaccaaaaccctactatgagattggtgaacgagtagattataagtgtaaaaaaggatacttctatatacctcctcttgccacccatactatttgtgatcggaatcatacatggctacctgtctcagatgacgcctgttatagagaaacatgtccatatatacgggatcctttaaatggccaagcagtccctgcaaatgggacttacgagtttggttatcagatgcactttatttgtaatgagggttattacttaattggtgaagaaattctatattgtgaacttaaaggatcagtagcaatttggagcggtaagcccccaatatgtgaaaaggttttgtgtacaccacctccaaaaataaaaaatggaaaacacacctttagtgaagtagaagtatttgagtatcttgatgcagtaacttatagttgtgatcctgcacctggaccagatccattttcacttattggagagagcacgatttattgtggtgacaattcagtgtggagtcgtgctgctccagagtgtaaagtggtcaaatgtcgatttccagtagtcgaaaatggaaaacagatatcaggatttggaaaaaaattttactacaaagcaacagttatgtttgaatgcgataagggtttttacctcgatggcagcgacacaattgtctgtgacagtaacagtacttgggatcccccagttccaaagtgtcttaaaggtacaaaggttatcttttttctgtcttggtttgttattgttgttgctgttcattttagactttatttctttgatattaactatcagtcatacaaaataactgaaaagaaacaattttagtatttaactctgtcttgtattcatttctatgccagatgaatgacacgaaattcacataaaattctgctgttgtgattttttgtgcttttccagggttcttagcacgttatgtacattgcatgggtatatgcttttaatatttttatgtataaaaagtgaattacaacaactttttggaattgaaacatgggcatttttatctaagtaagtcaacaatggcataattcatataaatgaaatgagagcaataactcccaagtggttgatcttctaacattattttgtttcctagtgctgcctccatctagtacaaaacctccagctttgagtcattcaggtttagtagcttcttccttatatgtcttcttccttatatgttacaagatataaggaattcctggagaaattgccagcaataactcccaagtgtttggtccaatctacattattattttgttttccagtgtcgacttcttccactacaaaatctccagcgtccagtgcctcaggatatcctaaacctgaggaaggaatacttgacagtttggatgtttgggtcattgctgtgattgttattgccatagttgttggagttgcagtaatttgtgttgtcccgtacagatatcttcaaaggaggaagaagaaagggaaagcagatggtggagctgaatatgccacttaccagactaaatcaaccactccagcagagcagagaggctgaatagattccacaacctgtctctggcaagatgctttaggaagataaaagtttgaggagaacaaacaggaattctgaattaagcacagagttgaagtttatacccgtttcacatgcttttcaagaatgtcgcaattactaagaagcagataatggtgttttttagaaacctaattgaagtatattcaaccaaatactttaatgtataaaataaatattatacaatatacttgtatagcagtttctgcttcacatttgattttttcaaatttaatatttatattagagatctatatatgtataaatatgtattttgtcaaatttgttacttaaatatatagagaccagttttctctggaagtttgtttaaatgacagaagcgtatatgaattcaagaaaatttaagctgcaaaaatgtatttgctataaaatgagaagtctcactgatagaggttctttattgctcattttttaaaaaatggactcttgaaatctgttaaaataaaattgtacatttgga

SEQ ID NO: 303862 - DNA, 1766 bp, Homo sapiens
  misc_feature (1733)..(1733): n is a, c, g, or t
acttccgccccgggggcggctcgggccacgcccacctgtcctgcagcactggatgctttgtgagttggggattgttgcgtcccatatctggacccagaagggacttccctgctcggctggctctcggtttctctgctttcctccggagaaataacagcgtcttccgcgccgcgcatggagcctcccggccgccgcgagtgtccctttccttcctggcgctttcctgggttgcttctggcggccatggtgttgctgctgtactccttctccgatgcctgtgaggagccaccaacatttgaagctatggagctcattggtaaaccaaaaccctactatgagattggtgaacgagtagattataagtgtaaaaaaggatacttctatatacctcctcttgccacccatactatttgtgatcggaatcatacatggctacctgtctcagatgacgcctgttatagagaaacatgtccatatatacgggatcctttaaatggccaagcagtccctgcaaatgggacttacgagtttggttatcagatgcactttatttgtaatgagggttattacttaattggtgaagaaattctatattgtgaacttaaaggatcagtagcaatttggagcggtaagcccccaatatgtgaaaaggttttgtgtacaccacctccaaaaataaaaaatggaaaacacacctttagtgaagtagaagtatttgagtatcttgatgcagtaacttatagttgtgatcctgcacctggaccagatccattttcacttattggagagagcacgatttattgtggtgacaattcagtgtggagtcgtgctgctccagagtgtaaagtggtcaaatgtcgatttccagtagtcgaaaatggaaaacagatatcaggatttggaaaaaaattttactacaaagcaacagttatgtttgaatgcgataagggtttttacctcgatggcagcgacacaattgtctgtgacagtaacagtacttgggatcccccagttccaaagtgtcttaaaggtcctaggcctacttacaagcctccagtctcaaattatccaggatatcctaaacctgaggaaggaatacttgacagtttggatgtttgggtcattgctgtgattgttattgccatagttgttggagttgcagtaatttgtgttgtcccgtacagatatcttcaaaggaggaagaagaaagggaaagcagatggtggagctgaatatgccacttaccagactaaatcaaccactccagcagagcagagaggctgaatagattccacaacctggtttgccagttcatcttttgactctattaaaatcttcaatagttgttattctgtagtttcactctcatgagtgcaactgtggcttagctaatattgcaatgtggcttgaatgtaggtagcatcctttgatgcttctttgaaacttgtatgaatttgggtatgaacagattgcctgctttcccttaaataacacttagatttattggaccagtcagcacagcatgcctggttgtattaaagcagggatatgctgtattttataaaattggcaaaattagagaaatatagttcacaatgaaattatattttctttgtaaagaaagtggcttgaaatcttttttgttcaaagattaatgccaactcttaagattattctttcaccaactatagaatgtattttatatatcgttcattgtaaaaagccacggtaanccacggtcaacccacaagccacggtcaacccac

SEQ ID NO: 303863 - DNA, 2117 bp, Homo sapiens
acttccgccccgggggcggctcgggccacgcccacctgtcctgcagcactggatgctttgtgagttggggattgttgcgtcccatatctggacccagaagggacttccctgctcggctggctctcggtttctctgctttcctccggagaaataacagcgtcttccgcgccgcgcatggagcctcccggccgccgcgagtgtccctttccttcctggcgctttcctgggttgcttctggcggccatggtgttgctgctgtactccttctccgatgcctgtgaggagccaccaacatttgaagctatggagctcattggtaaaccaaaaccctactatgagattggtgaacgagtagattataagtgtaaaaaaggatacttctatatacctcctcttgccacccatactatttgtgatcggaatcatacatggctacctgtctcagatgacgcctgttatagagaaacatgtccatatatacgggatcctttaaatggccaagcagtccctgcaaatgggacttacgagtttggttatcagatgcactttatttgtaatgagggttattacttaattggtgaagaaattctatattgtgaacttaaaggatcagtagcaatttggagcggtaagcccccaatatgtgaaaaggttttgtgtacaccacctccaaaaataaaaaatggaaaacacacctttagtgaagtagaagtatttgagtatcttgatgcagtaacttatagttgtgatcctgcacctggaccagatccattttcacttattggagagagcacgatttattgtggtgacaattcagtgtggagtcgtgctgctccagagtgtaaagtggtcaaatgtcgatttccagtagtcgaaaatggaaaacagatatcaggatttggaaaaaaattttactacaaagcaacagttatgtttgaatgcgataagggtttttacctcgatggcagcgacacaattgtctgtgacagtaacagtacttgggatcccccagttccaaagtgtcttaaaggtacaaaggttatcttttttctgtcttggtttgttattgttgttgctgttcattttagactttatttctttgatattaactatcagtcatacaaaataactgaaaagaaacaattttagtatttaactctgtcttgtattcatttctatgccagatgaatgacacgaaattcacataaaattctgctgttgtgattttttgtgcttttccagggttcttagcacgttatgtacattgcatgggtatatgcttttaatatttttatgtataaaaagtgaattacaacaactttttggaattgaaacatgggcatttttatctaagtaagtcaacaatggcataattcatataaatgaaatgagagcaataactcccaagtggttgatcttctaacattattttgtttcctagtgctgcctccatctagtacaaaacctccagctttgagtcattcaggtttagtagcttcttccttatatgtcttcttccttatatgttacaagatataaggaattcctggagaaattgccagcaataactcccaagtgtttggtccaatctacattattattttgttttccagtgtcgacttcttccactacaaaatctccagcgtccagtgcctcagaggtttagtaatttcctgcttatagtttttcaaaaatcctttaaattcctggtgattttttataaaatccttcaaatttctggtgatgttcacttatttttagtaatgaaaggagggaggacatttgtatagccattttagttgttatacatagtgattctaaaattatttgccataatctgatataaacaggaatatgaccttgggaaagttgtataaattttgaatgtgtttatatatatatgtttacattatatatagagaaattgatttagtaccttccttattgggtattagtaaggtataagtgggatgcatttaaagcacttagcacagtgcctggtgtagagaaagctcttagagctagccaatatgacttatcctacacttaaattaatgttagggaaggggaaggttcatgtatgtttgttagtatgtgtgtgtgttaatatgttaata

SEQ ID NO: 303864 - DNA, 1149 bp, Homo sapiens
acttccgccccgggggcggctcgggccacgcccacctgtcctgcagcactggatgctttgtgagttggggattgttgcgtcccatatctggacccagaagggacttccctgctcggctggctctcggtttctctgctttcctccggagaaataacagcgtcttccgcgccgcgcatggagcctcccggccgccgcgagtgtccctttccttcctggcgctttcctgggttgcttctggcggccatggtgttgctgctgtactccttctccgatgcctgtgaggagccaccaacatttgaagctatggagctcattggtaaaccaaaaccctactatgagattggtgaacgagtagattataagtgtaaaaaaggatacttctatatacctcctcttgccacccatactatttgtgatcggaatcatacatggctacctgtctcagatgacgcctgttatagagaaacatgtccatatatacgggatcctttaaatggccaagcagtccctgcaaatgggacttacgagtttggttatcagatgcactttatttgtaatgagggttattacttaattggtgaagaaattctatattgtgaacttaaaggatcagtagcaatttggagcggtaagcccccaatatgtgaaaaggttttgtgtacaccacctccaaaaataaaaaatggaaaacacacctttagtgaagtagaagtatttgagtatcttgatgcagtaacttatagttgtgatcctgcacctggaccagatccattttcacttattggagagagcacgatttattgtggtgacaattcagtgtggagtcgtgctgctccagagtgtaaagtggtcaaatgtcgatttccagtagtcgaaaatggaaaacagatatcaggatttggaaaaaaattttactacaaagcaacagttatgtttgaatgcgataagggtttttacctcgatggcagcgacacaattgtctgtgacagtaacagtacttgggatcccccagttccaaagtgtcttaaaggtcctaggcctacttacaagcctccagtctcaaattatccagatatcctataacctgaggaaggaactagctagacagtttgatgttttgagagtcagtttcctctgattgttaaatgc

SEQ ID NO: 303865 - DNA, 1275 bp, Homo sapiens
acttccgccccgggggcggctcgggccacgcccacctgtcctgcagcactggatgctttgtgagttggggattgttgcgtcccatatctggacccagaagggacttccctgctcggctggctctcggtttctctgctttcctccggagaaataacagcgtcttccgcgccgcgcatggagcctcccggccgccgcgagtgtccctttccttcctggcgctttcctgggttgcttctggcggccatggtgttgctgctgtactccttctccgatgcctgtgaggagccaccaacatttgaagctatggagctcattggtaaaccaaaaccctactatgagattggtgaacgagtagattataagtgtaaaaaaggatacttctatatacctcctcttgccacccatactatttgtgatcggaatcatacatggctacctgtctcagatgacgcctgttatagagaaacatgtccatatatacgggatcctttaaatggccaagcagtccctgcaaatgggacttacgagtttggttatcagatgcactttatttgtaatgagggttattacttaattggtgaagaaattctatattgtgaacttaaaggatcagtagcaatttggagcggtaagcccccaatatgtgaaaaggttttgtgtacaccacctccaaaaataaaaaatggaaaacacacctttagtgaagtagaagtatttgagtatcttgatgcagtaacttatagttgtgatcctgcacctggaccagatccattttcacttattggagagagcacgatttattgtggtgacaattcagtgtggagtcgtgctgctccagagtgtaaaggtagtgtttcaatttatttccttcttcatttgtaaatactatggaaacattttgtaaatagtttcatctacagataaacaaagcaggtgtatgtgcttcctcctcctgtataattggtttctaatttattttaattcaggtcaattcaagtcaaaaaatagttctagctagagttccctatttctcacccctacatgttcttggcatttcattttatacagtgtgaactactgtgtacctgcatgagttagaagtttttgtttgaaagaaccaaaaaaaaaaaatacacactggcttaaagaaagtttcatcttgtattacaagaaatctaagagttctggctatggtagtggtaaactgtgacagactaatcgtcttcaccatccctagagtgatagctcagggccatgagtacgatcactgccctt

SEQ ID NO: 303866 - DNA, 785 bp, Homo sapiens
acttccgccccgggggcggctcgggccacgcccacctgtcctgcagcactggatgctttgtgagttggggattgttgcgtcccatatctggacccagaagggacttccctgctcggctggctctcggtttctctgctttcctccggagaaataacagcgtcttccgcgccgcgcatggagcctcccggccgccgcgagtgtccctttccttcctggcgctttcctgggttgcttctggcggccatggtgttgctgctgtactccttctccgatgcctgtgaggagccaccaacatttgaagctatggagctcattggtaaaccaaaaccctactatgagattggtgaacgagtagattataagtgtaaaaaaggatacttctatatacctcctcttgccacccatactatttgtgatcggaatcatacatggctacctgtctcagatgacgcctgttatagagaaacatgtccatatatacgggatcctttaaatggccaagcagtccctgcaaatgggacttacgagtttggttatcagatgcactttatttgtaatgagggttattacttaattggtgaagaaattctatattgtgaacttaaaggatcagtagcaatttggagcggtaagcccccaatatgtgaaaggatttgagatcttgtgcagaactatagtgggacctgacctggacagatcattttactattgagagagacgattattgtgtgacaatcatgtggggcggctgctcccaagaaagaggcgtgtttcagagtcgatgg

SEQ ID NO: 303867 - DNA, 588 bp, Homo sapiens
acttccgccccgggggcggctcgggccacgcccacctgtcctgcagcactggatgctttgtgagttggggattgttgcgtcccatatctggacccagaagggacttccctgctcggctggctctcggtttctctgctttcctccggagaaataacagcgtcttccgcgccgcgcatggagcctcccggccgccgcgagtgtccctttccttcctggcgctttcctgggttgcttctggcggccatggtgttgctgctgtactccttctccgatgcctgtgaggagccaccaacatttgaagctatggagctcattggtaaaccaaaaccctactatgagattggtgaacgagtagattataagtgtaaaaaaggatacttctatatacctcctcttgccacccatactatttgtgatcggaatcatacatggctacctgtctcagatgacgcctgttatagagaaacatgtccatatatacgggatcctttaaatggccaagcagtccctgcaaatgggacttacgagtttggttatcagatgcactttatttgtaatgagggttattacttaattgttagaggaaat

SEQ ID NO: 303868 - DNA, 1850 bp, Homo sapiens
  misc_feature (1832)..(1832): n is a, c, g, or t
tagcaactccaagctgctcacaactgaaaggcaggaaaagtccttatttactgaaataaaatagaagacttttgcagggactcctggtcaaccactgtgcttatgactggagagattattttgatatgatggaaggaattatcctgatttcagcactaccatctctggtttcactttgcttccagcagaagcaagagacaatagtaattgtgggtagcacttcagtctgggcagactgtgcttagttaacatcatttctgtggtcttcagtttccctttagtataatgtgagtgttgaactgaaatctcaatcactggcttctaatttggttatatatttcctatctccctaatattttaaaggatcgaagagaattatgcatgttaacatagtaattaagataccttcttataggctgggtggggtagctcacacctgtaataccagaactttgggaggccgaggtgggtggatcacgaggtcagaagttcaagaccagcctggctaagttggtgaaaccccatctctactaaaaatacaaaaattagcggggtgcggtggcaggcacttgtaatcccagctgctcgggaggccgaggcaggagaatcgcttgaacccagtgggcagaggttgcagtgagccaagatcatgccactgcactccagcctgggtgacagagtgagactctgtctcaaaacaaaaaccttcttataattcctgtaagagcttggtaactggtagcctcctgagttgagtgctgtagggtttgaggggcaggaagagatgagttttttagtggactgatacatgagcaaaacaagattgcatgtgaaatttatactcagtgaggcatccgggcttaactcacatgctcctagtgggtatatgcactaatactacgtttgttgatacagtcttttgaaagagttgatgataagcatttcataaagtatttataaaacactggtatagcttagtgttggagagcagaagagagaattgcttgggattgtcaatgatttcttatcatctgctagaggaagacttaataacaacatcatgatgttaaggtagatctaaatgtgttaacaagaagaaaagttgaggaagtcctaagtggaaaagagaaagatgtaaattatgtagtatcatactacttacagtttttaaaaagatacatatgtttaccccaagcacattccctttttttttttttgagacagagtcttgctctgtcacccaggatggcgtgcagtggcgcggtcttggctcactgcaacctccgcctcccgggttcaagcggttctcctgccacctcagactcccaagtagctggtattacaggcacccgccactatgccggctagttttttgtgtttttagtagagacggggtttctccatgatggcctggctagtctcgaactcctgacctcaagtgattcacctgcctcggcctcccacagtgctgggattacaggcgtgagccaccacacccatcctcacattactttcatgatggttatcttctaagatttccattataaaatacagagtgtggtgagcattcttgtacatacatcttacatacttgtgcaaatatatatgtaggttaaattctaagatgtggaattgcaaagtttgtaaagtgtgtagttttcatttgataaacttaaaaaatcaatatcaaaattaaagtcataattttatattgataaggccctggtgaattataaaatcaaacttatttttcttatccaggatatcctcctgaggaaggtacttgacagtttggatgtttgggtcattgctgtgattgttattgccatagntgttggagttgcgttttg

SEQ ID NO: 303869 - DNA, 2236 bp, Homo sapiens
tagcaactccaagctgctcacaactgaaaggcaggaaaagtccttatttactgaaataaaatagaagacttttgcagggactcctggtcaaccactgtgcttatgactggagagattattttgatatgatggaaggaattatcctgatttcagcactaccatctctggtttcactttgcttccagcagaagcaagagacaatagtaattgtgggtagcacttcagtctgggcagactgtgcttagttaacatcatttctgtggtcttcagtttccctttagtataatgtgagtgttgaactgaaatctcaatcactggcttctaatttggttatatatttcctatctccctaatattttaaaggatcgaagagaattatgcatgttaacatagtaattaagataccttcttataggctgggtggggtagctcacacctgtaataccagaactttgggaggccgaggtgggtggatcacgaggtcagaagttcaagaccagcctggctaagttggtgaaaccccatctctactaaaaatacaaaaattagcggggtgcggtggcaggcacttgtaatcccagctgctcgggaggccgaggcaggagaatcgcttgaacccagtgggcagaggttgcagtgagccaagatcatgccactgcactccagcctgggtgacagagtgagactctgtctcaaaacaaaaaccttcttataattcctgtaagagcttggtaactggtagcctcctgagttgagtgctgtagggtttgaggggcaggaagagatgagttttttagtggactgatacatgagcaaaacaagattgcatgtgaaatttatactcagtgaggcatccgggcttaactcacatgctcctagtgggtatatgcactaatactacgtttgttgatacagtcttttgaaagagttgatgataagcatttcataaagtatttataaaacactggtatagcttagtgttggagagcagaagagagaattgcttgggattgtcaatgatttcttatcatctgctagaggaagacttaataacaacatcatgatgttaaggtagatctaaatgtgttaacaagaagaaaagttgaggaagtcctaagtggaaaagagaaagatgtaaattatgtagtatcatactacttacagtttttaaaaagatacatatgtttaccccaagcacattccctttttttttttttgagacagagtcttgctctgtcacccaggatggcgtgcagtggcgcggtcttggctcactgcaacctccgcctcccgggttcaagcggttctcctgccacctcagactcccaagtagctggtattacaggcacccgccactatgccggctagttttttgtgtttttagtagagacggggtttctccatgatggcctggctagtctcgaactcctgacctcaagtgattcacctgcctcggcctcccacagtgctgggattacaggcgtgagccaccacacccatcctcacattactttcatgatggttatcttctaagatttccattataaaatacagagtgtggtgagcattcttgtacatacatcttacatacttgtgcaaatatatatgtaggttaaattctaagatgtggaattgcaaagtttgtaaagtgtgtagttttcatttgataaacttaaaaaatcaatatcaaaattaaagtcataattttatattgataaggccctggtgaattataaaatcaaacttatttttcgtcctaggcctacttacaagcctccagtctcaaattatccaggatatcctaaacctgaggaaggaatacttgacagtttgggttggtatagctatcatgacaaatataagtggtagtatgtgtagaaacgtgtaggtaattagtttttatgaggtgcccaaacataggatccttggtagggtaagataactttcttaaatgctgtgtttgtatgtaggttaaaatatataaaacacaattttctttccacattatattgttattttgtgatggtaatctgtcgataaattttctttctattcatatcttatatacatgaaccttaaagcaatctaagttgggtttattttttctgtaacacgctgatttaacacacttgatgtaggcttacgcagtttacacaatgcatgttaaaaaaaaagatgaagtgcagttgtgatataggccaatgaaaaataaagatttcttaataagtaaaaacaa

SEQ ID NO: 303870 - DNA, 1444 bp, Homo sapiens
tagcaactccaagctgctcacaactgaaaggcaggaaaagtccttatttactgaaataaaatagaagacttttgcagggactcctggtcaaccactgtgcttatgactggagagattattttgatatgatggaaggaattatcctgatttcagcactaccatctctggtttcactttgcttccagcagaagcaagagacaatagtaattgtgggtagcacttcagtctgggcagactgtgcttagttaacatcatttctgtggtcttcagtttccctttagtataatgtgagtgttgaactgaaatctcaatcactggcttctaatttggttatatatttcctatctccctaatattttaaaggatcgaagagaattatgcatgttaacatagtaattaagataccttcttataggctgggtggggtagctcacacctgtaataccagaactttgggaggccgaggtgggtggatcacgaggtcagaagttcaagaccagcctggctaagttggtgaaaccccatctctactaaaaatacaaaaattagcggggtgcggtggcaggcacttgtaatcccagctgctcgggaggccgaggcaggagaatcgcttgaacccagtgggcagaggttgcagtgagccaagatcatgccactgcactccagcctgggtgacagagtgagactctgtctcaaaacaaaaaccttcttataattcctgtaagagcttggtaactggtagcctcctgagttgagtgctgtagggtttgaggggcaggaagagatgagttttttagtggactgatacatgagcaaaacaagattgcatgtgaaatttatactcagtgaggcatccgggcttaactcacatgctcctagtgggtatatgcactaatactacgtttgttgatacagtcttttgaaagagttgatgataagcatttcataaagtatttataaaacactggtatagcttagtgttggagagcagaagagagaattgcttgggattgtcaatgatttcttatcatctgctagaggaagacttaataacaacatcatgatgttaaggtagatctaaatgtgttaacaagaagaaaagttgaggaagtcctaagtggaaaagagaaagatgtaaattatgtagtatcatactacttacagtttttaaaaagatacatatgtttaccccaagcacattccctttttttttttttgagacagagtcttgctctgtcacccaggatggcgttgcagtgagccaagatcatgccactgcactccagcctgggtgacagagtgagactctgtctcaaaacaaaaccttcttataattcctgtaagagcttggtaactggtagcctcctgagttgagtgctgtaggtttgaggggcaggaagagatgagttttttagtggacggatacatgacacgactgagtcca

SEQ ID NO: 303871 - DNA, 429 bp, Homo sapiens
tggccgtccgcaaagtgctcagatacagccatgcagaacgcgtgactaacatatacacggacacgcacgagagcagggccacgcccacctgtcctgcagcactggatgctttatgcctgtgaggagccaccaacatttgaagctatggagctcattggtaaaccaaaaccctactatgagattggtgaacgagtagattataagtgtaaaaaaggatacttctatatacctcctcttgccacccatactatttgtgatcggaatcatacatggctacctgtctcagatgacgcctgttatagagaaacatgtccatatatacgggatcctttaaatggccaagcagtccctgcaaatgggacttacgagtttggttatcagatgcactttatttgtaatgagggttattacttaattgttagaggaaat

SEQ ID NO: 303872 - DNA, 345 bp, Homo sapiens
atagcaaagagtctggatggaatataaatgtgtaggtgcttaaataacatttgaccactgaaatgtaaccaacatttatttcttctgctagatgttgaatcttggtgattagttttcagaattatatgtcatttgtttcctggtttcttatagttgttggagttgcagtaatttgtgttgtcccgtacagatatcttcaaaggaggaagaagaaagggtaaattaaagcatgtttcttttaacttcttggtccttcttatacttaacatgcttttgtgcagcttcagtttgtaatctgtattgcatgctatctttttttttttaaaaaaaaatgcctgcattagt

SEQ ID NO: 303873 - DNA, 857 bp, Homo sapiens
gcgtggcataagggtctgtatgaaaatgtttctcctggcatgccccagaatggttcatttatgactttcagcattttgatcacctgattccccatttctcctgcggagaaaagtggtattaaaagtatttggacataaaattcatcttgcaagccgctgttgtgctgatgagtaataaagtgtcaaaaggatgctgaggaaagagcttcttaatatagaccatgcctgagaggcaccggtagggcgataacaagccctttcttctgatttcctccctggggccaaagggattttgaaaggcagaaggcaaagacttgagaatgagattcctcaggcttcccttgtgaggctgcctgggttctgccgctgggtggtttgggatgtccaagagatatcccctttcagccagtgactcggtcctcagttgctgctccggaaagacgctggggctgggaagggccctgtgtcctctggctttaaaatgggcaatgctattgaaaaacagaagcccttgaaacgaagtcatctgtacccctggaaacaaggtaagaaagccctgggcttcctttccaggaagaagcaaggaggcagttttctctgagagactggcccagcagcagagctgaagtgcctggggaatcaccttccagagcagaaagcacaggtagtccaacatgatttcaagaaaattcacaattctcctgaggaataagatgattcctctctcaatatgatggcttggtttggctgagagtttagttcagctcgagatgtttcatttggtgcagtatgtgtctgttgaaaatttttattttttttgaaatggagcctgggtgacagagtgaaactgtctcaaa

SEQ ID NO: 303874 - DNA, 775 bp, Homo sapiens
gcgtggcataagggtctgtatgaaaatgtttctcctggcatgccccagaatggttcatttatgactttcagcattttgatcacctgattccccatttctcctgcggagaaaagtggtattaaaagtatttggacataaaattcatcttgcaagccgctgttgtgctgatgagtaataaagtgtcaaaaggatgctgaggaaagagcttcttaatatagaccatgcctgagaggcaccggtagggcgataacaagccctttcttctgatttcctccctggggccaaagggattttgaaaggcagaaggcaaagacttgagaatgagattcctcaggcttcccttgtgaggctgcctgggttctgccgctgggtggtttgggatgtccaagagatatcccctttcagccagtgactcggtcctcagttgctgctccggaaagacgctggggctgggaagggccctgtgtcctctggctttaaaatgggcaatgctattgaaaaacagaagcccttgaaacgaagtcatctgtacccctggaaacaaggtaagaaagccctgggcttcctttccaggaagaagcaaggaggcagttttctctgagagactggcccagcagcagagctgaagtgcctggggaatcaccttccagagcagaaagcacaggtagtccaacatgatttcaagaaaattcacaattctcctgaggaataagatgattcctctctcaatatgatggcttggtttgctgaggtcatgccactgcactccagcctg

SEQ ID NO: 303875 - DNA, 686 bp, Homo sapiens
ccagatgcagctcaagcagagcacgtgcgagcgggtgatgatcctgcgttcccgatttctggatgcgcggcggaagagacggaatttcaacaagcaagcgacagaaatcctgaatgaataggtccggtccataatcatgttacaggaaaaggcccaggacagggaacggctgctcttgaagttcatcaagatcatgaagcacttgcggaagctgaataacttcaactcctacttggccatcctctctgccctggactcggcgcccatccgcaggctggagtggcagaagcagacttcagagggcctggccgagtactgcacactgatcgacagctcgtcctccttccgagcctaccgggagaactcactgaggatgaggtggaacgtgtgatcaccattatgcagaatccacgccagtacaagatcccagactggttcttgaacagacagaaggatgtaaaggatggaaaatacagccaggtcctagccaatggtctggacaacaagctccgtgaagacctggagcgactgaagaagattcgggcccatagagggctgcgtcacttttggggccttcgtgtccgaggccagcacaccaagaccactggccgccgtggccgcaccgtgggtgtgtccaagaagaaataagtctgtaggccttgtctgttaataaatagtttatatac

SEQ ID NO: 303876 - DNA, 6091 bp, Homo sapiens
gaattcccttttctgggcaccgccttctgctagggggttgtagatgaaagtgcctgctcccagagaagcttgtctaacctagcacagtttctaagctacccaggctgccagaccgagcgaccgtgctgccatggacacagactctcagcgttctcatctctcttccttcaccatgaagctgatggacaaattccactcacccaaaatcaagagaacgccatcaaagaagggaaaaccagctgaggtgtccgtaaagattccagagaagcctgtgaacaaagaggcaacagacagatttctaccagagggctaccctctccccttggatctggagcagcaggcagtagaatttatgtccaccagtgctgtggcttccaggtctcaaaggcagaagaacctgagctggctggaggagaaagagaaggaagttgtcagtgccctgcgctactttaagaccattgtggacaaaatggcaattgataagaaggtactggagatgcttccagggtcagccagcaaggtgctggaggccatcttacccctggtgcagaacgatcctcgaattcagcacagctcagccctctcttcctgctatagccgagtgtaccaaagcctcgccaacctcattcgctggtctgaccaagtgatgctggaaggcgtgaactcagaagacaaggagatggtgacgactgtgaagggggtcatcaaggctgtgctggatggagtgaaggagctggtcaggctcaccatcgagaagcagggacgtccgtctccgacgagccccgtgaagcccagttcccctgccagcaagcctgatggcccagcagagctccccctgacagaccgcgaggtagagatcctaaacaagacgactgggatgtcacagtcaactgagctcctcccagatgccacggatgaagaggtcgcgccccccaagcctcctctgcctggcattcgggtggttgataatagtcctccaccagcattgccacccaagaaaagacagtcggcgccgtcccctacccgagtggctgtggtggcccccatgagccgagccaccagtggctccagtttgcctgttggaatcaataggcaggattttgatgttgactgttacgcacagaggcgactgtcaggaggcagccactcatatggtggagagtcgccccgcctctccccctgcagcagcataggcaagctcagcaagtcagacgagcagctgtcctctctggacagggacagtgggcagtgctcccggaacacaagctgtgaaacactagaccactatgatcccgactatgaattcctccagcaagacctctctaacgcagaccagatacctcagcagacggcctggaaccttagcccgttgccagagtctttgggggagtctgggtctccatttcttggccctcctttccagctgcctcttggcggccatccccagccagacggacctctggccccagggcagcagacagatacgccacctgctctccccgagaagaagcgcaggagcgcagcctcccagacggcggacggctctggctgcagggtgtcctacgagcggcatccctcgcagtatgacaacatctctggggaggacctgcagagcacagccccgatcccatccgtcccctacgcgccctttgctgctattctgccctttcagcatggaggttcctcagcccctgtcgaatttgtgggtgattttactgctcctgagtcaaccggtgacccagaaaaaccacctcctctaccagagaagaaaaacaaacacatgctggcctacatgcagttgctggaggactactcggagccgcagccctctatgttctaccagacgccacagaacgagcacatctaccagcagaagaacaagctcctcatggaggtatacggcttcagcgactccttcagtggggtggactccgtgcaggagctggccccgccgcccgccctaccccccaagcagcggcagctggagccaccggctgggaaagacggacatcccagagatccctcagcggtcagcggcgtccctgggaaggacagcagagacggcagtgagagggccccaaagtcaccagatgctctggagtcggctcagtcggaggaggaagtggacgagctgtccctcattgaccacaacgaaattatgtccaggctgacgctcaagcaggagggtgatgacgggccggacgtccgcggaggatctggggacatcttactggtccatgctactgagactgacaggaaagatttggtgttgtactgcgaggcattcctgaccacctacaggaccttcatctccccagaggagctcatcaagaagctgcagtacagatatgagaaattctctccctttgccgacacattcaagaagcgcgtcagcaagaacacgttcttcgtgctggtacgggtggtggatgagctctgcctggtggagttgacagaagagatcctgaagctgctgatggaactggtcttccgcctggtgtgcaatggggagctgagcctggcccgtgtgctccggaagaacatcctggacaaggtggaccagaagaagctactcaggtgtgccacctccagccagcccctggcagcccggggggtagcagccaggccggggaccttgcacgactttcacagccatgagatagcggagcagctaacgctgctggatgctgagctcttctataaaatagagattcctgaggttttgctttgggcaaaagagcagaatgaggagaagagccccaacttgacccagttcacggagcacttcaacaacatgtcctactgggtccggtccataatcatgttacaggaaaaggcccaggacagggaacggctgctcttgaagttcatcaagatcatgaagcacttgcggaagctgaataacttcaactcctacttggccatcctctctgccctggactcggcgcccatccgcaggctggagtggcagaagcagacttcagagggcctggccgagtactgcacactgatcgacagctcgtcctccttccgagcctaccgggccgccctctcggaggtggaaccgccgtgcatcccgtacctggggctgatcctgcaggacctgaccttcgttcacctgggaaacccagactacatcgacgggaaagtgaacttctccaagcggtggcagcagttcaacatcctcgacagcatgcgctgcttccagcaggcgcactatgacatgcggaggaacgacgacattataaacttcttcaatgacttcagtgaccacctggctgaggaggccctatgggaactgtctctgaaaattaaacccaggaacataacaaggagaaaaacagaccgggaagagaagacctaggagcagacgccgggatccaggagaatgctcgaggggcgcagagggcagctcccagaccggagaggaccttggacctgttaggcgcatggcaggagtcccggcctcggagccatgaggctggccagccctcagcggggccgggcgggagctggagcctgccagccgcttcctgcctccttcctctgtgggagcagacccgtgggcctcagggcagccagcaggcaggtcttgttgccaatttacaaaccggtggttttctggtttggttttgttttctgcttttacttccatctctcccctcttgaccttccacccactcccctccagggagagagcagcagagacctcatcagcagaccaaggaagtggtgggtgctccccctccctaagctccagggtccctgaatcttctgaaatctcaaatgagtggaggcctcctggggtggcctgtcctgcaggggccctggaatgggggcaagcagctgggtgggcagaatgcagagtagactcgggggaggatcctttcactttccgcttccccttctgatgcatggaggatggtgtgagcttttcagcaggcccggaaaggtacgcaggtgacgccttagcagccccgcagctggtgctctgccccgcggtactggcgccatcagggcctcccttgcccgcctgagagcagcagcagtctctgtcatcccgtcgccccttaccccccaccccaggccactgggcccctcccacaccacctggggagctgagaagaggaggctggagtaagggaggacttgatcatccaagaaatactttttattgctgggagtcttctgaacctcaccaaactgaggccagagctgagctcctgggggagttaattcagaggggagaggccagcacctccctcctccatcgctcgctgtgtgccttaaactccatctcatgtccctccccatcccctggctttccctccctccttgccccatcctgggccagccagcagggctcctcctctggctcttcagacctttcagccagtgctgtcagtgcccctgggagggaagggcatccctgaggcacccgaatggtccctcagggtgcagggaggcagaagcctggccacagaggagcctcctaaggcagcagctgcagcaagcgcaccctctccccactctccccacgccagagcggcttccagagcagatgctgtttccatcctcctcgtcaaaaccattctcgctgctgagcttgacaatctgggcaaggcttgtggggcgcttgacaaacagaatctgccctgtgccgcctggttccgtggcctccagcatgagcctgcaggcagggcgctgcgggaacccagttgtgctgccccagcccatgcctccgggtctgctgtgcatgaatgagtgctcacttgtcccgggtttaggacgtggtcaagtgaacagcagggtctaactgtgcttacttagcccagttcaaacagaacaaaggaaaaatatagaaagcaacatctgttgatcatttaggtttttttttaaaccaccatgtcactttgagtccttcatgggtttttgaacagcatttatcaagaagaaaatgtgggctttttcccctctcccgtgttttgtttgtcctgtagatagagggaggaaagccgtgcagtggcaggcgggaccccctctggtggcgggaccccctcttgcggtggtcttgcggggccagccgggacctgtcactttattatttaaggagtgtgtgtgtagagtcgctggcttattaacagtattgtgtgtgggttgggtttttagtttgttccttctttttgaagtcccttcatttcaatccttgactctctctccccttcccttgcccagctctgttgaatgctgctgtgcgcgtgtgagggccgctctgcacacagggcccttgggttgtgtgaactgaaattctccctgtatttgtgagactcgcaggagtccccatctgtagcacaggcaatgccagtgccatgctgcagcctcagaaaccaggcctctcactccagcagcaggcagaaccgtgtctgtggtcgggtgctgtccacagctctgtctgccttgttcttgggcttgagctggatagaggtggggtctcttcaccttccctgaattcagaacagaccctgtgcctggccccagtgtgcccaggcaattccccaggccctcattgggagcccttggtgttctgagcagcagggcccaggcagcacatgagcagtgcccaggggctccctgcgtgaggacggcaaggtgcgatgtatgtctaacttattgatggcaggcagccccctgtgccccctaagcctggccctggttattgctgagctctgtgctcagtgctgcggcctggccgtggctcgtctgttcctttggggggcccgggcgggttgtgggaatcagtcttcacagacagacgtgagccaggcggaggactcgttccttgcagaggtcagtcctcacctgcaggtgtcggggtgggggggggcaaggaggggcaggcacacaccatgtctgacctgaacccgattctggggagcatcttcccgctccggccccacgacctccacagggttacattgtaatatatatgccccagctaacctgtctgatggtggcatcttcctgcagacatttcaaacatgtaacttttatatgaaaaaaaataaacacagatgaaagctgcccaatgcca

SEQ ID NO: 303877 - DNA, 6088 bp, Homo sapiens
  misc_feature (5906)..(5906): n is a, c, g, or t
gaattcccttttctgggcaccgccttctgctagggggttgtagatgaaagtgcctgctcccagagaagcttgtctaacctagcacagtttctaagctacccaggctgccagaccgagcgaccgtgctgccatggacacagactctcagcgttctcatctctcttccttcaccatgaagctgatggacaaattccactcacccaaaatcaagagaacgccatcaaagaagggaaaaccagctgaggtgtccgtaaagattccagagaagcctgtgaacaaagaggcaacagacagatttctaccagagggctaccctctccccttggatctggagcagcaggcagtagaatttatgtccaccagtgctgtggcttccaggtctcaaaggcagaagaacctgagctggctggaggagaaagagaaggaagttgtcagtgccctgcgctactttaagaccattgtggacaaaatggcaattgataagaaggtactggagatgcttccagggtcagccagcaaggtgctggaggccatcttacccctggtgcagaacgatcctcgaattcagcacagctcagccctctcttcctgctatagccgagtgtaccaaagcctcgccaacctcattcgctggtctgaccaagtgatgctggaaggcgtgaactcagaagacaaggagatggtgacgactgtgaagggggtcatcaaggctgtgctggatggagtgaaggagctggtcaggctcaccatcgagaagcagggacgtccgtctccgacgagccccgtgaagcccagttcccctgccagcaagcctgatggcccagcagagctccccctgacagaccgcgaggtagagatcctaaacaagacgactgggatgtcacagtcaactgagctcctcccagatgccacggatgaagaggtcgcgccccccaagcctcctctgcctggcattcgggtggttgataatagtcctccaccagcattgccacccaagaaaagacagtcggcgccgtcccctacccgagtggctgtggtggcccccatgagccgagccaccagtggctccagtttgcctgttggaatcaataggcaggattttgatgttgactgttacgcacagaggcgactgtcaggaggcagccactcatatggtggagagtcgccccgcctctccccctgcagcagcataggcaagctcagcaagtcagacgagcagctgtcctctctggacagggacagtgggcagtgctcccggaacacaagctgtgaaacactagaccactatgatcccgactatgaattcctccagcaagacctctctaacgcagaccagatacctcagcagacggcctggaaccttagcccgttgccagagtctttgggggagtctgggtctccatttcttggccctcctttccagctgcctcttggcggccatccccagccagacggacctctggccccagggcagcagacagatacgccacctgctctccccgagaagaagcgcaggagcgcagcctcccagacggcggacggctctggctgcagggtgtcctacgagcggcatccctcgcagtatgacaacatctctggggaggacctgcagagcacagccccgatcccatccgtcccctacgcgccctttgctgctattctgccctttcagcatggaggttcctcagcccctgtcgaatttgtgggtgattttactgctcctgagtcaaccggtgacccagaaaaaccacctcctctaccagagaagaaaaacaaacacatgctggcctacatgcagttgctggaggactactcggagccgcagccctctatgttctaccagacgccacagaacgagcacatctaccagcagaagaacaagctcctcatggaggtatacggcttcagcgactccttcagtggggtggactccgtgcaggagctggccccgccgcccgccctaccccccaagcagcggcagctggagccaccggctgggaaagacggacatcccagagatccctcagcggtcagcggcgtccctgggaaggacagcagagacggcagtgagagggccccaaagtcaccagatgctctggagtcggctcagtcggaggaggaagtggacgagctgtccctcattgaccacaacgaaattatgtccaggctgacgctcaagcaggagggtgatgacgggccggacgtccgcggaggatctggggacatcttactggtccatgctactgagactgacaggaaagatttggtgttgtactgcgaggcattcctgaccacctacaggaccttcatctccccagaggagctcatcaagaagctgcagtacagatatgagaaattctctccctttgccgacacattcaagaagcgcgtcagcaagaacacgttcttcgtgctggtacgggtggtggatgagctctgcctggtggagttgacagaagagatcctgaagctgctgatggaactggtcttccgcctggtgtgcaatggggagctgagcctggcccgtgtgctccggaagaacatcctggacaaggtggaccagaagaagctactcaggtgtgccacctccagccagcccctggcagcccggggggtagcagccaggccggggaccttgcacgactttcacagccatgagatagcggagcagctaacgctgctggatgctgagctcttctataaaatagagattcctgaggttttgctttgggcaaaagagcagaatgaggagaagagccccaacttgacccagttcacggagcacttcaacaacatgtcctactgggtccggtccataatcatgttacaggaaaaggcccaggacagggaacggctgctcttgaagttcatcaagatcatgaagcacttgcggaagctgaataacttcaactcctacttggccatcctctctgccctggactcggcgcccatccgcaggctggagtggcagaagcagacttcagagggcctggccgagtactgcacactgatcgacagctcgtcctccttccgagcctaccgggccgccctctcggaggtggaaccgccgtgcatcccgtacctggggctgatcctgcaggacctgaccttcgttcacctgggaaacccagactacatcgacgggaaagtgaacttctccaagcggtggcagcagttcaacatcctcgacagcatgcgctgcttccagcaggcgcactatgacatgcggaggaacgacgacattataaacttcttcaatgacttcagtgaccacctggctgaggaggccctatgggaactgtctctgaaaattaaacccaggaacataacaaggagaaaaacagaccgggaagagaagacctaggagcagacgccgggatccaggagaatgctcgaggggcgcagagggcagctcccagaccggagaggaccttggacctgttaggcgcatggcaggagtcccggcctcggagccatgaggctggccagccctcagcggggccgggcgggagctggagcctgccagccgcttcctgcctccttcctctgtgggagcagacccgtgggcctcagggcagccagcaggcaggtcttgttgccaatttacaaaccggtggttttctggtttggttttgttttctgcttttacttccatctctcccctcttgaccttccacccactcccctccagggagagagcagcagagacctcatcagcagaccaaggaagtggtgggtgctccccctccctaagctccagggtccctgaatcttctgaaatctcaaatgagtggaggcctcctggggtggcctgtcctgcaggggccctggaatgggggcaagcagctgggtgggcagaatgcagagtagactcgggggaggatcctttcactttccgcttccccttctgatgcatggaggatggtgtgagcttttcagcaggcccggaaaggtacgcaggtgacgccttagcagccccgcagctggtgctctgccccgcggtactggcgccatcagggcctcccttgcccgcctgagagcagcagcagtctctgtcatcccgtcgccccttaccccccaccccaggccactgggcccctcccacaccacctggggagctgagaagaggaggctggagtaagggaggacttgatcatccaagaaatactttttattgctgggagtcttctgaacctcaccaaactgaggccagagctgagctcctgggggagttaattcagaggggagaggccagcacctccctcctccatcgctcgctgtgtgccttaaactccatctcatgtccctccccatcccctggctttccctccctccttgccccatcctgggccagccagcagggctcctcctctggctcttcagacctttcagccagtgctgtcagtgcccctgggagggaagggcatccctgaggcacccgaatggtccctcagggtgcagggaggcagaagcctggccacagaggagcctcctaaggcagcagctgcagcaagcgcaccctctccccactctccccacgccagagcggcttccagagcagatgctgtttccatcctcctcgtcaaaaccattctcgctgctgagcttgacaatctgggcaaggcttgtggggcgcttgacaaacagaatctgccctgtgccgcctggttccgtggcctccagcatgagcctgcaggcagggcgctgcgggaacccagttgtgctgccccagcccatgcctccgggtctgctgtgcatgaatgagtgctcacttgtcccgggtttaggacgtggtcaagtgaacagcagggtctaactgtgcttacttagcccagttcaaacagaacaaaggaaaaatatagaaagcaacatctgttgatcatttaggtttttttttaaaccaccatgtcactttgagtccttcatgggtttttgaacagcatttatcaagaagaaaatgtgggctttttcccctctcccgtgttttgtttgtcctgtagatagagggaggaaagccgtgcagtggcaggcgggaccccctctggtggcgggaccccctcttgcggtggtcttgcggggccagccgggacctgtcactttattatttaaggagtgtgtgtgtagagtcgctggcttattaacagtattgtgtgtgggttgggtttttagtttgttccttctttttgaagtcccttcatttcaatccttgactctctctccccttcccttgcccagctctgttgaatgctgctgtgcgcgtgtgagggccgctctgcacacagggcccttgggttgtgtgaactgaaattctccctgtatttgtgagactcgcaggagtccccatctgtagcacaggcaatgccagtgccatgctgcagcctcagaaaccaggcctctcactccagcagcaggcagaaccgtgtctgtggtcgggtgctgtccacagctctgtctgccttgttcttgggcttgagctggatagaggtggggtctcttcaccttccctgaattcagaacagaccctgtgcctggccccagtgtgcccaggcaattccccaggccctcattgggagcccttggtgttctgagcagcagggcccaggcagcacatgagcagtgcccaggggctccctgcgtgaggacggcaaggtgcgatgtatgtctaacttattgatggcaggcagccccctgtgccccctaagcctggccctggttattgctgagctctgtgctcagtgctgcggcctggccgtggctcgtctgttcctttggggggcccgggcgggttgtgggaatcagtcttcacagacagacgtgagccaggcggaggactcgttccttgcagaggtcagtcctcacctgcaggtgtcggggtgggggggggcaaggaggggcaggcacactcncctttcccccctcaccccgtgtagtggtgccctctggggacatgcggagtgggggtcttatccctgtgctgagcccttagggcagacaggatggcatgttttaggggaggggtaagccttcctccctatttgtcgtcagtgttattcctaataaaatgggtatttgctctatgcaaaatgcc

SEQ ID NO: 303878 - DNA, 6055 bp, Homo sapiens
gaattcccttttctgggcaccgccttctgctagggggttgtagatgaaagtgcctgctcccagagaagcttgtctaacctagcacagtttctaagctacccaggctgccagaccgagcgaccgtgctgccatggacacagactctcagcgttctcatctctcttccttcaccatgaagctgatggacaaattccactcacccaaaatcaagagaacgccatcaaagaagggaaaaccagctgaggtgtccgtaaagattccagagaagcctgtgaacaaagaggcaacagacagatttctaccagagggctaccctctccccttggatctggagcagcaggcagtagaatttatgtccaccagtgctgtggcttccaggtctcaaaggcagaagaacctgagctggctggaggagaaagagaaggaagttgtcagtgccctgcgctactttaagaccattgtggacaaaatggcaattgataagaaggtactggagatgcttccagggtcagccagcaaggtgctggaggccatcttacccctggtgcagaacgatcctcgaattcagcacagctcagccctctcttcctgctatagccgagtgtaccaaagcctcgccaacctcattcgctggtctgaccaagtgatgctggaaggcgtgaactcagaagacaaggagatggtgacgactgtgaagggggtcatcaaggctgtgctggatggagtgaaggagctggtcaggctcaccatcgagaagcagggacgtccgtctccgacgagccccgtgaagcccagttcccctgccagcaagcctgatggcccagcagagctccccctgacagaccgcgaggtagagatcctaaacaagacgactgggatgtcacagtcaactgagctcctcccagatgccacggatgaagaggtcgcgccccccaagcctcctctgcctggcattcgggtggttgataatagtcctccaccagcattgccacccaagaaaagacagtcggcgccgtcccctacccgagtggctgtggtggcccccatgagccgagccaccagtggctccagtttgcctgttggaatcaataggcaggattttgatgttgactgttacgcacagaggcgactgtcaggaggcagccactcatatggtggagagtcgccccgcctctccccctgcagcagcataggcaagctcagcaagtcagacgagcagctgtcctctctggacagggacagtgggcagtgctcccggaacacaagctgtgaaacactagaccactatgatcccgactatgaattcctccagcaagacctctctaacgcagaccagatacctcagcagacggcctggaaccttagcccgttgccagagtctttgggggagtctgggtctccatttcttggccctcctttccagctgcctcttggcggccatccccagccagacggacctctggccccagggcagcagacagatacgccacctgctctccccgagaagaagcgcaggagcgcagcctcccagacggcggacggctctggctgcagggtgtcctacgagcggcatccctcgcagtatgacaacatctctggggaggacctgcagagcacagccccgatcccatccgtcccctacgcgccctttgctgctattctgccctttcagcatggaggttcctcagcccctgtcgaatttgtgggtgattttactgctcctgagtcaaccggtgacccagaaaaaccacctcctctaccagagaagaaaaacaaacacatgctggcctacatgcagttgctggaggactactcggagccgcagccctctatgttctaccagacgccacagaacgagcacatctaccagcagaagaacaagctcctcatggaggtatacggcttcagcgactccttcagtggggtggactccgtgcaggagctggccccgccgcccgccctaccccccaagcagcggcagctggagccaccggctgggaaagacggacatcccagagatccctcagcggtcagcggcgtccctgggaaggacagcagagacggcagtgagagggccccaaagtcaccagatgctctggagtcggctcagtcggaggaggaagtggacgagctgtccctcattgaccacaacgaaattatgtccaggctgacgctcaagcaggagggtgatgacgggccggacgtccgcggaggatctggggacatcttactggtccatgctactgagactgacaggaaagatttggtgttgtactgcgaggcattcctgaccacctacaggaccttcatctccccagaggagctcatcaagaagctgcagtacagatatgagaaattctctccctttgccgacacattcaagaagcgcgtcagcaagaacacgttcttcgtgctggtacgggtggtggatgagctctgcctggtggagttgacagaagagatcctgaagctgctgatggaactggtcttccgcctggtgtgcaatggggagctgagcctggcccgtgtgctccggaagaacatcctggacaaggtggaccagaagaagctactcaggtgtgccacctccagccagcccctggcagcccggggggtagcagccaggccggggaccttgcacgactttcacagccatgagatagcggagcagctaacgctgctggatgctgagctcttctataaaatagagattcctgaggttttgctttgggcaaaagagcagaatgaggagaagagccccaacttgacccagttcacggagcacttcaacaacatgtcctactgggtccggtccataatcatgttacaggaaaaggcccaggacagggaacggctgctcttgaagttcatcaagatcatgaagcacttgcggaagctgaataacttcaactcctacttggccatcctctctgccctggactcggcgcccatccgcaggctggagtggcagaagcagacttcagagggcctggccgagtactgcacactgatcgacagctcgtcctccttccgagcctaccgggccgccctctcggaggtggaaccgccgtgcatcccgtacctggggctgatcctgcaggacctgaccttcgttcacctgggaaacccagactacatcgacgggaaagtgaacttctccaagcggtggcagcagttcaacatcctcgacagcatgcgctgcttccagcaggcgcactatgacatgcggaggaacgacgacattataaacttcttcaatgacttcagtgaccacctggctgaggaggccctatgggaactgtctctgaaaattaaacccaggaacataacaaggagaaaaacagaccgggaagagaagacctaggagcagacgccgggatccaggagaatgctcgaggggcgcagagggcagctcccagaccggagaggaccttggacctgttaggcgcatggcaggagtcccggcctcggagccatgaggctggccagccctcagcggggccgggcgggagctggagcctgccagccgcttcctgcctccttcctctgtgggagcagacccgtgggcctcagggcagccagcaggcaggtcttgttgccaatttacaaaccggtggttttctggtttggttttgttttctgcttttacttccatctctcccctcttgaccttccacccactcccctccagggagagagcagcagagacctcatcagcagaccaaggaagtggtgggtgctccccctccctaagctccagggtccctgaatcttctgaaatctcaaatgagtggaggcctcctggggtggcctgtcctgcaggggccctggaatgggggcaagcagctgggtgggcagaatgcagagtagactcgggggaggatcctttcactttccgcttccccttctgatgcatggaggatggtgtgagcttttcagcaggcccggaaaggtacgcaggtgacgccttagcagccccgcagctggtgctctgccccgcggtactggcgccatcagggcctcccttgcccgcctgagagcagcagcagtctctgtcatcccgtcgccccttaccccccaccccaggccactgggcccctcccacaccacctggggagctgagaagaggaggctggagtaagggaggacttgatcatccaagaaatactttttattgctgggagtcttctgaacctcaccaaactgaggccagagctgagctcctgggggagttaattcagaggggagaggccagcacctccctcctccatcgctcgctgtgtgccttaaactccatctcatgtccctccccatcccctggctttccctccctccttgccccatcctgggccagccagcagggctcctcctctggctcttcagacctttcagccagtgctgtcagtgcccctgggagggaagggcatccctgaggcacccgaatggtccctcagggtgcagggaggcagaagcctggccacagaggagcctcctaaggcagcagctgcagcaagcgcaccctctccccactctccccacgccagagcggcttccagagcagatgctgtttccatcctcctcgtcaaaaccattctcgctgctgagcttgacaatctgggcaaggcttgtggggcgcttgacaaacagaatctgccctgtgccgcctggttccgtggcctccagcatgagcctgcaggcagggcgctgcgggaacccagttgtgctgccccagcccatgcctccgggtctgctgtgcatgaatgagtgctcacttgtcccgggtttaggacgtggtcaagtgaacagcagggtctaactgtgcttacttagcccagttcaaacagaacaaaggaaaaatatagaaagcaacatctgttgatcatttaggtttttttttaaaccaccatgtcactttgagtccttcatgggtttttgaacagcatttatcaagaagaaaatgtgggctttttcccctctcccgtgttttgtttgtcctgtagatagagggaggaaagccgtgcagtggcaggcgggaccccctctggtggcgggaccccctcttgcggtggtcttgcggggccagccgggacctgtcactttattatttaaggagtgtgtgtgtagagtcgctggcttattaacagtattgtgtgtgggttgggtttttagtttgttccttctttttgaagtcccttcatttcaatccttgactctctctccccttcccttgcccagctctgttgaatgctgctgtgcgcgtgtgagggccgctctgcacacagggcccttgggttgtgtgaactgaaattctccctgtatttgtgagactcgcaggagtccccatctgtagcacaggcaatgccagtgccatgctgcagcctcagaaaccaggcctctcactccagcagcaggcagaaccgtgtctgtggtcgggtgctgtccacagctctgtctgccttgttcttgggcttgagctggatagaggtggggtctcttcaccttccctgaattcagaacagaccctgtgcctggccccagtgtgcccaggcaattccccaggccctcattgggagcccttggtgttctgagcagcagggcccaggcagcacatgagcagtgcccaggggctccctgcgtgaggacggcaaggtgcgatgtatgtctaacttattgatggcaggcagccccctgtgccccctaagcctggccctggttattgctgagctctgtgctcagtgctgcggcctggccgtggctcgtctgttcctttggggggcccgggcgggttgtgggaatcagtcttcacagacagacgtgagccaggcggaggactcgttccttgcagaggtcagtcctcacctgcaggtgtcgcagcatctggccgtccactggtttcagctgtgtcccccagtccgtgtttttttagaaatgggattgtgattaaatttgtgaaataaaggtttctatctactttgtaaaaaaaataatattgtaatttaaagactcgagggggggccctgtacccaattcgccctataatgagctcctttactcc

SEQ ID NO: 303879 - DNA, 6496 bp, Homo sapiens
gcgtggcataagggtctgtatgaaaatgtttctcctggcatgccccagaatggttcatttatgactttcagcattttgatcacctgattccccatttctcctgcggagaaaagtggtattaaaagtatttggacataaaattcatcttgcaagccgctgttgtgctgatgagtaataaagtgtcaaaaggatgctgaggaaagagcttcttaatatagaccatgcctgagaggcaccggtagggcgataacaagccctttcttctgatttcctccctggggccaaagggattttgaaaggcagaaggcaaagacttgagaatgagattcctcaggcttcccttgtgaggctgcctgggttctgccgctgggtggtttgggatgtccaagagatatcccctttcagccagtgactcggtcctcagttgctgctccggaaagacgctggggctgggaagggccctgtgtcctctggctttaaaatgggcaatgctattgaaaaacagaagcccttgaaacgaagtcatctgtacccctggaaacaagactctcagcgttctcatctctcttccttcaccatgaagctgatggacaaattccactcacccaaaatcaagagaacgccatcaaagaagggaaaaccagctgaggtgtccgtaaagattccagagaagcctgtgaacaaagaggcaacagacagatttctaccagagggctaccctctccccttggatctggagcagcaggcagtagaatttatgtccaccagtgctgtggcttccaggtctcaaaggcagaagaacctgagctggctggaggagaaagagaaggaagttgtcagtgccctgcgctactttaagaccattgtggacaaaatggcaattgataagaaggtactggagatgcttccagggtcagccagcaaggtgctggaggccatcttacccctggtgcagaacgatcctcgaattcagcacagctcagccctctcttcctgctatagccgagtgtaccaaagcctcgccaacctcattcgctggtctgaccaagtgatgctggaaggcgtgaactcagaagacaaggagatggtgacgactgtgaagggggtcatcaaggctgtgctggatggagtgaaggagctggtcaggctcaccatcgagaagcagggacgtccgtctccgacgagccccgtgaagcccagttcccctgccagcaagcctgatggcccagcagagctccccctgacagaccgcgaggtagagatcctaaacaagacgactgggatgtcacagtcaactgagctcctcccagatgccacggatgaagaggtcgcgccccccaagcctcctctgcctggcattcgggtggttgataatagtcctccaccagcattgccacccaagaaaagacagtcggcgccgtcccctacccgagtggctgtggtggcccccatgagccgagccaccagtggctccagtttgcctgttggaatcaataggcaggattttgatgttgactgttacgcacagaggcgactgtcaggaggcagccactcatatggtggagagtcgccccgcctctccccctgcagcagcataggcaagctcagcaagtcagacgagcagctgtcctctctggacagggacagtgggcagtgctcccggaacacaagctgtgaaacactagaccactatgatcccgactatgaattcctccagcaagacctctctaacgcagaccagatacctcagcagacggcctggaaccttagcccgttgccagagtctttgggggagtctgggtctccatttcttggccctcctttccagctgcctcttggcggccatccccagccagacggacctctggccccagggcagcagacagatacgccacctgctctccccgagaagaagcgcaggagcgcagcctcccagacggcggacggctctggctgcagggtgtcctacgagcggcatccctcgcagtatgacaacatctctggggaggacctgcagagcacagccccgatcccatccgtcccctacgcgccctttgctgctattctgccctttcagcatggaggttcctcagcccctgtcgaatttgtgggtgattttactgctcctgagtcaaccggtgacccagaaaaaccacctcctctaccagagaagaaaaacaaacacatgctggcctacatgcagttgctggaggactactcggagccgcagccctctatgttctaccagacgccacagaacgagcacatctaccagcagaagaacaagctcctcatggaggtatacggcttcagcgactccttcagtggggtggactccgtgcaggagctggccccgccgcccgccctaccccccaagcagcggcagctggagccaccggctgggaaagacggacatcccagagatccctcagcggtcagcggcgtccctgggaaggacagcagagacggcagtgagagggccccaaagtcaccagatgctctggagtcggctcagtcggaggaggaagtggacgagctgtccctcattgaccacaacgaaattatgtccaggctgacgctcaagcaggagggtgatgacgggccggacgtccgcggaggatctggggacatcttactggtccatgctactgagactgacaggaaagatttggtgttgtactgcgaggcattcctgaccacctacaggaccttcatctccccagaggagctcatcaagaagctgcagtacagatatgagaaattctctccctttgccgacacattcaagaagcgcgtcagcaagaacacgttcttcgtgctggtacgggtggtggatgagctctgcctggtggagttgacagaagagatcctgaagctgctgatggaactggtcttccgcctggtgtgcaatggggagctgagcctggcccgtgtgctccggaagaacatcctggacaaggtggaccagaagaagctactcaggtgtgccacctccagccagcccctggcagcccggggggtagcagccaggccggggaccttgcacgactttcacagccatgagatagcggagcagctaacgctgctggatgctgagctcttctataaaatagagattcctgaggttttgctttgggcaaaagagcagaatgaggagaagagccccaacttgacccagttcacggagcacttcaacaacatgtcctactgggtccggtccataatcatgttacaggaaaaggcccaggacagggaacggctgctcttgaagttcatcaagatcatgaagcacttgcggaagctgaataacttcaactcctacttggccatcctctctgccctggactcggcgcccatccgcaggctggagtggcagaagcagacttcagagggcctggccgagtactgcacactgatcgacagctcgtcctccttccgagcctaccgggccgccctctcggaggtggaaccgccgtgcatcccgtacctggggctgatcctgcaggacctgaccttcgttcacctgggaaacccagactacatcgacgggaaagtgaacttctccaagcggtggcagcagttcaacatcctcgacagcatgcgctgcttccagcaggcgcactatgacatgcggaggaacgacgacattataaacttcttcaatgacttcagtgaccacctggctgaggaggccctatgggaactgtctctgaaaattaaacccaggaacataacaaggagaaaaacagaccgggaagagaagacctaggagcagacgccgggatccaggagaatgctcgaggggcgcagagggcagctcccagaccggagaggaccttggacctgttaggcgcatggcaggagtcccggcctcggagccatgaggctggccagccctcagcggggccgggcgggagctggagcctgccagccgcttcctgcctccttcctctgtgggagcagacccgtgggcctcagggcagccagcaggcaggtcttgttgccaatttacaaaccggtggttttctggtttggttttgttttctgcttttacttccatctctcccctcttgaccttccacccactcccctccagggagagagcagcagagacctcatcagcagaccaaggaagtggtgggtgctccccctccctaagctccagggtccctgaatcttctgaaatctcaaatgagtggaggcctcctggggtggcctgtcctgcaggggccctggaatgggggcaagcagctgggtgggcagaatgcagagtagactcgggggaggatcctttcactttccgcttccccttctgatgcatggaggatggtgtgagcttttcagcaggcccggaaaggtacgcaggtgacgccttagcagccccgcagctggtgctctgccccgcggtactggcgccatcagggcctcccttgcccgcctgagagcagcagcagtctctgtcatcccgtcgccccttaccccccaccccaggccactgggcccctcccacaccacctggggagctgagaagaggaggctggagtaagggaggacttgatcatccaagaaatactttttattgctgggagtcttctgaacctcaccaaactgaggccagagctgagctcctgggggagttaattcagaggggagaggccagcacctccctcctccatcgctcgctgtgtgccttaaactccatctcatgtccctccccatcccctggctttccctccctccttgccccatcctgggccagccagcagggctcctcctctggctcttcagacctttcagccagtgctgtcagtgcccctgggagggaagggcatccctgaggcacccgaatggtccctcagggtgcagggaggcagaagcctggccacagaggagcctcctaaggcagcagctgcagcaagcgcaccctctccccactctccccacgccagagcggcttccagagcagatgctgtttccatcctcctcgtcaaaaccattctcgctgctgagcttgacaatctgggcaaggcttgtggggcgcttgacaaacagaatctgccctgtgccgcctggttccgtggcctccagcatgagcctgcaggcagggcgctgcgggaacccagttgtgctgccccagcccatgcctccgggtctgctgtgcatgaatgagtgctcacttgtcccgggtttaggacgtggtcaagtgaacagcagggtctaactgtgcttacttagcccagttcaaacagaacaaaggaaaaatatagaaagcaacatctgttgatcatttaggtttttttttaaaccaccatgtcactttgagtccttcatgggtttttgaacagcatttatcaagaagaaaatgtgggctttttcccctctcccgtgttttgtttgtcctgtagatagagggaggaaagccgtgcagtggcaggcgggaccccctctggtggcgggaccccctcttgcggtggtcttgcggggccagccgggacctgtcactttattatttaaggagtgtgtgtgtagagtcgctggcttattaacagtattgtgtgtgggttgggtttttagtttgttccttctttttgaagtcccttcatttcaatccttgactctctctccccttcccttgcccagctctgttgaatgctgctgtgcgcgtgtgagggccgctctgcacacagggcccttgggttgtgtgaactgaaattctccctgtatttgtgagactcgcaggagtccccatctgtagcacaggcaatgccagtgccatgctgcagcctcagaaaccaggcctctcactccagcagcaggcagaaccgtgtctgtggtcgggtgctgtccacagctctgtctgccttgttcttgggcttgagctggatagaggtggggtctcttcaccttccctgaattcagaacagaccctgtgcctggccccagtgtgcccaggcaattccccaggccctcattgggagcccttggtgttctgagcagcagggcccaggcagcacatgagcagtgcccaggggctccctgcgtgaggacggcaaggtgcgatgtatgtctaacttattgatggcaggcagccccctgtgccccctaagcctggccctggttattgctgagctctgtgctcagtgctgcggcctggccgtggctcgtctgttcctttggggggcccgggcgggttgtgggaatcagtcttcacagacagacgtgagccaggcggaggactcgttccttgcagaggtcagtcctcacctgcaggtgtcggggtgggggggggcaaggaggggcaggcacacaccatgtctgacctgaacccgattctggggagcatcttcccgctccggccccacgacctccacagggttacattgtaatatatatgccccagctaacctgtctgatggtggcatcttcctgcagacatttcaaacatgtaacttttatatgaaaaaaaataaacacagatgaaagctgcccaatgcca

SEQ ID NO: 303880 - DNA, 5728 bp, Homo sapiens
gaattcccttttctgggcaccgccttctgctagggggttgtagatgaaagtgcctgctcccagagaagcttgtctaacctagcacagtttctaagctacccaggctgccagaccgagcgaccgtgctgccatggacacagactctcagcgttctcatctctcttccttcaccatgaagctgatggacaaattccactcacccaaaatcaagagaacgccatcaaagaagggaaaaccagctgaggtgtccgtaaagattccagagaagcctgtgaacaaagaggcaacagacagatttctaccagagggctaccctctccccttggatctggagcagcaggcagtagaatttatgtccaccagtgctgtggcttccaggtctcaaaggcagaagaacctgagctggctggaggagaaagagaaggaagttgtcagtgccctgcgctactttaagaccattgtggacaaaatggcaattgataagaaggtactggagatgcttccagggtcagccagcaaggtgctggaggccatcttacccctggtgcagaacgatcctcgaattcagcacagctcagccctctcttcctgctatagccgagtgtaccaaagcctcgccaacctcattcgctggtctgaccaagtgatgctggaaggcgtgaactcagaagacaaggagatggtgacgactgtgaagggggtcatcaaggctgtgctggatggagtgaaggagctggtcaggctcaccatcgagaagcagggacgtccgtctccgacgagccccgtgaagcccagttcccctgccagcaagcctgatggcccagcagagctccccctgacagaccgcgaggtagagatcctaaacaagacgactgggatgtcacagtcaactgagctcctcccagatgccacggatgaagaggtcgcgccccccaagcctcctctgcctggcattcgggtggttgataatagtcctccaccagcattgccacccaagaaaagacagtcggcgccgtcccctacccgagtggctgtggtggcccccatgagccgagccaccagtggctccagtttgcctgttggaatcaataggcaggattttgatgttgactgttacgcacagaggcgactgtcaggaggcagccactcatatggtggagagtcgccccgcctctccccctgcagcagcataggcaagctcagcaagtcagacgagcagctgtcctctctggacagggacagtgggcagtgctcccggaacacaagctgtgaaacactagaccactatgatcccgactatgaattcctccagcaagacctctctaacgcagaccagatacctcagcagacggcctggaaccttagcccgttgccagagtctttgggggagtctgggtctccatttcttggccctcctttccagctgcctcttggcggccatccccagccagacggacctctggccccagggcagcagacagatacgccacctgctctccccgagaagaagcgcaggagcgcagcctcccagacggcggacggctctggctgcagggtgtcctacgagcggcatccctcgcagtatgacaacatctctggggaggacctgcagagcacagccccgatcccatccgtcccctacgcgccctttgctgctattctgccctttcagcatggaggttcctcagcccctgtcgaatttgtgggtgattttactgctcctgagtcaaccggtgacccagaaaaaccacctcctctaccagagaagaaaaacaaacacatgctggcctacatgcagttgctggaggactactcggagccgcagccctctatgttctaccagacgccacagaacgagcacatctaccagcagaagaacaagctcctcatggaggtatacggcttcagcgactccttcagtggggtggactccgtgcaggagctggccccgccgcccgccctaccccccaagcagcggcagctggagccaccggctgggaaagacggacatcccagagatccctcagcggtcagcggcgtccctgggaaggacagcagagacggcagtgagagggccccaaagtcaccagatgctctggagtcggctcagtcggaggaggaagtggacgagctgtccctcattgaccacaacgaaattatgtccaggctgacgctcaagcaggagggtgatgacgggccggacgtccgcggaggatctggggacatcttactggtccatgctactgagactgacaggaaagatttggtgttgtactgcgaggcattcctgaccacctacaggaccttcatctccccagaggagctcatcaagaagctgcagtacagatatgagaaattctctccctttgccgacacattcaagaagcgcgtcagcaagaacacgttcttcgtgctggtacgggtggtggatgagctctgcctggtggagttgacagaagagatcctgaagctgctgatggaactggtcttccgcctggtgtgcaatggggagctgagcctggcccgtgtgctccggaagaacatcctggacaaggtggaccagaagaagctactcaggtgtgccacctccagccagcccctggcagcccggggggtagcagccaggccggggaccttgcacgactttcacagccatgagatagcggagcagctaacgctgctggatgctgagctcttctataaaatagagattcctgaggttttgctttgggcaaaagagcagaatgaggagaagagccccaacttgacccagttcacggagcacttcaacaacatgtcctactgggtccggtccataatcatgttacaggaaaaggcccaggacagggaacggctgctcttgaagttcatcaagatcatgaagcacttgcggaagctgaataacttcaactcctacttggccatcctctctgccctggactcggcgcccatccgcaggctggagtggcagaagcagacttcagagggcctggccgagtactgcacactgatcgacagctcgtcctccttccgagcctaccgggccgccctctcggaggtggaaccgccgtgcatcccgtacctggggctgatcctgcaggacctgaccttcgttcacctgggaaacccagactacatcgacgggaaagtgaacttctccaagcggtggcagcagttcaacatcctcgacagcatgcgctgcttccagcaggcgcactatgacatgcggaggaacgacgacattataaacttcttcaatgacttcagtgaccacctggctgaggaggccctatgggaactgtctctgaaaattaaacccaggaacataacaaggagaaaaacagaccgggaagagaagacctaggagcagacgccgggatccaggagaatgctcgaggggcgcagagggcagctcccagaccggagaggaccttggacctgttaggcgcatggcaggagtcccggcctcggagccatgaggctggccagccctcagcggggccgggcgggagctggagcctgccagccgcttcctgcctccttcctctgtgggagcagacccgtgggcctcagggcagccagcaggcaggtcttgttgccaatttacaaaccggtggttttctggtttggttttgttttctgcttttacttccatctctcccctcttgaccttccacccactcccctccagggagagagcagcagagacctcatcagcagaccaaggaagtggtgggtgctccccctccctaagctccagggtccctgaatcttctgaaatctcaaatgagtggaggcctcctggggtggcctgtcctgcaggggccctggaatgggggcaagcagctgggtgggcagaatgcagagtagactcgggggaggatcctttcactttccgcttccccttctgatgcatggaggatggtgtgagcttttcagcaggcccggaaaggtacgcaggtgacgccttagcagccccgcagctggtgctctgccccgcggtactggcgccatcagggcctcccttgcccgcctgagagcagcagcagtctctgtcatcccgtcgccccttaccccccaccccaggccactgggcccctcccacaccacctggggagctgagaagaggaggctggagtaagggaggacttgatcatccaagaaatactttttattgctgggagtcttctgaacctcaccaaactgaggccagagctgagctcctgggggagttaattcagaggggagaggccagcacctccctcctccatcgctcgctgtgtgccttaaactccatctcatgtccctccccatcccctggctttccctccctccttgccccatcctgggccagccagcagggctcctcctctggctcttcagacctttcagccagtgctgtcagtgcccctgggagggaagggcatccctgaggcacccgaatggtccctcagggtgcagggaggcagaagcctggccacagaggagcctcctaaggcagcagctgcagcaagcgcaccctctccccactctccccacgccagagcggcttccagagcagatgctgtttccatcctcctcgtcaaaaccattctcgctgctgagcttgacaatctgggcaaggcttgtggggcgcttgacaaacagaatctgccctgtgccgcctggttccgtggcctccagcatgagcctgcaggcagggcgctgcgggaacccagttgtgctgccccagcccatgcctccgggtctgctgtgcatgaatgagtgctcacttgtcccgggtttaggacgtggtcaagtgaacagcagggtctaactgtgcttacttagcccagttcaaacagaacaaaggaaaaatatagaaagcaacatctgttgatcatttaggtttttttttaaaccaccatgtcactttgagtccttcatgggtttttgaacagcatttatcaagaagaaaatgtgggctttttcccctctcccgtgttttgtttgtcctgtagatagagggaggaaagccgtgcagtggcaggcgggaccccctctggtggcgggaccccctcttgcggtggtcttgcggggccagccgggacctgtcactttattatttaaggagtgtgtgtgtagagtcgctggcttattaacagtattgtgtgtgggttgggtttttagtttgttccttctttttgaagtcccttcatttcaatccttgactctctctccccttcccttgcccagctctgttgaatgctgctgtgcgcgtgtgagggccgctctgcacacagggcccttgggttgtgtgaactgaaattctccctgtatttgtgagactcgcaggagtccccatctgtagcacaggcaatgccagtgccatgctgcagcctcagaaaccaggcctctcactccagcagcaggcagaaccgtgtctgtggtcgggtgctgtccacagctctgtctgccttgttcttgggcttgagctggatagaggtggggtctcttcaccttccctgaattcagaacagaccctgtgcctggccccagtgtgcccaggcaattccccaggccctcattgggacatcttcccgctccggccccacgacctccacagggttacattgtaatatatatgccccagctaacctgtctgatggtggcatcttcctgcagacatttcaaacatgtaacttttatatgaaaaaaaataaacacagatgaaagctgcccaatgcca

SEQ ID NO: 303881 - DNA, 6126 bp, Homo sapiens
gcggccgcgcggagcccgccatgccggcgcgggtctgaggcgtggcgagccagggccgaggcgagcggcgggcgcgccgcccctgtcgccccgcggcggcccggcccgggcccgatgagcggcggcctcggcctccggcgcagcccggaaatgtccggcaagatcgagaaagcagactctcagcgttctcatctctcttccttcaccatgaagctgatggacaaattccactcacccaaaatcaagagaacgccatcaaagaagggaaaaccagctgaggtgtccgtaaagattccagagaagcctgtgaacaaagaggcaacagacagatttctaccagagggctaccctctccccttggatctggagcagcaggcagtagaatttatgtccaccagtgctgtggcttccaggtctcaaaggcagaagaacctgagctggctggaggagaaagagaaggaagttgtcagtgccctgcgctactttaagaccattgtggacaaaatggcaattgataagaaggtactggagatgcttccagggtcagccagcaaggtgctggaggccatcttacccctggtgcagaacgatcctcgaattcagcacagctcagccctctcttcctgctatagccgagtgtaccaaagcctcgccaacctcattcgctggtctgaccaagtgatgctggaaggcgtgaactcagaagacaaggagatggtgacgactgtgaagggggtcatcaaggctgtgctggatggagtgaaggagctggtcaggctcaccatcgagaagcagggacgtccgtctccgacgagccccgtgaagcccagttcccctgccagcaagcctgatggcccagcagagctccccctgacagaccgcgaggtagagatcctaaacaagacgactgggatgtcacagtcaactgagctcctcccagatgccacggatgaagaggtcgcgccccccaagcctcctctgcctggcattcgggtggttgataatagtcctccaccagcattgccacccaagaaaagacagtcggcgccgtcccctacccgagtggctgtggtggcccccatgagccgagccaccagtggctccagtttgcctgttggaatcaataggcaggattttgatgttgactgttacgcacagaggcgactgtcaggaggcagccactcatatggtggagagtcgccccgcctctccccctgcagcagcataggcaagctcagcaagtcagacgagcagctgtcctctctggacagggacagtgggcagtgctcccggaacacaagctgtgaaacactagaccactatgatcccgactatgaattcctccagcaagacctctctaacgcagaccagatacctcagcagacggcctggaaccttagcccgttgccagagtctttgggggagtctgggtctccatttcttggccctcctttccagctgcctcttggcggccatccccagccagacggacctctggccccagggcagcagacagatacgccacctgctctccccgagaagaagcgcaggagcgcagcctcccagacggcggacggctctggctgcagggtgtcctacgagcggcatccctcgcagtatgacaacatctctggggaggacctgcagagcacagccccgatcccatccgtcccctacgcgccctttgctgctattctgccctttcagcatggaggttcctcagcccctgtcgaatttgtgggtgattttactgctcctgagtcaaccggtgacccagaaaaaccacctcctctaccagagaagaaaaacaaacacatgctggcctacatgcagttgctggaggactactcggagccgcagccctctatgttctaccagacgccacagaacgagcacatctaccagcagaagaacaagctcctcatggaggtatacggcttcagcgactccttcagtggggtggactccgtgcaggagctggccccgccgcccgccctaccccccaagcagcggcagctggagccaccggctgggaaagacggacatcccagagatccctcagcggtcagcggcgtccctgggaaggacagcagagacggcagtgagagggccccaaagtcaccagatgctctggagtcggctcagtcggaggaggaagtggacgagctgtccctcattgaccacaacgaaattatgtccaggctgacgctcaagcaggagggtgatgacgggccggacgtccgcggaggatctggggacatcttactggtccatgctactgagactgacaggaaagatttggtgttgtactgcgaggcattcctgaccacctacaggaccttcatctccccagaggagctcatcaagaagctgcagtacagatatgagaaattctctccctttgccgacacattcaagaagcgcgtcagcaagaacacgttcttcgtgctggtacgggtggtggatgagctctgcctggtggagttgacagaagagatcctgaagctgctgatggaactggtcttccgcctggtgtgcaatggggagctgagcctggcccgtgtgctccggaagaacatcctggacaaggtggaccagaagaagctactcaggtgtgccacctccagccagcccctggcagcccggggggtagcagccaggccggggaccttgcacgactttcacagccatgagatagcggagcagctaacgctgctggatgctgagctcttctataaaatagagattcctgaggttttgctttgggcaaaagagcagaatgaggagaagagccccaacttgacccagttcacggagcacttcaacaacatgtcctactgggtccggtccataatcatgttacaggaaaaggcccaggacagggaacggctgctcttgaagttcatcaagatcatgaagcacttgcggaagctgaataacttcaactcctacttggccatcctctctgccctggactcggcgcccatccgcaggctggagtggcagaagcagacttcagagggcctggccgagtactgcacactgatcgacagctcgtcctccttccgagcctaccgggccgccctctcggaggtggaaccgccgtgcatcccgtacctggggctgatcctgcaggacctgaccttcgttcacctgggaaacccagactacatcgacgggaaagtgaacttctccaagcggtggcagcagttcaacatcctcgacagcatgcgctgcttccagcaggcgcactatgacatgcggaggaacgacgacattataaacttcttcaatgacttcagtgaccacctggctgaggaggccctatgggaactgtctctgaaaattaaacccaggaacataacaaggagaaaaacagaccgggaagagaagacctaggagcagacgccgggatccaggagaatgctcgaggggcgcagagggcagctcccagaccggagaggaccttggacctgttaggcgcatggcaggagtcccggcctcggagccatgaggctggccagccctcagcggggccgggcgggagctggagcctgccagccgcttcctgcctccttcctctgtgggagcagacccgtgggcctcagggcagccagcaggcaggtcttgttgccaatttacaaaccggtggttttctggtttggttttgttttctgcttttacttccatctctcccctcttgaccttccacccactcccctccagggagagagcagcagagacctcatcagcagaccaaggaagtggtgggtgctccccctccctaagctccagggtccctgaatcttctgaaatctcaaatgagtggaggcctcctggggtggcctgtcctgcaggggccctggaatgggggcaagcagctgggtgggcagaatgcagagtagactcgggggaggatcctttcactttccgcttccccttctgatgcatggaggatggtgtgagcttttcagcaggcccggaaaggtacgcaggtgacgccttagcagccccgcagctggtgctctgccccgcggtactggcgccatcagggcctcccttgcccgcctgagagcagcagcagtctctgtcatcccgtcgccccttaccccccaccccaggccactgggcccctcccacaccacctggggagctgagaagaggaggctggagtaagggaggacttgatcatccaagaaatactttttattgctgggagtcttctgaacctcaccaaactgaggccagagctgagctcctgggggagttaattcagaggggagaggccagcacctccctcctccatcgctcgctgtgtgccttaaactccatctcatgtccctccccatcccctggctttccctccctccttgccccatcctgggccagccagcagggctcctcctctggctcttcagacctttcagccagtgctgtcagtgcccctgggagggaagggcatccctgaggcacccgaatggtccctcagggtgcagggaggcagaagcctggccacagaggagcctcctaaggcagcagctgcagcaagcgcaccctctccccactctccccacgccagagcggcttccagagcagatgctgtttccatcctcctcgtcaaaaccattctcgctgctgagcttgacaatctgggcaaggcttgtggggcgcttgacaaacagaatctgccctgtgccgcctggttccgtggcctccagcatgagcctgcaggcagggcgctgcgggaacccagttgtgctgccccagcccatgcctccgggtctgctgtgcatgaatgagtgctcacttgtcccgggtttaggacgtggtcaagtgaacagcagggtctaactgtgcttacttagcccagttcaaacagaacaaaggaaaaatatagaaagcaacatctgttgatcatttaggtttttttttaaaccaccatgtcactttgagtccttcatgggtttttgaacagcatttatcaagaagaaaatgtgggctttttcccctctcccgtgttttgtttgtcctgtagatagagggaggaaagccgtgcagtggcaggcgggaccccctctggtggcgggaccccctcttgcggtggtcttgcggggccagccgggacctgtcactttattatttaaggagtgtgtgtgtagagtcgctggcttattaacagtattgtgtgtgggttgggtttttagtttgttccttctttttgaagtcccttcatttcaatccttgactctctctccccttcccttgcccagctctgttgaatgctgctgtgcgcgtgtgagggccgctctgcacacagggcccttgggttgtgtgaactgaaattctccctgtatttgtgagactcgcaggagtccccatctgtagcacaggcaatgccagtgccatgctgcagcctcagaaaccaggcctctcactccagcagcaggcagaaccgtgtctgtggtcgggtgctgtccacagctctgtctgccttgttcttgggcttgagctggatagaggtggggtctcttcaccttccctgaattcagaacagaccctgtgcctggccccagtgtgcccaggcaattccccaggccctcattgggagcccttggtgttctgagcagcagggcccaggcagcacatgagcagtgcccaggggctccctgcgtgaggacggcaaggtgcgatgtatgtctaacttattgatggcaggcagccccctgtgccccctaagcctggccctggttattgctgagctctgtgctcagtgctgcggcctggccgtggctcgtctgttcctttggggggcccgggcgggttgtgggaatcagtcttcacagacagacgtgagccaggcggaggactcgttccttgcagaggtcagtcctcacctgcaggtgtcggggtgggggggggcaaggaggggcaggcacacaccatgtctgacctgaacccgattctggggagcatcttcccgctccggccccacgacctccacagggttacattgtaatatatatgccccagctaacctgtctgatggtggcatcttcctgcagacatttcaaacatgtaacttttatatgaaaaaaaataaacacagatgaaagctgcccaatgcca

SEQ ID NO: 303882 - DNA, 6012 bp, Homo sapiens
gcggccgcgcggagcccgccatgccggcgcgggtctgaggcgtggcgagccagggccgaggcgagcggcgggcgcgccgcccctgtcgccccgcggcggcccggcccgggcccgatgagcggcggcctcggcctccggcgcagcccggaaatgtccggcaagatcgagaaagcagactctcagcgttctcatctctcttccttcaccatgaagctgatggacaaattccactcacccaaaatcaagagaacgccatcaaagaagggaaaaccagctgaggtgtccgtaaagattccagagaagcctgtgaacaaaaacctgagctggctggaggagaaagagaaggaagttgtcagtgccctgcgctactttaagaccattgtggacaaaatggcaattgataagaaggtactggagatgcttccagggtcagccagcaaggtgctggaggccatcttacccctggtgcagaacgatcctcgaattcagcacagctcagccctctcttcctgctatagccgagtgtaccaaagcctcgccaacctcattcgctggtctgaccaagtgatgctggaaggcgtgaactcagaagacaaggagatggtgacgactgtgaagggggtcatcaaggctgtgctggatggagtgaaggagctggtcaggctcaccatcgagaagcagggacgtccgtctccgacgagccccgtgaagcccagttcccctgccagcaagcctgatggcccagcagagctccccctgacagaccgcgaggtagagatcctaaacaagacgactgggatgtcacagtcaactgagctcctcccagatgccacggatgaagaggtcgcgccccccaagcctcctctgcctggcattcgggtggttgataatagtcctccaccagcattgccacccaagaaaagacagtcggcgccgtcccctacccgagtggctgtggtggcccccatgagccgagccaccagtggctccagtttgcctgttggaatcaataggcaggattttgatgttgactgttacgcacagaggcgactgtcaggaggcagccactcatatggtggagagtcgccccgcctctccccctgcagcagcataggcaagctcagcaagtcagacgagcagctgtcctctctggacagggacagtgggcagtgctcccggaacacaagctgtgaaacactagaccactatgatcccgactatgaattcctccagcaagacctctctaacgcagaccagatacctcagcagacggcctggaaccttagcccgttgccagagtctttgggggagtctgggtctccatttcttggccctcctttccagctgcctcttggcggccatccccagccagacggacctctggccccagggcagcagacagatacgccacctgctctccccgagaagaagcgcaggagcgcagcctcccagacggcggacggctctggctgcagggtgtcctacgagcggcatccctcgcagtatgacaacatctctggggaggacctgcagagcacagccccgatcccatccgtcccctacgcgccctttgctgctattctgccctttcagcatggaggttcctcagcccctgtcgaatttgtgggtgattttactgctcctgagtcaaccggtgacccagaaaaaccacctcctctaccagagaagaaaaacaaacacatgctggcctacatgcagttgctggaggactactcggagccgcagccctctatgttctaccagacgccacagaacgagcacatctaccagcagaagaacaagctcctcatggaggtatacggcttcagcgactccttcagtggggtggactccgtgcaggagctggccccgccgcccgccctaccccccaagcagcggcagctggagccaccggctgggaaagacggacatcccagagatccctcagcggtcagcggcgtccctgggaaggacagcagagacggcagtgagagggccccaaagtcaccagatgctctggagtcggctcagtcggaggaggaagtggacgagctgtccctcattgaccacaacgaaattatgtccaggctgacgctcaagcaggagggtgatgacgggccggacgtccgcggaggatctggggacatcttactggtccatgctactgagactgacaggaaagatttggtgttgtactgcgaggcattcctgaccacctacaggaccttcatctccccagaggagctcatcaagaagctgcagtacagatatgagaaattctctccctttgccgacacattcaagaagcgcgtcagcaagaacacgttcttcgtgctggtacgggtggtggatgagctctgcctggtggagttgacagaagagatcctgaagctgctgatggaactggtcttccgcctggtgtgcaatggggagctgagcctggcccgtgtgctccggaagaacatcctggacaaggtggaccagaagaagctactcaggtgtgccacctccagccagcccctggcagcccggggggtagcagccaggccggggaccttgcacgactttcacagccatgagatagcggagcagctaacgctgctggatgctgagctcttctataaaatagagattcctgaggttttgctttgggcaaaagagcagaatgaggagaagagccccaacttgacccagttcacggagcacttcaacaacatgtcctactgggtccggtccataatcatgttacaggaaaaggcccaggacagggaacggctgctcttgaagttcatcaagatcatgaagcacttgcggaagctgaataacttcaactcctacttggccatcctctctgccctggactcggcgcccatccgcaggctggagtggcagaagcagacttcagagggcctggccgagtactgcacactgatcgacagctcgtcctccttccgagcctaccgggccgccctctcggaggtggaaccgccgtgcatcccgtacctggggctgatcctgcaggacctgaccttcgttcacctgggaaacccagactacatcgacgggaaagtgaacttctccaagcggtggcagcagttcaacatcctcgacagcatgcgctgcttccagcaggcgcactatgacatgcggaggaacgacgacattataaacttcttcaatgacttcagtgaccacctggctgaggaggccctatgggaactgtctctgaaaattaaacccaggaacataacaaggagaaaaacagaccgggaagagaagacctaggagcagacgccgggatccaggagaatgctcgaggggcgcagagggcagctcccagaccggagaggaccttggacctgttaggcgcatggcaggagtcccggcctcggagccatgaggctggccagccctcagcggggccgggcgggagctggagcctgccagccgcttcctgcctccttcctctgtgggagcagacccgtgggcctcagggcagccagcaggcaggtcttgttgccaatttacaaaccggtggttttctggtttggttttgttttctgcttttacttccatctctcccctcttgaccttccacccactcccctccagggagagagcagcagagacctcatcagcagaccaaggaagtggtgggtgctccccctccctaagctccagggtccctgaatcttctgaaatctcaaatgagtggaggcctcctggggtggcctgtcctgcaggggccctggaatgggggcaagcagctgggtgggcagaatgcagagtagactcgggggaggatcctttcactttccgcttccccttctgatgcatggaggatggtgtgagcttttcagcaggcccggaaaggtacgcaggtgacgccttagcagccccgcagctggtgctctgccccgcggtactggcgccatcagggcctcccttgcccgcctgagagcagcagcagtctctgtcatcccgtcgccccttaccccccaccccaggccactgggcccctcccacaccacctggggagctgagaagaggaggctggagtaagggaggacttgatcatccaagaaatactttttattgctgggagtcttctgaacctcaccaaactgaggccagagctgagctcctgggggagttaattcagaggggagaggccagcacctccctcctccatcgctcgctgtgtgccttaaactccatctcatgtccctccccatcccctggctttccctccctccttgccccatcctgggccagccagcagggctcctcctctggctcttcagacctttcagccagtgctgtcagtgcccctgggagggaagggcatccctgaggcacccgaatggtccctcagggtgcagggaggcagaagcctggccacagaggagcctcctaaggcagcagctgcagcaagcgcaccctctccccactctccccacgccagagcggcttccagagcagatgctgtttccatcctcctcgtcaaaaccattctcgctgctgagcttgacaatctgggcaaggcttgtggggcgcttgacaaacagaatctgccctgtgccgcctggttccgtggcctccagcatgagcctgcaggcagggcgctgcgggaacccagttgtgctgccccagcccatgcctccgggtctgctgtgcatgaatgagtgctcacttgtcccgggtttaggacgtggtcaagtgaacagcagggtctaactgtgcttacttagcccagttcaaacagaacaaaggaaaaatatagaaagcaacatctgttgatcatttaggtttttttttaaaccaccatgtcactttgagtccttcatgggtttttgaacagcatttatcaagaagaaaatgtgggctttttcccctctcccgtgttttgtttgtcctgtagatagagggaggaaagccgtgcagtggcaggcgggaccccctctggtggcgggaccccctcttgcggtggtcttgcggggccagccgggacctgtcactttattatttaaggagtgtgtgtgtagagtcgctggcttattaacagtattgtgtgtgggttgggtttttagtttgttccttctttttgaagtcccttcatttcaatccttgactctctctccccttcccttgcccagctctgttgaatgctgctgtgcgcgtgtgagggccgctctgcacacagggcccttgggttgtgtgaactgaaattctccctgtatttgtgagactcgcaggagtccccatctgtagcacaggcaatgccagtgccatgctgcagcctcagaaaccaggcctctcactccagcagcaggcagaaccgtgtctgtggtcgggtgctgtccacagctctgtctgccttgttcttgggcttgagctggatagaggtggggtctcttcaccttccctgaattcagaacagaccctgtgcctggccccagtgtgcccaggcaattccccaggccctcattgggagcccttggtgttctgagcagcagggcccaggcagcacatgagcagtgcccaggggctccctgcgtgaggacggcaaggtgcgatgtatgtctaacttattgatggcaggcagccccctgtgccccctaagcctggccctggttattgctgagctctgtgctcagtgctgcggcctggccgtggctcgtctgttcctttggggggcccgggcgggttgtgggaatcagtcttcacagacagacgtgagccaggcggaggactcgttccttgcagaggtcagtcctcacctgcaggtgtcggggtgggggggggcaaggaggggcaggcacacaccatgtctgacctgaacccgattctggggagcatcttcccgctccggccccacgacctccacagggttacattgtaatatatatgccccagctaacctgtctgatggtggcatcttcctgcagacatttcaaacatgtaacttttatatgaaaaaaaataaacacagatgaaagctgcccaatgcca

SEQ ID NO: 303883 - DNA, 5557 bp, Homo sapiens
ggattataggtgtgagccactgcgcccggcctggagcattttagagaacccttagatcattttcagatgaggaaattgaggtgcaaagttgggggcacagccaagctccagtagctcattagcaaccaaaccagaaccccagggttctatatccagggagcctgctcttcagccccacctcacccactgtgttcttcctggtcacgtcctcaccctctcagggcctgtgtgtgctctgtcccgcctttgaccttctgtaaccccaagttcttcccaattctccagcccagcagagctccccctgacagaccgcgaggtagagatcctaaacaagacgactgggatgtcacagtcaactgagctcctcccagatgccacggatgaagaggtcgcgccccccaagcctcctctgcctggcattcgggtggttgataatagtcctccaccagcattgccacccaagaaaagacagtcggcgccgtcccctacccgagtggctgtggtggcccccatgagccgagccaccagtggctccagtttgcctgttggaatcaataggcaggattttgatgttgactgttacgcacagaggcgactgtcaggaggcagccactcatatggtggagagtcgccccgcctctccccctgcagcagcataggcaagctcagcaagtcagacgagcagctgtcctctctggacagggacagtgggcagtgctcccggaacacaagctgtgaaacactagaccactatgatcccgactatgaattcctccagcaagacctctctaacgcagaccagatacctcagcagacggcctggaaccttagcccgttgccagagtctttgggggagtctgggtctccatttcttggccctcctttccagctgcctcttggcggccatccccagccagacggacctctggccccagggcagcagacagatacgccacctgctctccccgagaagaagcgcaggagcgcagcctcccagacggcggacggctctggctgcagggtgtcctacgagcggcatccctcgcagtatgacaacatctctggggaggacctgcagagcacagccccgatcccatccgtcccctacgcgccctttgctgctattctgccctttcagcatggaggttcctcagcccctgtcgaatttgtgggtgattttactgctcctgagtcaaccggtgacccagaaaaaccacctcctctaccagagaagaaaaacaaacacatgctggcctacatgcagttgctggaggactactcggagccgcagccctctatgttctaccagacgccacagaacgagcacatctaccagcagaagaacaagctcctcatggaggtatacggcttcagcgactccttcagtggggtggactccgtgcaggagctggccccgccgcccgccctaccccccaagcagcggcagctggagccaccggctgggaaagacggacatcccagagatccctcagcggtcagcggcgtccctgggaaggacagcagagacggcagtgagagggccccaaagtcaccagatgctctggagtcggctcagtcggaggaggaagtggacgagctgtccctcattgaccacaacgaaattatgtccaggctgacgctcaagcaggagggtgatgacgggccggacgtccgcggaggatctggggacatcttactggtccatgctactgagactgacaggaaagatttggtgttgtactgcgaggcattcctgaccacctacaggaccttcatctccccagaggagctcatcaagaagctgcagtacagatatgagaaattctctccctttgccgacacattcaagaagcgcgtcagcaagaacacgttcttcgtgctggtacgggtggtggatgagctctgcctggtggagttgacagaagagatcctgaagctgctgatggaactggtcttccgcctggtgtgcaatggggagctgagcctggcccgtgtgctccggaagaacatcctggacaaggtggaccagaagaagctactcaggtgtgccacctccagccagcccctggcagcccggggggtagcagccaggccggggaccttgcacgactttcacagccatgagatagcggagcagctaacgctgctggatgctgagctcttctataaaatagagattcctgaggttttgctttgggcaaaagagcagaatgaggagaagagccccaacttgacccagttcacggagcacttcaacaacatgtcctactgggtccggtccataatcatgttacaggaaaaggcccaggacagggaacggctgctcttgaagttcatcaagatcatgaagcacttgcggaagctgaataacttcaactcctacttggccatcctctctgccctggactcggcgcccatccgcaggctggagtggcagaagcagacttcagagggcctggccgagtactgcacactgatcgacagctcgtcctccttccgagcctaccgggccgccctctcggaggtggaaccgccgtgcatcccgtacctggggctgatcctgcaggacctgaccttcgttcacctgggaaacccagactacatcgacgggaaagtgaacttctccaagcggtggcagcagttcaacatcctcgacagcatgcgctgcttccagcaggcgcactatgacatgcggaggaacgacgacattataaacttcttcaatgacttcagtgaccacctggctgaggaggccctatgggaactgtctctgaaaattaaacccaggaacataacaaggagaaaaacagaccgggaagagaagacctaggagcagacgccgggatccaggagaatgctcgaggggcgcagagggcagctcccagaccggagaggaccttggacctgttaggcgcatggcaggagtcccggcctcggagccatgaggctggccagccctcagcggggccgggcgggagctggagcctgccagccgcttcctgcctccttcctctgtgggagcagacccgtgggcctcagggcagccagcaggcaggtcttgttgccaatttacaaaccggtggttttctggtttggttttgttttctgcttttacttccatctctcccctcttgaccttccacccactcccctccagggagagagcagcagagacctcatcagcagaccaaggaagtggtgggtgctccccctccctaagctccagggtccctgaatcttctgaaatctcaaatgagtggaggcctcctggggtggcctgtcctgcaggggccctggaatgggggcaagcagctgggtgggcagaatgcagagtagactcgggggaggatcctttcactttccgcttccccttctgatgcatggaggatggtgtgagcttttcagcaggcccggaaaggtacgcaggtgacgccttagcagccccgcagctggtgctctgccccgcggtactggcgccatcagggcctcccttgcccgcctgagagcagcagcagtctctgtcatcccgtcgccccttaccccccaccccaggccactgggcccctcccacaccacctggggagctgagaagaggaggctggagtaagggaggacttgatcatccaagaaatactttttattgctgggagtcttctgaacctcaccaaactgaggccagagctgagctcctgggggagttaattcagaggggagaggccagcacctccctcctccatcgctcgctgtgtgccttaaactccatctcatgtccctccccatcccctggctttccctccctccttgccccatcctgggccagccagcagggctcctcctctggctcttcagacctttcagccagtgctgtcagtgcccctgggagggaagggcatccctgaggcacccgaatggtccctcagggtgcagggaggcagaagcctggccacagaggagcctcctaaggcagcagctgcagcaagcgcaccctctccccactctccccacgccagagcggcttccagagcagatgctgtttccatcctcctcgtcaaaaccattctcgctgctgagcttgacaatctgggcaaggcttgtggggcgcttgacaaacagaatctgccctgtgccgcctggttccgtggcctccagcatgagcctgcaggcagggcgctgcgggaacccagttgtgctgccccagcccatgcctccgggtctgctgtgcatgaatgagtgctcacttgtcccgggtttaggacgtggtcaagtgaacagcagggtctaactgtgcttacttagcccagttcaaacagaacaaaggaaaaatatagaaagcaacatctgttgatcatttaggtttttttttaaaccaccatgtcactttgagtccttcatgggtttttgaacagcatttatcaagaagaaaatgtgggctttttcccctctcccgtgttttgtttgtcctgtagatagagggaggaaagccgtgcagtggcaggcgggaccccctctggtggcgggaccccctcttgcggtggtcttgcggggccagccgggacctgtcactttattatttaaggagtgtgtgtgtagagtcgctggcttattaacagtattgtgtgtgggttgggtttttagtttgttccttctttttgaagtcccttcatttcaatccttgactctctctccccttcccttgcccagctctgttgaatgctgctgtgcgcgtgtgagggccgctctgcacacagggcccttgggttgtgtgaactgaaattctccctgtatttgtgagactcgcaggagtccccatctgtagcacaggcaatgccagtgccatgctgcagcctcagaaaccaggcctctcactccagcagcaggcagaaccgtgtctgtggtcgggtgctgtccacagctctgtctgccttgttcttgggcttgagctggatagaggtggggtctcttcaccttccctgaattcagaacagaccctgtgcctggccccagtgtgcccaggcaattccccaggccctcattgggagcccttggtgttctgagcagcagggcccaggcagcacatgagcagtgcccaggggctccctgcgtgaggacggcaaggtgcgatgtatgtctaacttattgatggcaggcagccccctgtgccccctaagcctggccctggttattgctgagctctgtgctcagtgctgcggcctggccgtggctcgtctgttcctttggggggcccgggcgggttgtgggaatcagtcttcacagacagacgtgagccaggcggaggactcgttccttgcagaggtcagtcctcacctgcaggtgtcggggtgggggggggcaaggaggggcaggcacacaccatgtctgacctgaacccgattctggggagcatcttcccgctccggccccacgacctccacagggttacattgtaatatatatgccccagctaacctgtctgatggtggcatcttcctgcagacatttcaaacatgtaacttttatatgaaaaaaaataaacacagatgaaagctgcccaatgcca

SEQ ID NO: 303884 - DNA, 4348 bp, Homo sapiens
  misc_feature (4)..(4): n is a, c, g, or t
ggcnccagatcctccgcggacgtccggccgttcatcaccctcctgcttgagcgtcagcctggacataatttcgttgtggtcaatgagggacagctcgctcacttccttctcctctgtctcccactgtgtccagcaaactaaagtggccttcacccccgaggacggcagtgccgctcagggcctcagtgtgtccgtctctaactcctttctcagccggcacggcagcttgcccgtgccctcggagccaccggctgggaaagacggacatcccagagatccctcagcggtcagcggcgtccctgggaaggacagcagagacggcagtgagagggccccaaagtcaccagatgctctggagtcggctcagtcggaggaggaagtggacgagctgtccctcattgaccacaacgaaattatgtccaggctgacgctcaagcaggagggtgatgacgggccggacgtccgcggaggatctggggacatcttactggtccatgctactgagactgacaggaaagatttggtgttgtactgcgaggcattcctgaccacctacaggaccttcatctccccagaggagctcatcaagaagctgcagtacagatatgagaaattctctccctttgccgacacattcaagaagcgcgtcagcaagaacacgttcttcgtgctggtacgggtggtggatgagctctgcctggtggagttgacagaagagatcctgaagctgctgatggaactggtcttccgcctggtgtgcaatggggagctgagcctggcccgtgtgctccggaagaacatcctggacaaggtggaccagaagaagctactcaggtgtgccacctccagccagcccctggcagcccggggggtagcagccaggccggggaccttgcacgactttcacagccatgagatagcggagcagctaacgctgctggatgctgagctcttctataaaatagagattcctgaggttttgctttgggcaaaagagcagaatgaggagaagagccccaacttgacccagttcacggagcacttcaacaacatgtcctactgggtccggtccataatcatgttacaggaaaaggcccaggacagggaacggctgctcttgaagttcatcaagatcatgaagcacttgcggaagctgaataacttcaactcctacttggccatcctctctgccctggactcggcgcccatccgcaggctggagtggcagaagcagacttcagagggcctggccgagtactgcacactgatcgacagctcgtcctccttccgagcctaccgggccgccctctcggaggtggaaccgccgtgcatcccgtacctggggctgatcctgcaggacctgaccttcgttcacctgggaaacccagactacatcgacgggaaagtgaacttctccaagcggtggcagcagttcaacatcctcgacagcatgcgctgcttccagcaggcgcactatgacatgcggaggaacgacgacattataaacttcttcaatgacttcagtgaccacctggctgaggaggccctatgggaactgtctctgaaaattaaacccaggaacataacaaggagaaaaacagaccgggaagagaagacctaggagcagacgccgggatccaggagaatgctcgaggggcgcagagggcagctcccagaccggagaggaccttggacctgttaggcgcatggcaggagtcccggcctcggagccatgaggctggccagccctcagcggggccgggcgggagctggagcctgccagccgcttcctgcctccttcctctgtgggagcagacccgtgggcctcagggcagccagcaggcaggtcttgttgccaatttacaaaccggtggttttctggtttggttttgttttctgcttttacttccatctctcccctcttgaccttccacccactcccctccagggagagagcagcagagacctcatcagcagaccaaggaagtggtgggtgctccccctccctaagctccagggtccctgaatcttctgaaatctcaaatgagtggaggcctcctggggtggcctgtcctgcaggggccctggaatgggggcaagcagctgggtgggcagaatgcagagtagactcgggggaggatcctttcactttccgcttccccttctgatgcatggaggatggtgtgagcttttcagcaggcccggaaaggtacgcaggtgacgccttagcagccccgcagctggtgctctgccccgcggtactggcgccatcagggcctcccttgcccgcctgagagcagcagcagtctctgtcatcccgtcgccccttaccccccaccccaggccactgggcccctcccacaccacctggggagctgagaagaggaggctggagtaagggaggacttgatcatccaagaaatactttttattgctgggagtcttctgaacctcaccaaactgaggccagagctgagctcctgggggagttaattcagaggggagaggccagcacctccctcctccatcgctcgctgtgtgccttaaactccatctcatgtccctccccatcccctggctttccctccctccttgccccatcctgggccagccagcagggctcctcctctggctcttcagacctttcagccagtgctgtcagtgcccctgggagggaagggcatccctgaggcacccgaatggtccctcagggtgcagggaggcagaagcctggccacagaggagcctcctaaggcagcagctgcagcaagcgcaccctctccccactctccccacgccagagcggcttccagagcagatgctgtttccatcctcctcgtcaaaaccattctcgctgctgagcttgacaatctgggcaaggcttgtggggcgcttgacaaacagaatctgccctgtgccgcctggttccgtggcctccagcatgagcctgcaggcagggcgctgcgggaacccagttgtgctgccccagcccatgcctccgggtctgctgtgcatgaatgagtgctcacttgtcccgggtttaggacgtggtcaagtgaacagcagggtctaactgtgcttacttagcccagttcaaacagaacaaaggaaaaatatagaaagcaacatctgttgatcatttaggtttttttttaaaccaccatgtcactttgagtccttcatgggtttttgaacagcatttatcaagaagaaaatgtgggctttttcccctctcccgtgttttgtttgtcctgtagatagagggaggaaagccgtgcagtggcaggcgggaccccctctggtggcgggaccccctcttgcggtggtcttgcggggccagccgggacctgtcactttattatttaaggagtgtgtgtgtagagtcgctggcttattaacagtattgtgtgtgggttgggtttttagtttgttccttctttttgaagtcccttcatttcaatccttgactctctctccccttcccttgcccagctctgttgaatgctgctgtgcgcgtgtgagggccgctctgcacacagggcccttgggttgtgtgaactgaaattctccctgtatttgtgagactcgcaggagtccccatctgtagcacaggcaatgccagtgccatgctgcagcctcagaaaccaggcctctcactccagcagcaggcagaaccgtgtctgtggtcgggtgctgtccacagctctgtctgccttgttcttgggcttgagctggatagaggtggggtctcttcaccttccctgaattcagaacagaccctgtgcctggccccagtgtgcccaggcaattccccaggccctcattgggagcccttggtgttctgagcagcagggcccaggcagcacatgagcagtgcccaggggctccctgcgtgaggacggcaaggtgcgatgtatgtctaacttattgatggcaggcagccccctgtgccccctaagcctggccctggttattgctgagctctgtgctcagtgctgcggcctggccgtggctcgtctgttcctttggggggcccgggcgggttgtgggaatcagtcttcacagacagacgtgagccaggcggaggactcgttccttgcagaggtcagtcctcacctgcaggtgtcggggtgggggggggcaaggaggggcaggcacacaccatgtctgacctgaacccgattctggggagcatcttcccgctccggccccacgacctccacagggttacattgtaatatatatgccccagctaacctgtctgatggtggcatcttcctgcagacatttcaaacatgtaacttttatatgaaaaaaaataaacacagatgaaagctgcccaatgcca

SEQ ID NO: 303885 - DNA, 5071 bp, Homo sapiens
  misc_feature (4987)..(4987): n is a, c, g, or t
  misc_feature (5025)..(5025): n is a, c, g, or t
gaattcccttttctgggcaccgccttctgctagggggttgtagatgaaagtgcctgctcccagagaagcttgtctaacctagcacagtttctaagctacccaggctgccagaccgagcgaccgtgctgccatggacacagactctcagcgttctcatctctcttccttcaccatgaagctgatggacaaattccactcacccaaaatcaagagaacgccatcaaagaagggaaaaccagctgaggtgtccgtaaagattccagagaagcctgtgaacaaagaggcaacagacagatttctaccagagggctaccctctccccttggatctggagcagcaggcagtagaatttatgtccaccagtgctgtggcttccaggtctcaaaggcagaagaacctgagctggctggaggagaaagagaaggaagttgtcagtgccctgcgctactttaagaccattgtggacaaaatggcaattgataagaaggtactggagatgcttccagggtcagccagcaaggtgctggaggccatcttacccctggtgcagaacgatcctcgaattcagcacagctcagccctctcttcctgctatagccgagtgtaccaaagcctcgccaacctcattcgctggtctgaccaagtgatgctggaaggcgtgaactcagaagacaaggagatggtgacgactgtgaagggggtcatcaaggctgtgctggatggagtgaaggagctggtcaggctcaccatcgagaagcagggacgtccgtctccgacgagccccgtgaagcccagttcccctgccagcaagcctgatggcccagcagagctccccctgacagaccgcgaggtagagatcctaaacaagacgactgggatgtcacagtcaactgagctcctcccagatgccacggatgaagaggtcgcgccccccaagcctcctctgcctggcattcgggtggttgataatagtcctccaccagcattgccacccaagaaaagacagtcggcgccgtcccctacccgagtggctgtggtggcccccatgagccgagccaccagtggctccagtttgcctgttggaatcaataggcaggattttgatgttgactgttacgcacagaggcgactgtcaggaggcagccactcatatggtggagagtcgccccgcctctccccctgcagcagcataggcaagctcagcaagtcagacgagcagctgtcctctctggacagggacagtgggcagtgctcccggaacacaagctgtgaaacactagaccactatgatcccgactatgaattcctccagcaagacctctctaacgcagaccagatacctcagcagacggcctggaaccttagcccgttgccagagtctttgggggagtctgggtctccatttcttggccctcctttccagctgcctcttggcggccatccccagccagacggacctctggccccagggcagcagacagatacgccacctgctctccccgagaagaagcgcaggagcgcagcctcccagacggcggacggctctggctgcagggtgtcctacgagcggcatccctcgcagtatgacaacatctctggggaggacctgcagagcacagccccgatcccatccgtcccctacgcgccctttgctgctattctgccctttcagcatggaggttcctcagcccctgtcgaatttgtgggtgattttactgctcctgagtcaaccggtgacccagaaaaaccacctcctctaccagagaagaaaaacaaacacatgctggcctacatgcagttgctggaggactactcggagccgcagccctctatgttctaccagacgccacagaacgagcacatctaccagcagaagaacaagctcctcatggaggtatacggcttcagcgactccttcagtggggtggactccgtgcaggagctggccccgccgcccgccctaccccccaagcagcggcagctggagccaccggctgggaaagacggacatcccagagatccctcagcggtcagcggcgtccctgggaaggacagcagagacggcagtgagagggccccaaagtcaccagatgctctggagtcggctcagtcggaggaggaagtggacgagctgtccctcattgaccacaacgaaattatgtccaggctgacgctcaagcaggagggtgatgacgggccggacgtccgcggaggatctggggacatcttactggtccatgctactgagactgacaggaaagatttggtgttgtactgcgaggcattcctgaccacctacaggaccttcatctccccagaggagctcatcaagaagctgcagtacagatatgagaaattctctccctttgccgacacattcaagaagcgcgtcagcaagaacacgttcttcgtgctggtacgggtggtggatgagctctgcctggtggagttgacagaagagatcctgaagctgctgatggaactggtcttccgcctggtgtgcaatggggagctgagcctggcccgtgtgctccggaagaacatcctggacaaggtggaccagaagaagctactcaggtgtgccacctccagccagcccctggcagcccggggggtagcagccaggccggggaccttgcacgactttcacagccatgagatagcggagcagctaacgctgctggatgctgagctcttctataaaatagagattcctgaggttttgctttgggcaaaagagcagaatgaggagaagagccccaacttgacccagttcacggagcacttcaacaacatgtcctactgggtccggtccataatcatgttacaggaaaaggcccaggacagggaacggctgctcttgaagttcatcaagatcatgaagcacttgcggaagctgaataacttcaactcctacttggccatcctctctgccctggactcggcgcccatccgcaggctggagtggcagaagcagacttcagagggcctggccgagtactgcacactgatcgacagctcgtcctccttccgagcctaccgggccgccctctcggaggtggaaccgccgtgcatcccgtacctggggctgatcctgcaggacctgaccttcgttcacctgggaaacccagactacatcgacgggaaagtgaacttctccaagcggtggcagcagttcaacatcctcgacagcatgcgctgcttccagcaggcgcactatgacatgcggaggaacgacgacattataaacttcttcaatgacttcagtgaccacctggctgaggaggccctatgggaactgtctctgaaaattaaacccaggaacataacaaggagaaaaacagaccgggaagagaagacctaggagcagacgccgggatccaggagaatgctcgaggggcgcagagggcagctcccagaccggagaggaccttggacctgttaggcgcatggcaggagtcccggcctcggagccatgaggctggccagccctcagcggggccgggcgggagctggagcctgccagccgcttcctgcctccttcctctgtgggagcagacccgtgggcctcagggcagccagcaggcaggtcttgttgccaatttacaaaccggtggttttctggtttggttttgttttctgcttttacttccatctctcccctcttgaccttccacccactcccctccagggagagagcagcagagacctcatcagcagaccaaggaagtggtgggtgctccccctccctaagctccagggtccctgaatcttctgaaatctcaaatgagtggaggcctcctggggtggcctgtcctgcaggggccctggaatgggggcaagcagctgggtgggcagaatgcagagtagactcgggggaggatcctttcactttccgcttccccttctgatgcatggaggatggtgtgagcttttcagcaggcccggaaaggtacgcaggtgacgccttagcagccccgcagctggtgctctgccccgcggtactggcgccatcagggcctcccttgcccgcctgagagcagcagcagtctctgtcatcccgtcgccccttaccccccaccccaggccactgggcccctcccacaccacctggggagctgagaagaggaggctggagtaagggaggacttgatcatccaagaaatactttttattgctgggagtcttctgaacctcaccaaactgaggccagagctgagctcctgggggagttaattcagaggggagaggccagcacctccctcctccatcgctcgctgtgtgccttaaactccatctcatgtccctccccatcccctggctttccctccctccttgccccatcctgggccagccagcagggctcctcctctggctcttcagacctttcagccagtgctgtcagtgcccctgggagggaagggcatccctgaggcacccgaatggtccctcagggtgcagggaggcagaagcctggccacagaggagcctcctaaggcagcagctgcagcaagcgcaccctctccccactctccccacgccagagcggcttccagagcagatgctgtttccatcctcctcgtcaaaaccattctcgctgctgagcttgacaatctgggcaaggcttgtggggcgcttgacaaacagaatctgccctgtgccgcctggttccgtggcctccagcatgagcctgcaggcagggcgctgcgggaacccagttgtgctgccccagcccatgcctccgggtctgctgtgcatgaatgagtgctcacttgtcccgggtttaggacgtggtcaagtgaacagcagggtctaactgtgcttacttagcccagttcaaacagaacaaaggaaaaatatagaaagcaacatctgttgatcatttaggtttttttttaaaccaccatgtcactttgagtccttcatgggtttttgaacagcatttatcaagaagaaaatgtgggctttttcccctctcccgtctgtnccgacaagatggcggacggggagctgaacgtggacagnctcatcacccggctgctggaggtacgaggatgtcgtccaggaaaga

SEQ ID NO: 303886 - DNA, 5656 bp, Homo sapiens
gcgtggcataagggtctgtatgaaaatgtttctcctggcatgccccagaatggttcatttatgactttcagcattttgatcacctgattccccatttctcctgcggagaaaagtggtattaaaagtatttggacataaaattcatcttgcaagccgctgttgtgctgatgagtaataaagtgtcaaaaggatgctgaggaaagagcttcttaatatagaccatgcctgagaggcaccggtagggcgataacaagccctttcttctgatttcctccctggggccaaagggattttgaaaggcagaaggcaaagacttgagaatgagattcctcaggcttcccttgtgaggctgcctgggttctgccgctgggtggtttgggatgtccaagagatatcccctttcagccagtgactcggtcctcagttgctgctccggaaagacgctggggctgggaagggccctgtgtcctctggctttaaaatgggcaatgctattgaaaaacagaagcccttgaaacgaagtcatctgtacccctggaaacaagactctcagcgttctcatctctcttccttcaccatgaagctgatggacaaattccactcacccaaaatcaagagaacgccatcaaagaagggaaaaccagctgaggtgtccgtaaagattccagagaagcctgtgaacaaagaggcaacagacagatttctaccagagggctaccctctccccttggatctggagcagcaggcagtagaatttatgtccaccagtgctgtggcttccaggtctcaaaggcagaagaacctgagctggctggaggagaaagagaaggaagttgtcagtgccctgcgctactttaagaccattgtggacaaaatggcaattgataagaaggtactggagatgcttccagggtcagccagcaaggtgctggaggccatcttacccctggtgcagaacgatcctcgaattcagcacagctcagccctctcttcctgctatagccgagtgtaccaaagcctcgccaacctcattcgctggtctgaccaagtgatgctggaaggcgtgaactcagaagacaaggagatggtgacgactgtgaagggggtcatcaaggctgtgctggatggagtgaaggagctggtcaggctcaccatcgagaagcagggacgtccgtctccgacgagccccgtgaagcccagttcccctgccagcaagcctgatggcccagcagagctccccctgacagaccgcgaggtagagatcctaaacaagacgactgggatgtcacagtcaactgagctcctcccagatgccacggatgaagaggtcgcgccccccaagcctcctctgcctggcattcgggtggttgataatagtcctccaccagcattgccacccaagaaaagacagtcggcgccgtcccctacccgagtggctgtggtggcccccatgagccgagccaccagtggctccagtttgcctgttggaatcaataggcaggattttgatgttgactgttacgcacagaggcgactgtcaggaggcagccactcatatggtggagagtcgccccgcctctccccctgcagcagcataggcaagctcagcaagtcagacgagcagctgtcctctctggacagggacagtgggcagtgctcccggaacacaagctgtgaaacactagaccactatgatcccgactatgaattcctccagcaagacctctctaacgcagaccagatacctcagcagacggcctggaaccttagcccgttgccagagtctttgggggagtctgggtctccatttcttggccctcctttccagctgcctcttggcggccatccccagccagacggacctctggccccagggcagcagacagatacgccacctgctctccccgagaagaagcgcaggagcgcagcctcccagacggcggacggctctggctgcagggtgtcctacgagcggcatccctcgcagtatgacaacatctctggggaggacctgcagagcacagccccgatcccatccgtcccctacgcgccctttgctgctattctgccctttcagcatggaggttcctcagcccctgtcgaatttgtgggtgattttactgctcctgagtcaaccggtgacccagaaaaaccacctcctctaccagagaagaaaaacaaacacatgctggcctacatgcagttgctggaggactactcggagccgcagccctctatgttctaccagacgccacagaacgagcacatctaccagcagaagaacaagctcctcatggaggtatacggcttcagcgactccttcagtggggtggactccgtgcaggagctggccccgccgcccgccctaccccccaagcagcggcagctggagccaccggctgggaaagacggacatcccagagatccctcagcggtcagcggcgtccctgggaaggacagcagagacggcagtgagagggccccaaagtcaccagatgctctggagtcggctcagtcggaggaggaagtggacgagctgtccctcattgaccacaacgaaattatgtccaggctgacgctcaagcaggagggtgatgacgggccggacgtccgcggaggatctggggacatcttactggtccatgctactgagactgacaggaaagatttggtgttgtactgcgaggcattcctgaccacctacaggaccttcatctccccagaggagctcatcaagaagctgcagtacagatatgagaaattctctccctttgccgacacattcaagaagcgcgtcagcaagaacacgttcttcgtgctggtacgggtggtggatgagctctgcctggtggagttgacagaagagatcctgaagctgctgatggaactggtcttccgcctggtgtgcaatggggagctgagcctggcccgtgtgctccggaagaacatcctggacaaggtggaccagaagaagctactcaggtgtgccacctccagccagcccctggcagcccggggggtagcagccaggccggggaccttgcacgactttcacagccatgagatagcggagcagctaacgctgctggatgctgagctcttctataaaatagagattcctgaggttttgctttgggcaaaagagcagaatgaggagaagagccccaacttgacccagttcacggagcacttcaacaacatgtcctactgggtccggtccataatcatgttacaggaaaaggcccaggacagggaacggctgctcttgaagttcatcaagatcatgaagcacttgcggaagctgaataacttcaactcctacttggccatcctctctgccctggactcggcgcccatccgcaggctggagtggcagaagcagacttcagagggcctggccgagtactgcacactgatcgacagctcgtcctccttccgagcctaccgggccgccctctcggaggtggaaccgccgtgcatcccgtacctggggctgatcctgcaggacctgaccttcgttcacctgggaaacccagactacatcgacgggaaagtgaacttctccaagcggtggcagcagttcaacatcctcgacagcatgcgctgcttccagcaggcgcactatgacatgcggaggaacgacgacattataaacttcttcaatgacttcagtgaccacctggctgaggaggccctatgggaactgtctctgaaaattaaacccaggaacataacaaggagaaaaacagaccgggaagagaagacctaggagcagacgccgggatccaggagaatgctcgaggggcgcagagggcagctcccagaccggagaggaccttggacctgttaggcgcatggcaggagtcccggcctcggagccatgaggctggccagccctcagcggggccgggcgggagctggagcctgccagccgcttcctgcctccttcctctgtgggagcagacccgtgggcctcagggcagccagcaggcaggtcttgttgccaatttacaaaccggtggttttctggtttggttttgttttctgcttttacttccatctctcccctcttgaccttccacccactcccctccagggagagagcagcagagacctcatcaagcagatgctgtttccatcctcctcgtcaaaaccattctcgctgctgagcttgacaatctgggcaaggcttgtggggcgcttgacaaacagaatctgccctgtgccgcctggttccgtggcctccagcatgagcctgcaggcagggcgctgcgggaacccagttgtgctgccccagcccatgcctccgggtctgctgtgcatgaatgagtgctcacttgtcccgggtttaggacgtggtcaagtgaacagcagggtctaactgtgcttacttagcccagttcaaacagaacaaaggaaaaatatagaaagcaacatctgttgatcatttaggtttttttttaaaccaccatgtcactttgagtccttcatgggtttttgaacagcatttatcaagaagaaaatgtgggctttttcccctctcccgtgttttgtttgtcctgtagatagagggaggaaagccgtgcagtggcaggcgggaccccctctggtggcgggaccccctcttgcggtggtcttgcggggccagccgggacctgtcactttattatttaaggagtgtgtgtgtagagtcgctggcttattaacagtattgtgtgtgggttgggtttttagtttgttccttctttttgaagtcccttcatttcaatccttgactctctctccccttcccttgcccagctctgttgaatgctgctgtgcgcgtgtgagggccgctctgcacacagggcccttgggttgtgtgaactgaaattctccctgtatttgtgagactcgcaggagtccccatctgtagcacaggcaatgccagtgccatgctgcagcctcagaaaccaggcctctcactccagcagcaggcagaaccgtgtctgtggtcgggtgctgtccacagctctgtctgccttgttcttgggcttgagctggatagaggtggggtctcttcaccttccctgaattcagaacagaccctgtgcctggccccagtgtgcccaggcaattccccaggccctcattgggagcccttggtgttctgagcagcagggcccaggcagcacatgagcagtgcccaggggctccctgcgtgaggacggcaaggtgcgatgtatgtctaacttattgatggcaggcagccccctgtgccccctaagcctggccctggttattgctgagctctgtgctcagtgctgcggcctggccgtggctcgtctgttcctttggggggcccgggcgggttgtgggaatcagtcttcacagacagacgtgagccaggcggaggactcgttccttgcagaggtcagtcctcacctgcaggtgtcggggtgggggggggcaaggaggggcaggcacacaccatgtctgacctgaacccgattctggggagcatcttcccgctccggccccacgacctccacagggttacattgtaatatatatgccccagctaacctgtctgatggtggcatcttcctgcagacatttcaaacatgtaacttttatatgaaaaaaaataaacacagatgaaagctgcccaatgcca

SEQ ID NO: 303887 - DNA, 4160 bp, Homo sapiens
ctgggaccagagttggcctcagctcccacagcacggttctccaggcagcaccatcatcggtagaaagtgcccatgagataaaaccctttcctgtttcccctctctgatctgccgtttcctttgagagatggacagagaggacgtgtgacttctctgggacatgcaggcggagacaccagagggggttcccaagccctcggctccctcgcccatcccactccccgtgccatctcccctgcctctctcagagcaaggactcaaatccaccctggctaccaccccccagcactctgcacccagacaagcagtttgcattgtttttccctctagatttggtgttgtactgcgaggcattcctgaccacctacaggaccttcatctccccagaggagctcatcaagaagctgcagtacagatatgagaaattctctccctttgccgacacattcaagaagcgcgtcagcaagaacacgttcttcgtgctggtacgggtggtggatgagctctgcctggtggagttgacagaagagatcctgaagctgctgatggaactggtcttccgcctggtgtgcaatggggagctgagcctggcccgtgtgctccggaagaacatcctggacaaggtggaccagaagaagctactcaggtgtgccacctccagccagcccctggcagcccggggggtagcagccaggccggggaccttgcacgactttcacagccatgagatagcggagcagctaacgctgctggatgctgagctcttctataaaatagagattcctgaggttttgctttgggcaaaagagcagaatgaggagaagagccccaacttgacccagttcacggagcacttcaacaacatgtcctactgggtccggtccataatcatgttacaggaaaaggcccaggacagggaacggctgctcttgaagttcatcaagatcatgaagcacttgcggaagctgaataacttcaactcctacttggccatcctctctgccctggactcggcgcccatccgcaggctggagtggcagaagcagacttcagagggcctggccgagtactgcacactgatcgacagctcgtcctccttccgagcctaccgggccgccctctcggaggtggaaccgccgtgcatcccgtacctggggctgatcctgcaggacctgaccttcgttcacctgggaaacccagactacatcgacgggaaagtgaacttctccaagcggtggcagcagttcaacatcctcgacagcatgcgctgcttccagcaggcgcactatgacatgcggaggaacgacgacattataaacttcttcaatgacttcagtgaccacctggctgaggaggccctatgggaactgtctctgaaaattaaacccaggaacataacaaggagaaaaacagaccgggaagagaagacctaggagcagacgccgggatccaggagaatgctcgaggggcgcagagggcagctcccagaccggagaggaccttggacctgttaggcgcatggcaggagtcccggcctcggagccatgaggctggccagccctcagcggggccgggcgggagctggagcctgccagccgcttcctgcctccttcctctgtgggagcagacccgtgggcctcagggcagccagcaggcaggtcttgttgccaatttacaaaccggtggttttctggtttggttttgttttctgcttttacttccatctctcccctcttgaccttccacccactcccctccagggagagagcagcagagacctcatcagcagaccaaggaagtggtgggtgctccccctccctaagctccagggtccctgaatcttctgaaatctcaaatgagtggaggcctcctggggtggcctgtcctgcaggggccctggaatgggggcaagcagctgggtgggcagaatgcagagtagactcgggggaggatcctttcactttccgcttccccttctgatgcatggaggatggtgtgagcttttcagcaggcccggaaaggtacgcaggtgacgccttagcagccccgcagctggtgctctgccccgcggtactggcgccatcagggcctcccttgcccgcctgagagcagcagcagtctctgtcatcccgtcgccccttaccccccaccccaggccactgggcccctcccacaccacctggggagctgagaagaggaggctggagtaagggaggacttgatcatccaagaaatactttttattgctgggagtcttctgaacctcaccaaactgaggccagagctgagctcctgggggagttaattcagaggggagaggccagcacctccctcctccatcgctcgctgtgtgccttaaactccatctcatgtccctccccatcccctggctttccctccctccttgccccatcctgggccagccagcagggctcctcctctggctcttcagacctttcagccagtgctgtcagtgcccctgggagggaagggcatccctgaggcacccgaatggtccctcagggtgcagggaggcagaagcctggccacagaggagcctcctaaggcagcagctgcagcaagcgcaccctctccccactctccccacgccagagcggcttccagagcagatgctgtttccatcctcctcgtcaaaaccattctcgctgctgagcttgacaatctgggcaaggcttgtggggcgcttgacaaacagaatctgccctgtgccgcctggttccgtggcctccagcatgagcctgcaggcagggcgctgcgggaacccagttgtgctgccccagcccatgcctccgggtctgctgtgcatgaatgagtgctcacttgtcccgggtttaggacgtggtcaagtgaacagcagggtctaactgtgcttacttagcccagttcaaacagaacaaaggaaaaatatagaaagcaacatctgttgatcatttaggtttttttttaaaccaccatgtcactttgagtccttcatgggtttttgaacagcatttatcaagaagaaaatgtgggctttttcccctctcccgtgttttgtttgtcctgtagatagagggaggaaagccgtgcagtggcaggcgggaccccctctggtggcgggaccccctcttgcggtggtcttgcggggccagccgggacctgtcactttattatttaaggagtgtgtgtgtagagtcgctggcttattaacagtattgtgtgtgggttgggtttttagtttgttccttctttttgaagtcccttcatttcaatccttgactctctctccccttcccttgcccagctctgttgaatgctgctgtgcgcgtgtgagggccgctctgcacacagggcccttgggttgtgtgaactgaaattctccctgtatttgtgagactcgcaggagtccccatctgtagcacaggcaatgccagtgccatgctgcagcctcagaaaccaggcctctcactccagcagcaggcagaaccgtgtctgtggtcgggtgctgtccacagctctgtctgccttgttcttgggcttgagctggatagaggtggggtctcttcaccttccctgaattcagaacagaccctgtgcctggccccagtgtgcccaggcaattccccaggccctcattgggagcccttggtgttctgagcagcagggcccaggcagcacatgagcagtgcccaggggctccctgcgtgaggacggcaaggtgcgatgtatgtctaacttattgatggcaggcagccccctgtgccccctaagcctggccctggttattgctgagctctgtgctcagtgctgcggcctggccgtggctcgtctgttcctttggggggcccgggcgggttgtgggaatcagtcttcacagacagacgtgagccaggcggaggactcgttccttgcagaggtcagtcctcacctgcaggtgtcggggtgggggggggcaaggaggggcaggcacacaccatgtctgacctgaacccgattctggggagcatcttcccgctccggccccacgacctccacagggttacattgtaatatatatgccccagctaacctgtctgatggtggcatcttcctgcagacatttcaaacatgtaacttttatatgaaaaaaaataaacacagatgaaagctgcccaatgcca

SEQ ID NO: 303888 - DNA, 4436 bp, Homo sapiens
ggggtgctttgtggttgcacggctctgctctcaggtgtcaggacctgcatgggagaaggtcaggtcagccttggcctcaggcttcagcttagatcctgtctatcccttgacaactgtgtgccaagcctgtcacttagccccggagcttccgattccttaggaggaaaatgagggacaatttcggggccttttagggctgtcacaaagaccaggtgagccagggcgcacagagtcttcaggaccgcatcgagagtcctgtgatctctagaggggtggcacagcactgcccgtcccagaagccaggcgctgtcccatctgccataattccagggcacagcagatgggggagggctctggaattgggcagacatgggcgccgaccccgccacattgcttgcgggtggtgtggcctcgtgcctgggctcctcctctctcggtagggtaacagactctgtccttgtgggattgctctgggcattgaaggatgtggcatatgttcaaggcatggcccagtgctcaccagcgagtcccacgaagttgtcatggctactggcaatgatgcacccgcaaaggccagttgacttgggccccttcttccagaagcagatttggtgttgtactgcgaggcattcctgaccacctacaggaccttcatctccccagaggagctcatcaagaagctgcagtacagatatgagaaattctctccctttgccgacacattcaagaagcgcgtcagcaagaacacgttcttcgtgctggtacgggtggtggatgagctctgcctggtggagttgacagaagagatcctgaagctgctgatggaactggtcttccgcctggtgtgcaatggggagctgagcctggcccgtgtgctccggaagaacatcctggacaaggtggaccagaagaagctactcaggtgtgccacctccagccagcccctggcagcccggggggtagcagccaggccggggaccttgcacgactttcacagccatgagatagcggagcagctaacgctgctggatgctgagctcttctataaaatagagattcctgaggttttgctttgggcaaaagagcagaatgaggagaagagccccaacttgacccagttcacggagcacttcaacaacatgtcctactgggtccggtccataatcatgttacaggaaaaggcccaggacagggaacggctgctcttgaagttcatcaagatcatgaagcacttgcggaagctgaataacttcaactcctacttggccatcctctctgccctggactcggcgcccatccgcaggctggagtggcagaagcagacttcagagggcctggccgagtactgcacactgatcgacagctcgtcctccttccgagcctaccgggccgccctctcggaggtggaaccgccgtgcatcccgtacctggggctgatcctgcaggacctgaccttcgttcacctgggaaacccagactacatcgacgggaaagtgaacttctccaagcggtggcagcagttcaacatcctcgacagcatgcgctgcttccagcaggcgcactatgacatgcggaggaacgacgacattataaacttcttcaatgacttcagtgaccacctggctgaggaggccctatgggaactgtctctgaaaattaaacccaggaacataacaaggagaaaaacagaccgggaagagaagacctaggagcagacgccgggatccaggagaatgctcgaggggcgcagagggcagctcccagaccggagaggaccttggacctgttaggcgcatggcaggagtcccggcctcggagccatgaggctggccagccctcagcggggccgggcgggagctggagcctgccagccgcttcctgcctccttcctctgtgggagcagacccgtgggcctcagggcagccagcaggcaggtcttgttgccaatttacaaaccggtggttttctggtttggttttgttttctgcttttacttccatctctcccctcttgaccttccacccactcccctccagggagagagcagcagagacctcatcagcagaccaaggaagtggtgggtgctccccctccctaagctccagggtccctgaatcttctgaaatctcaaatgagtggaggcctcctggggtggcctgtcctgcaggggccctggaatgggggcaagcagctgggtgggcagaatgcagagtagactcgggggaggatcctttcactttccgcttccccttctgatgcatggaggatggtgtgagcttttcagcaggcccggaaaggtacgcaggtgacgccttagcagccccgcagctggtgctctgccccgcggtactggcgccatcagggcctcccttgcccgcctgagagcagcagcagtctctgtcatcccgtcgccccttaccccccaccccaggccactgggcccctcccacaccacctggggagctgagaagaggaggctggagtaagggaggacttgatcatccaagaaatactttttattgctgggagtcttctgaacctcaccaaactgaggccagagctgagctcctgggggagttaattcagaggggagaggccagcacctccctcctccatcgctcgctgtgtgccttaaactccatctcatgtccctccccatcccctggctttccctccctccttgccccatcctgggccagccagcagggctcctcctctggctcttcagacctttcagccagtgctgtcagtgcccctgggagggaagggcatccctgaggcacccgaatggtccctcagggtgcagggaggcagaagcctggccacagaggagcctcctaaggcagcagctgcagcaagcgcaccctctccccactctccccacgccagagcggcttccagagcagatgctgtttccatcctcctcgtcaaaaccattctcgctgctgagcttgacaatctgggcaaggcttgtggggcgcttgacaaacagaatctgccctgtgccgcctggttccgtggcctccagcatgagcctgcaggcagggcgctgcgggaacccagttgtgctgccccagcccatgcctccgggtctgctgtgcatgaatgagtgctcacttgtcccgggtttaggacgtggtcaagtgaacagcagggtctaactgtgcttacttagcccagttcaaacagaacaaaggaaaaatatagaaagcaacatctgttgatcatttaggtttttttttaaaccaccatgtcactttgagtccttcatgggtttttgaacagcatttatcaagaagaaaatgtgggctttttcccctctcccgtgttttgtttgtcctgtagatagagggaggaaagccgtgcagtggcaggcgggaccccctctggtggcgggaccccctcttgcggtggtcttgcggggccagccgggacctgtcactttattatttaaggagtgtgtgtgtagagtcgctggcttattaacagtattgtgtgtgggttgggtttttagtttgttccttctttttgaagtcccttcatttcaatccttgactctctctccccttcccttgcccagctctgttgaatgctgctgtgcgcgtgtgagggccgctctgcacacagggcccttgggttgtgtgaactgaaattctccctgtatttgtgagactcgcaggagtccccatctgtagcacaggcaatgccagtgccatgctgcagcctcagaaaccaggcctctcactccagcagcaggcagaaccgtgtctgtggtcgggtgctgtccacagctctgtctgccttgttcttgggcttgagctggatagaggtggggtctcttcaccttccctgaattcagaacagaccctgtgcctggccccagtgtgcccaggcaattccccaggccctcattgggagcccttggtgttctgagcagcagggcccaggcagcacatgagcagtgcccaggggctccctgcgtgaggacggcaaggtgcgatgtatgtctaacttattgatggcaggcagccccctgtgccccctaagcctggccctggttattgctgagctctgtgctcagtgctgcggcctggccgtggctcgtctgttcctttggggggcccgggcgggttgtgggaatcagtcttcacagacagacgtgagccaggcggaggactcgttccttgcagaggtcagtcctcacctgcaggtgtcggggtgggggggggcaaggaggggcaggcacacaccatgtctgacctgaacccgattctggggagcatcttcccgctccggccccacgacctccacagggttacattgtaatatatatgccccagctaacctgtctgatggtggcatcttcctgcagacatttcaaacatgtaacttttatatgaaaaaaaataaacacagatgaaagctgcccaatgcca

SEQ ID NO: 303889 - DNA, 3620 bp, Homo sapiens
tgccatttactccatggctgtgaaagtcgtgcaatggggagctgagcctggcccgtgtgctccggaagaacatcctggacaaggtggaccagaagaagctactcaggtgtgccacctccagccagcccctggcagcccggggggtagcagccaggccggggaccttgcacgactttcacagccatgagatagcggagcagctaacgctgctggatgctgagctcttctataaaatagagattcctgaggttttgctttgggcaaaagagcagaatgaggagaagagccccaacttgacccagttcacggagcacttcaacaacatgtcctactgggtccggtccataatcatgttacaggaaaaggcccaggacagggaacggctgctcttgaagttcatcaagatcatgaagcacttgcggaagctgaataacttcaactcctacttggccatcctctctgccctggactcggcgcccatccgcaggctggagtggcagaagcagacttcagagggcctggccgagtactgcacactgatcgacagctcgtcctccttccgagcctaccgggccgccctctcggaggtggaaccgccgtgcatcccgtacctggggctgatcctgcaggacctgaccttcgttcacctgggaaacccagactacatcgacgggaaagtgaacttctccaagcggtggcagcagttcaacatcctcgacagcatgcgctgcttccagcaggcgcactatgacatgcggaggaacgacgacattataaacttcttcaatgacttcagtgaccacctggctgaggaggccctatgggaactgtctctgaaaattaaacccaggaacataacaaggagaaaaacagaccgggaagagaagacctaggagcagacgccgggatccaggagaatgctcgaggggcgcagagggcagctcccagaccggagaggaccttggacctgttaggcgcatggcaggagtcccggcctcggagccatgaggctggccagccctcagcggggccgggcgggagctggagcctgccagccgcttcctgcctccttcctctgtgggagcagacccgtgggcctcagggcagccagcaggcaggtcttgttgccaatttacaaaccggtggttttctggtttggttttgttttctgcttttacttccatctctcccctcttgaccttccacccactcccctccagggagagagcagcagagacctcatcagcagaccaaggaagtggtgggtgctccccctccctaagctccagggtccctgaatcttctgaaatctcaaatgagtggaggcctcctggggtggcctgtcctgcaggggccctggaatgggggcaagcagctgggtgggcagaatgcagagtagactcgggggaggatcctttcactttccgcttccccttctgatgcatggaggatggtgtgagcttttcagcaggcccggaaaggtacgcaggtgacgccttagcagccccgcagctggtgctctgccccgcggtactggcgccatcagggcctcccttgcccgcctgagagcagcagcagtctctgtcatcccgtcgccccttaccccccaccccaggccactgggcccctcccacaccacctggggagctgagaagaggaggctggagtaagggaggacttgatcatccaagaaatactttttattgctgggagtcttctgaacctcaccaaactgaggccagagctgagctcctgggggagttaattcagaggggagaggccagcacctccctcctccatcgctcgctgtgtgccttaaactccatctcatgtccctccccatcccctggctttccctccctccttgccccatcctgggccagccagcagggctcctcctctggctcttcagacctttcagccagtgctgtcagtgcccctgggagggaagggcatccctgaggcacccgaatggtccctcagggtgcagggaggcagaagcctggccacagaggagcctcctaaggcagcagctgcagcaagcgcaccctctccccactctccccacgccagagcggcttccagagcagatgctgtttccatcctcctcgtcaaaaccattctcgctgctgagcttgacaatctgggcaaggcttgtggggcgcttgacaaacagaatctgccctgtgccgcctggttccgtggcctccagcatgagcctgcaggcagggcgctgcgggaacccagttgtgctgccccagcccatgcctccgggtctgctgtgcatgaatgagtgctcacttgtcccgggtttaggacgtggtcaagtgaacagcagggtctaactgtgcttacttagcccagttcaaacagaacaaaggaaaaatatagaaagcaacatctgttgatcatttaggtttttttttaaaccaccatgtcactttgagtccttcatgggtttttgaacagcatttatcaagaagaaaatgtgggctttttcccctctcccgtgttttgtttgtcctgtagatagagggaggaaagccgtgcagtggcaggcgggaccccctctggtggcgggaccccctcttgcggtggtcttgcggggccagccgggacctgtcactttattatttaaggagtgtgtgtgtagagtcgctggcttattaacagtattgtgtgtgggttgggtttttagtttgttccttctttttgaagtcccttcatttcaatccttgactctctctccccttcccttgcccagctctgttgaatgctgctgtgcgcgtgtgagggccgctctgcacacagggcccttgggttgtgtgaactgaaattctccctgtatttgtgagactcgcaggagtccccatctgtagcacaggcaatgccagtgccatgctgcagcctcagaaaccaggcctctcactccagcagcaggcagaaccgtgtctgtggtcgggtgctgtccacagctctgtctgccttgttcttgggcttgagctggatagaggtggggtctcttcaccttccctgaattcagaacagaccctgtgcctggccccagtgtgcccaggcaattccccaggccctcattgggagcccttggtgttctgagcagcagggcccaggcagcacatgagcagtgcccaggggctccctgcgtgaggacggcaaggtgcgatgtatgtctaacttattgatggcaggcagccccctgtgccccctaagcctggccctggttattgctgagctctgtgctcagtgctgcggcctggccgtggctcgtctgttcctttggggggcccgggcgggttgtgggaatcagtcttcacagacagacgtgagccaggcggaggactcgttccttgcagaggtcagtcctcacctgcaggtgtcggggtgggggggggcaaggaggggcaggcacacaccatgtctgacctgaacccgattctggggagcatcttcccgctccggccccacgacctccacagggttacattgtaatatatatgccccagctaacctgtctgatggtggcatcttcctgcagacatttcaaacatgtaacttttatatgaaaaaaaataaacacagatgaaagctgcccaatgcca

SEQ ID NO: 303890 - DNA, 6363 bp, Homo sapiens
  misc_feature (4511)..(4511): n is a, c, g, or t
gcgtggcataagggtctgtatgaaaatgtttctcctggcatgccccagaatggttcatttatgactttcagcattttgatcacctgattccccatttctcctgcggagaaaagtggtattaaaagtatttggacataaaattcatcttgcaagccgctgttgtgctgatgagtaataaagtgtcaaaaggatgctgaggaaagagcttcttaatatagaccatgcctgagaggcaccggtagggcgataacaagccctttcttctgatttcctccctggggccaaagggattttgaaaggcagaaggcaaagacttgagaatgagattcctcaggcttcccttgtgaggctgcctgggttctgccgctgggtggtttgggatgtccaagagatatcccctttcagccagtgactcggtcctcagttgctgctccggaaagacgctggggctgggaagggccctgtgtcctctggctttaaaatgggcaatgctattgaaaaacagaagcccttgaaacgaagtcatctgtacccctggaaacaagactctcagcgttctcatctctcttccttcaccatgaagctgatggacaaattccactcacccaaaatcaagagaacgccatcaaagaagggaaaaccagctgaggtgtccgtaaagattccagagaagcctgtgaacaaagaggcaacagacagatttctaccagagggctaccctctccccttggatctggagcagcaggcagtagaatttatgtccaccagtgctgtggcttccaggtctcaaaggcagaagaacctgagctggctggaggagaaagagaaggaagttgtcagtgccctgcgctactttaagaccattgtggacaaaatggcaattgataagaaggtactggagatgcttccagggtcagccagcaaggtgctggaggccatcttacccctggtgcagaacgatcctcgaattcagcacagctcagccctctcttcctgctatagccgagtgtaccaaagcctcgccaacctcattcgctggtctgaccaagtgatgctggaaggcgtgaactcagaagacaaggagatggtgacgactgtgaagggggtcatcaaggctgtgctggatggagtgaaggagctggtcaggctcaccatcgagaagcagggacgtccgtctccgacgagccccgtgaagcccagttcccctgccagcaagcctgatggcccagcagagctccccctgacagaccgcgaggtagagatcctaaacaagacgactgggatgtcacagtcaactgagctcctcccagatgccacggatgaagaggtcgcgccccccaagcctcctctgcctggcattcgggtggttgataatagtcctccaccagcattgccacccaagaaaagacagtcggcgccgtcccctacccgagtggctgtggtggcccccatgagccgagccaccagtggctccagtttgcctgttggaatcaataggcaggattttgatgttgactgttacgcacagaggcgactgtcaggaggcagccactcatatggtggagagtcgccccgcctctccccctgcagcagcataggcaagctcagcaagtcagacgagcagctgtcctctctggacagggacagtgggcagtgctcccggaacacaagctgtgaaacactagaccactatgatcccgactatgaattcctccagcaagacctctctaacgcagaccagatacctcagcagacggcctggaaccttagcccgttgccagagtctttgggggagtctgggtctccatttcttggccctcctttccagctgcctcttggcggccatccccagccagacggacctctggccccagggcagcagacagatacgccacctgctctccccgagaagaagcgcaggagcgcagcctcccagacggcggacggctctggctgcagggtgtcctacgagcggcatccctcgcagtatgacaacatctctggggaggacctgcagagcacagccccgatcccatccgtcccctacgcgccctttgctgctattctgccctttcagcatggaggttcctcagcccctgtcgaatttgtgggtgattttactgctcctgagtcaaccggtgacccagaaaaaccacctcctctaccagagaagaaaaacaaacacatgctggcctacatgcagttgctggaggactactcggagccgcagccctctatgttctaccagacgccacagaacgagcacatctaccagcagaagaacaagctcctcatggaggtatacggcttcagcgactccttcagtggggtggactccgtgcaggagctggccccgccgcccgccctaccccccaagcagcggcagctggagccaccggctgggaaagacggacatcccagagatccctcagcggtcagcggcgtccctgggaaggacagcagagacggcagtgagagggccccaaagtcaccagatgctctggagtcggctcagtcggaggaggaagtggacgagctgtccctcattgaccacaacgaaattatgtccaggctgacgctcaagcaggagggtgatgacgggccggacgtccgcggaggatctggggacatcttactggtccatgctactgagactgacaggaaagatttggtgttgtactgcgaggcattcctgaccacctacaggaccttcatctccccagaggagctcatcaagaagctgcagtacagatatcctttccttcctgacccagggcccctgcaccatgggcattttggagagagagggaccctcttgcccttcagtcctcgtgggggaagccgagcagcatattgggtggcagtgtgattgaagtagggacacaggagccccatggaccgaggttcccacctctaccctcccgcattccagctttgagctcaggcaagttcctcatctctaaaagggccgagtgaaatgatgtgaagaggctggaacatagtctgggaatgtgtgtctggtggcagttgtggtcattggatgactctaaaaacgaattagacatgccccagactgggaggggtaaatgtgccggtcctgcagacgcctcggagagaccctcatggtcggctccggcagcttctcagagctgagccccagggcgttgggcacgaaggataccaagacccaaaaagacagctcaggggtcagcacagtcaccttccctggagcggaccctgcgactgccacatccacaactggaatgggctcctgtccccagatctaccccatgggcccaccctcagtaaatgtcaccctctgcagtagtggctgaggaggaccccaggggtttggaaggacccacttgtgtgacccattgcctcttcaagtccaaacctgcccatcctaagaggctgacctgcagctgctgctctaggagggtagcctgggtcagctgctcctcagccacctctttgcacatagcccacggctgccatctgctgggcagccaccaccacctggggtaggaagtcctgagtccacccgcgcccccgctccttcctgtgtgccctgagccttcactgctccactcagggcctcctgcagacctcctggcctcctattctcccctcgtgttgacctttagaatccctgatctatcaagacagacgtggacatcctccattggcggagcctcgggtccccggcaagttctgttactcagagcacctgctcacaggcctgactcagtgaatggctgtcactcacacgtgtcaaggacttgctggtcaggcgagatgtgctttacacctgtgctttcacctagccctagctctatgaccattttttaatatgtgtgtgtgggtgtgtataaaattaccatattatacatggggccactgctctataactccctattgtgtaattgaggaaaccgaggcccagagacatgaaggacctgacccatgtggctgcttggtgggagagcagccacacgctgcttgccccctgctgcctgcgcccaggctctcagcctctgcctggctcagccatcatggaaatattgcagcatcaaggtctgggcctggttggctggcgacccctgtgctgtgggccaagacacagtccctggtacgttgctctgtcctgagccccatgacttggaaggtcgtggatcactagagagcaggcaggagggtgtcagagagatctggggagtcgatggcgagcacaacagccgggcaggaaaccctgaccacaaagcagagcccgacctcagggcatgagctagagctgatcgggtgcttgaagtgctgccctggagacagggagccaatgtggagcgtgctgcagctctgggaagagagacccggcccggtgtcacggaggtgagagttcccttgcagagcccagggaggcagcctcaggatggaaactcacagaaagactggagggagatacttctggcctacacacctgcctagggacctggggtttggagggtgtttgntttgggcccaccgttctctacctaaagttcagcaaggcactctctacgtgtctgtaatctcatgtccctccccatcccctggctttccctccctccttgccccatcctgggccagccagcagggctcctcctctggctcttcagacctttcagccagtgctgtcagtgcccctgggagggaagggcatccctgaggcacccgaatggtccctcagggtgcagggaggcagaagcctggccacagaggagcctcctaaggcagcagctgcagcaagcgcaccctctccccactctccccacgccagagcggcttccagagcagatgctgtttccatcctcctcgtcaaaaccattctcgctgctgagcttgacaatctgggcaaggcttgtggggcgcttgacaaacagaatctgccctgtgccgcctggttccgtggcctccagcatgagcctgcaggcagggcgctgcgggaacccagttgtgctgccccagcccatgcctccgggtctgctgtgcatgaatgagtgctcacttgtcccgggtttaggacgtggtcaagtgaacagcagggtctaactgtgcttacttagcccagttcaaacagaacaaaggaaaaatatagaaagcaacatctgttgatcatttaggtttttttttaaaccaccatgtcactttgagtccttcatgggtttttgaacagcatttatcaagaagaaaatgtgggctttttcccctctcccgtgttttgtttgtcctgtagatagagggaggaaagccgtgcagtggcaggcgggaccccctctggtggcgggaccccctcttgcggtggtcttgcggggccagccgggacctgtcactttattatttaaggagtgtgtgtgtagagtcgctggcttattaacagtattgtgtgtgggttgggtttttagtttgttccttctttttgaagtcccttcatttcaatccttgactctctctccccttcccttgcccagctctgttgaatgctgctgtgcgcgtgtgagggccgctctgcacacagggcccttgggttgtgtgaactgaaattctccctgtatttgtgagactcgcaggagtccccatctgtagcacaggcaatgccagtgccatgctgcagcctcagaaaccaggcctctcactccagcagcaggcagaaccgtgtctgtggtcgggtgctgtccacagctctgtctgccttgttcttgggcttgagctggatagaggtggggtctcttcaccttccctgaattcagaacagaccctgtgcctggccccagtgtgcccaggcaattccccaggccctcattgggagcccttggtgttctgagcagcagggcccaggcagcacatgagcagtgcccaggggctccctgcgtgaggacggcaaggtgcgatgtatgtctaacttattgatggcaggcagccccctgtgccccctaagcctggccctggttattgctgagctctgtgctcagtgctgcggcctggccgtggctcgtctgttcctttggggggcccgggcgggttgtgggaatcagtcttcacagacagacgtgagccaggcggaggactcgttccttgcagaggtcagtcctcacctgcaggtgtcggggtgggggggggcaaggaggggcaggcacacaccatgtctgacctgaacccgattctggggagcatcttcccgctccggccccacgacctccacagggttacattgtaatatatatgccccagctaacctgtctgatggtggcatcttcctgcagacatttcaaacatgtaacttttatatgaaaaaaaataaacacagatgaaagctgcccaatgcca

SEQ ID NO: 303891 - DNA, 3046 bp, Homo sapiens
cgcttcacctaggtggaaagcgacgtgcatcccgtatctggggctgatcctgcaggacctgaccttcgttcacctgggaaacccagactacatcgacgggaaagtgaacttctccaagcggtggcagcagttcaacatcctcgacagcatgcgctgcttccagcaggcgcactatgacatgcggaggaacgacgacattataaacttcttcaatgacttcagtgaccacctggctgaggaggccctatgggaactgtctctgaaaattaaacccaggaacataacaaggagaaaaacagaccgggaagagaagacctaggagcagacgccgggatccaggagaatgctcgaggggcgcagagggcagctcccagaccggagaggaccttggacctgttaggcgcatggcaggagtcccggcctcggagccatgaggctggccagccctcagcggggccgggcgggagctggagcctgccagccgcttcctgcctccttcctctgtgggagcagacccgtgggcctcagggcagccagcaggcaggtcttgttgccaatttacaaaccggtggttttctggtttggttttgttttctgcttttacttccatctctcccctcttgaccttccacccactcccctccagggagagagcagcagagacctcatcagcagaccaaggaagtggtgggtgctccccctccctaagctccagggtccctgaatcttctgaaatctcaaatgagtggaggcctcctggggtggcctgtcctgcaggggccctggaatgggggcaagcagctgggtgggcagaatgcagagtagactcgggggaggatcctttcactttccgcttccccttctgatgcatggaggatggtgtgagcttttcagcaggcccggaaaggtacgcaggtgacgccttagcagccccgcagctggtgctctgccccgcggtactggcgccatcagggcctcccttgcccgcctgagagcagcagcagtctctgtcatcccgtcgccccttaccccccaccccaggccactgggcccctcccacaccacctggggagctgagaagaggaggctggagtaagggaggacttgatcatccaagaaatactttttattgctgggagtcttctgaacctcaccaaactgaggccagagctgagctcctgggggagttaattcagaggggagaggccagcacctccctcctccatcgctcgctgtgtgccttaaactccatctcatgtccctccccatcccctggctttccctccctccttgccccatcctgggccagccagcagggctcctcctctggctcttcagacctttcagccagtgctgtcagtgcccctgggagggaagggcatccctgaggcacccgaatggtccctcagggtgcagggaggcagaagcctggccacagaggagcctcctaaggcagcagctgcagcaagcgcaccctctccccactctccccacgccagagcggcttccagagcagatgctgtttccatcctcctcgtcaaaaccattctcgctgctgagcttgacaatctgggcaaggcttgtggggcgcttgacaaacagaatctgccctgtgccgcctggttccgtggcctccagcatgagcctgcaggcagggcgctgcgggaacccagttgtgctgccccagcccatgcctccgggtctgctgtgcatgaatgagtgctcacttgtcccgggtttaggacgtggtcaagtgaacagcagggtctaactgtgcttacttagcccagttcaaacagaacaaaggaaaaatatagaaagcaacatctgttgatcatttaggtttttttttaaaccaccatgtcactttgagtccttcatgggtttttgaacagcatttatcaagaagaaaatgtgggctttttcccctctcccgtgttttgtttgtcctgtagatagagggaggaaagccgtgcagtggcaggcgggaccccctctggtggcgggaccccctcttgcggtggtcttgcggggccagccgggacctgtcactttattatttaaggagtgtgtgtgtagagtcgctggcttattaacagtattgtgtgtgggttgggtttttagtttgttccttctttttgaagtcccttcatttcaatccttgactctctctccccttcccttgcccagctctgttgaatgctgctgtgcgcgtgtgagggccgctctgcacacagggcccttgggttgtgtgaactgaaattctccctgtatttgtgagactcgcaggagtccccatctgtagcacaggcaatgccagtgccatgctgcagcctcagaaaccaggcctctcactccagcagcaggcagaaccgtgtctgtggtcgggtgctgtccacagctctgtctgccttgttcttgggcttgagctggatagaggtggggtctcttcaccttccctgaattcagaacagaccctgtgcctggccccagtgtgcccaggcaattccccaggccctcattgggagcccttggtgttctgagcagcagggcccaggcagcacatgagcagtgcccaggggctccctgcgtgaggacggcaaggtgcgatgtatgtctaacttattgatggcaggcagccccctgtgccccctaagcctggccctggttattgctgagctctgtgctcagtgctgcggcctggccgtggctcgtctgttcctttggggggcccgggcgggttgtgggaatcagtcttcacagacagacgtgagccaggcggaggactcgttccttgcagaggtcagtcctcacctgcaggtgtcggggtgggggggggcaaggaggggcaggcacacaccatgtctgacctgaacccgattctggggagcatcttcccgctccggccccacgacctccacagggttacattgtaatatatatgccccagctaacctgtctgatggtggcatcttcctgcagacatttcaaacatgtaacttttatatgaaaaaaaataaacacagatgaaagctgcccaatgcca

SEQ ID NO: 303892 - DNA, 2886 bp, Homo sapiens
  misc_feature (68)..(68): n is a, c, g, or t
  misc_feature (90)..(90): n is a, c, g, or t
  misc_feature (1034)..(1034): n is a, c, g, or t
tgacagaagagatcctgaagctgctgagcttgacaatctgggcaaggcttgtgggatgctgtttccancctcctcgtcaaaaccattctngcccctgagccttcactgctccactcagggcctcctgcagacctcctggcctcctattctcccctcgtgttgacctttagaatccctgatctatcaagacagacgtggacatcctccattggcggagcctcgggtccccggcaagttctgttactcagagcacctgctcacaggcctgactcagtgaatggctgtcactcacacgtgtcaaggacttgctggtcaggcgagatgtgctttacacctgtgctttcacctagccctagctctatgaccattttttaatatgtgtgtgtgggtgtgtataaaattaccatattatacatggggccactgctctataactccctattgtgtaattgaggaaaccgaggcccagagacatgaaggacctgacccatgtggctgcttggtgggagagcagccacacgctgcttgccccctgctgcctgcgcccaggctctcagcctctgcctggctcagccatcatggaaatattgcagcatcaaggtctgggcctggttggctggcgacccctgtgctgtgggccaagacacagtccctggtacgttgctctgtcctgagccccatgacttggaaggtcgtggatcactagagagcaggcaggagggtgtcagagagatctggggagtcgatggcgagcacaacagccgggcaggaaaccctgaccacaaagcagagcccgacctcagggcatgagctagagctgatcgggtgcttgaagtgctgccctggagacagggagccaatgtggagcgtgctgcagctctgggaagagagacccggcccggtgtcacggaggtgagagttcccttgcagagcccagggaggcagcctcaggatggaaactcacagaaagactggagggagatacttctggcctacacacctgcctagggacctggggtttggagggtgtttgntttgggcccaccgttctctacctaaagttcagcaaggcactctctacgtgtctgtaatctcatgtccctccccatcccctggctttccctccctccttgccccatcctgggccagccagcagggctcctcctctggctcttcagacctttcagccagtgctgtcagtgcccctgggagggaagggcatccctgaggcacccgaatggtccctcagggtgcagggaggcagaagcctggccacagaggagcctcctaaggcagcagctgcagcaagcgcaccctctccccactctccccacgccagagcggcttccagagcagatgctgtttccatcctcctcgtcaaaaccattctcgctgctgagcttgacaatctgggcaaggcttgtggggcgcttgacaaacagaatctgccctgtgccgcctggttccgtggcctccagcatgagcctgcaggcagggcgctgcgggaacccagttgtgctgccccagcccatgcctccgggtctgctgtgcatgaatgagtgctcacttgtcccgggtttaggacgtggtcaagtgaacagcagggtctaactgtgcttacttagcccagttcaaacagaacaaaggaaaaatatagaaagcaacatctgttgatcatttaggtttttttttaaaccaccatgtcactttgagtccttcatgggtttttgaacagcatttatcaagaagaaaatgtgggctttttcccctctcccgtgttttgtttgtcctgtagatagagggaggaaagccgtgcagtggcaggcgggaccccctctggtggcgggaccccctcttgcggtggtcttgcggggccagccgggacctgtcactttattatttaaggagtgtgtgtgtagagtcgctggcttattaacagtattgtgtgtgggttgggtttttagtttgttccttctttttgaagtcccttcatttcaatccttgactctctctccccttcccttgcccagctctgttgaatgctgctgtgcgcgtgtgagggccgctctgcacacagggcccttgggttgtgtgaactgaaattctccctgtatttgtgagactcgcaggagtccccatctgtagcacaggcaatgccagtgccatgctgcagcctcagaaaccaggcctctcactccagcagcaggcagaaccgtgtctgtggtcgggtgctgtccacagctctgtctgccttgttcttgggcttgagctggatagaggtggggtctcttcaccttccctgaattcagaacagaccctgtgcctggccccagtgtgcccaggcaattccccaggccctcattgggagcccttggtgttctgagcagcagggcccaggcagcacatgagcagtgcccaggggctccctgcgtgaggacggcaaggtgcgatgtatgtctaacttattgatggcaggcagccccctgtgccccctaagcctggccctggttattgctgagctctgtgctcagtgctgcggcctggccgtggctcgtctgttcctttggggggcccgggcgggttgtgggaatcagtcttcacagacagacgtgagccaggcggaggactcgttccttgcagaggtcagtcctcacctgcaggtgtcggggtgggggggggcaaggaggggcaggcacacaccatgtctgacctgaacccgattctggggagcatcttcccgctccggccccacgacctccacagggttacattgtaatatatatgccccagctaacctgtctgatggtggcatcttcctgcagacatttcaaacatgtaacttttatatgaaaaaaaataaacacagatgaaagctgcccaatgcca

SEQ ID NO: 303893 - DNA, 6000 bp, Homo sapiens
  misc_feature (4511)..(4511): n is a, c, g, or t
gcgtggcataagggtctgtatgaaaatgtttctcctggcatgccccagaatggttcatttatgactttcagcattttgatcacctgattccccatttctcctgcggagaaaagtggtattaaaagtatttggacataaaattcatcttgcaagccgctgttgtgctgatgagtaataaagtgtcaaaaggatgctgaggaaagagcttcttaatatagaccatgcctgagaggcaccggtagggcgataacaagccctttcttctgatttcctccctggggccaaagggattttgaaaggcagaaggcaaagacttgagaatgagattcctcaggcttcccttgtgaggctgcctgggttctgccgctgggtggtttgggatgtccaagagatatcccctttcagccagtgactcggtcctcagttgctgctccggaaagacgctggggctgggaagggccctgtgtcctctggctttaaaatgggcaatgctattgaaaaacagaagcccttgaaacgaagtcatctgtacccctggaaacaagactctcagcgttctcatctctcttccttcaccatgaagctgatggacaaattccactcacccaaaatcaagagaacgccatcaaagaagggaaaaccagctgaggtgtccgtaaagattccagagaagcctgtgaacaaagaggcaacagacagatttctaccagagggctaccctctccccttggatctggagcagcaggcagtagaatttatgtccaccagtgctgtggcttccaggtctcaaaggcagaagaacctgagctggctggaggagaaagagaaggaagttgtcagtgccctgcgctactttaagaccattgtggacaaaatggcaattgataagaaggtactggagatgcttccagggtcagccagcaaggtgctggaggccatcttacccctggtgcagaacgatcctcgaattcagcacagctcagccctctcttcctgctatagccgagtgtaccaaagcctcgccaacctcattcgctggtctgaccaagtgatgctggaaggcgtgaactcagaagacaaggagatggtgacgactgtgaagggggtcatcaaggctgtgctggatggagtgaaggagctggtcaggctcaccatcgagaagcagggacgtccgtctccgacgagccccgtgaagcccagttcccctgccagcaagcctgatggcccagcagagctccccctgacagaccgcgaggtagagatcctaaacaagacgactgggatgtcacagtcaactgagctcctcccagatgccacggatgaagaggtcgcgccccccaagcctcctctgcctggcattcgggtggttgataatagtcctccaccagcattgccacccaagaaaagacagtcggcgccgtcccctacccgagtggctgtggtggcccccatgagccgagccaccagtggctccagtttgcctgttggaatcaataggcaggattttgatgttgactgttacgcacagaggcgactgtcaggaggcagccactcatatggtggagagtcgccccgcctctccccctgcagcagcataggcaagctcagcaagtcagacgagcagctgtcctctctggacagggacagtgggcagtgctcccggaacacaagctgtgaaacactagaccactatgatcccgactatgaattcctccagcaagacctctctaacgcagaccagatacctcagcagacggcctggaaccttagcccgttgccagagtctttgggggagtctgggtctccatttcttggccctcctttccagctgcctcttggcggccatccccagccagacggacctctggccccagggcagcagacagatacgccacctgctctccccgagaagaagcgcaggagcgcagcctcccagacggcggacggctctggctgcagggtgtcctacgagcggcatccctcgcagtatgacaacatctctggggaggacctgcagagcacagccccgatcccatccgtcccctacgcgccctttgctgctattctgccctttcagcatggaggttcctcagcccctgtcgaatttgtgggtgattttactgctcctgagtcaaccggtgacccagaaaaaccacctcctctaccagagaagaaaaacaaacacatgctggcctacatgcagttgctggaggactactcggagccgcagccctctatgttctaccagacgccacagaacgagcacatctaccagcagaagaacaagctcctcatggaggtatacggcttcagcgactccttcagtggggtggactccgtgcaggagctggccccgccgcccgccctaccccccaagcagcggcagctggagccaccggctgggaaagacggacatcccagagatccctcagcggtcagcggcgtccctgggaaggacagcagagacggcagtgagagggccccaaagtcaccagatgctctggagtcggctcagtcggaggaggaagtggacgagctgtccctcattgaccacaacgaaattatgtccaggctgacgctcaagcaggagggtgatgacgggccggacgtccgcggaggatctggggacatcttactggtccatgctactgagactgacaggaaagatttggtgttgtactgcgaggcattcctgaccacctacaggaccttcatctccccagaggagctcatcaagaagctgcagtacagatatcctttccttcctgacccagggcccctgcaccatgggcattttggagagagagggaccctcttgcccttcagtcctcgtgggggaagccgagcagcatattgggtggcagtgtgattgaagtagggacacaggagccccatggaccgaggttcccacctctaccctcccgcattccagctttgagctcaggcaagttcctcatctctaaaagggccgagtgaaatgatgtgaagaggctggaacatagtctgggaatgtgtgtctggtggcagttgtggtcattggatgactctaaaaacgaattagacatgccccagactgggaggggtaaatgtgccggtcctgcagacgcctcggagagaccctcatggtcggctccggcagcttctcagagctgagccccagggcgttgggcacgaaggataccaagacccaaaaagacagctcaggggtcagcacagtcaccttccctggagcggaccctgcgactgccacatccacaactggaatgggctcctgtccccagatctaccccatgggcccaccctcagtaaatgtcaccctctgcagtagtggctgaggaggaccccaggggtttggaaggacccacttgtgtgacccattgcctcttcaagtccaaacctgcccatcctaagaggctgacctgcagctgctgctctaggagggtagcctgggtcagctgctcctcagccacctctttgcacatagcccacggctgccatctgctgggcagccaccaccacctggggtaggaagtcctgagtccacccgcgcccccgctccttcctgtgtgccctgagccttcactgctccactcagggcctcctgcagacctcctggcctcctattctcccctcgtgttgacctttagaatccctgatctatcaagacagacgtggacatcctccattggcggagcctcgggtccccggcaagttctgttactcagagcacctgctcacaggcctgactcagtgaatggctgtcactcacacgtgtcaaggacttgctggtcaggcgagatgtgctttacacctgtgctttcacctagccctagctctatgaccattttttaatatgtgtgtgtgggtgtgtataaaattaccatattatacatggggccactgctctataactccctattgtgtaattgaggaaaccgaggcccagagacatgaaggacctgacccatgtggctgcttggtgggagagcagccacacgctgcttgccccctgctgcctgcgcccaggctctcagcctctgcctggctcagccatcatggaaatattgcagcatcaaggtctgggcctggttggctggcgacccctgtgctgtgggccaagacacagtccctggtacgttgctctgtcctgagccccatgacttggaaggtcgtggatcactagagagcaggcaggagggtgtcagagagatctggggagtcgatggcgagcacaacagccgggcaggaaaccctgaccacaaagcagagcccgacctcagggcatgagctagagctgatcgggtgcttgaagtgctgccctggagacagggagccaatgtggagcgtgctgcagctctgggaagagagacccggcccggtgtcacggaggtgagagttcccttgcagagcccagggaggcagcctcaggatggaaactcacagaaagactggagggagatacttctggcctacacacctgcctagggacctggggtttggagggtgtttgntttgggcccaccgttctctacctaaagttcagcaaggcactctctacgtgtctgtaatctcatgtccctccccatcccctggctttccctccctccttgccccatcctgggccagccagcagggctcctcctctggctcttcagacctttcagccagtgctgtcagtgcccctgggagggaagggcatccctgaggcacccgaatggtccctcagggtgcagggaggcagaagcctggccacagaggagcctcctaaggcagcagctgcagcaagcgcaccctctccccactctccccacgccagagcggcttccagagcagatgctgtttccatcctcctcgtcaaaaccattctcgctgctgagcttgacaatctgggcaaggcttgtggggcgcttgacaaacagaatctgccctgtgccgcctggttccgtggcctccagcatgagcctgcaggcagggcgctgcgggaacccagttgtgctgccccagcccatgcctccgggtctgctgtgcatgaatgagtgctcacttgtcccgggtttaggacgtggtcaagtgaacagcagggtctaactgtgcttacttagcccagttcaaacagaacaaaggaaaaatatagaaagcaacatctgttgatcatttaggtttttttttaaaccaccatgtcactttgagtccttcatgggtttttgaacagcatttatcaagaagaaaatgtgggctttttcccctctcccgtgttttgtttgtcctgtagatagagggaggaaagccgtgcagtggcaggcgggaccccctctggtggcgggaccccctcttgcggtggtcttgcggggccagccgggacctgtcactttattatttaaggagtgtgtgtgtagagtcgctggcttattaacagtattgtgtgtgggttgggtttttagtttgttccttctttttgaagtcccttcatttcaatccttgactctctctccccttcccttgcccagctctgttgaatgctgctgtgcgcgtgtgagggccgctctgcacacagggcccttgggttgtgtgaactgaaattctccctgtatttgtgagactcgcaggagtccccatctgtagcacaggcaatgccagtgccatgctgcagcctcagaaaccaggcctctcactccagcagcaggcagaaccgtgtctgtggtcgggtgctgtccacagctctgtctgccttgttcttgggcttgagctggatagaggtggggtctcttcaccttccctgaattcagaacagaccctgtgcctggccccagtgtgcccaggcaattccccaggccctcattgggacatcttcccgctccggccccacgacctccacagggttacattgtaatatatatgccccagctaacctgtctgatggtggcatcttcctgcagacatttcaaacatgtaacttttatatgaaaaaaaataaacacagatgaaagctgcccaatgcca

SEQ ID NO: 303894 - DNA, 4502 bp, Homo sapiens
gcgtggcataagggtctgtatgaaaatgtttctcctggcatgccccagaatggttcatttatgactttcagcattttgatcacctgattccccatttctcctgcggagaaaagtggtattaaaagtatttggacataaaattcatcttgcaagccgctgttgtgctgatgagtaataaagtgtcaaaaggatgctgaggaaagagcttcttaatatagaccatgcctgagaggcaccggtagggcgataacaagccctttcttctgatttcctccctggggccaaagggattttgaaaggcagaaggcaaagacttgagaatgagattcctcaggcttcccttgtgaggctgcctgggttctgccgctgggtggtttgggatgtccaagagatatcccctttcagccagtgactcggtcctcagttgctgctccggaaagacgctggggctgggaagggccctgtgtcctctggctttaaaatgggcaatgctattgaaaaacagaagcccttgaaacgaagtcatctgtacccctggaaacaagactctcagcgttctcatctctcttccttcaccatgaagctgatggacaaattccactcacccaaaatcaagagaacgccatcaaagaagggaaaaccagctgaggtgtccgtaaagattccagagaagcctgtgaacaaagaggcaacagacagatttctaccagagggctaccctctccccttggatctggagcagcaggcagtagaatttatgtccaccagtgctgtggcttccaggtctcaaaggcagaagaacctgagctggctggaggagaaagagaaggaagttgtcagtgccctgcgctactttaagaccattgtggacaaaatggcaattgataagaaggtactggagatgcttccagggtcagccagcaaggtgctggaggccatcttacccctggtgcagaacgatcctcgaattcagcacagctcagccctctcttcctgctatagccgagtgtaccaaagcctcgccaacctcattcgctggtctgaccaagtgatgctggaaggcgtgaactcagaagacaaggagatggtgacgactgtgaagggggtcatcaaggctgtgctggatggagtgaaggagctggtcaggctcaccatcgagaagcagggacgtccgtctccgacgagccccgtgaagcccagttcccctgccagcaagcctgatggcccagcagagctccccctgacagaccgcgaggtagagatcctaaacaagacgactgggatgtcacagtcaactgagctcctcccagatgccacggatgaagaggtcgcgccccccaagcctcctctgcctggcattcgggtggttgataatagtcctccaccagcattgccacccaagaaaagacagtcggcgccgtcccctacccgagtggctgtggtggcccccatgagccgagccaccagtggctccagtttgcctgttggaatcaataggcaggattttgatgttgactgttacgcacagaggcgactgtcaggaggcagccactcatatggtggagagtcgccccgcctctccccctgcagcagcataggcaagctcagcaagtcagacgagcagctgtcctctctggacagggacagtgggcagtgctcccggaacacaagctgtgaaacactagaccactatgatcccgactatgaattcctccagcaagacctctctaacgcagaccagatacctcagcagacggcctggaaccttagcccgttgccagagtctttgggggagtctgggtctccatttcttggccctcctttccagctgcctcttggcggccatccccagccagacggacctctggccccagggcagcagacagatacgccacctgctctccccgagaagaagcgcaggagcgcagcctcccagacggcggacggctctggctgcagggtgtcctacgagcggcatccctcgcagtatgacaacatctctggggaggacctgcagagcacagccccgatcccatccgtcccctacgcgccctttgctgctattctgccctttcagcatggaggttcctcagcccctgtcgaatttgtgggtgattttactgctcctgagtcaaccggtgacccagaaaaaccacctcctctaccagagaagaaaaacaaacacatgctggcctacatgcagttgctggaggactactcggagccgcagccctctatgttctaccagacgccacagaacgagcacatctaccagcagaagaacaagctcctcatggaggtatacggcttcagcgactccttcagtggggtggactccgtgcaggagctggccccgccgcccgccctaccccccaagcagcggcagctggagccaccggctgggaaagacggacatcccagagatccctcagcggtcagcggcgtccctgggaaggacagcagagacggcagtgagagggccccaaagtcaccagatgctctggagtcggctcagtcggaggaggaagtggacgagctgtccctcattgaccacaacgaaattatgtccaggctgacgctcaagcaggagggtgatgacgggccggacgtccgcggaggatctggggacatcttactggtccatgctactgagactgacaggaaagatttggtgttgtactgcgaggcattcctgaccacctacaggaccttcatctccccagaggagctcatcaagaagctgcagtacagatatgagaaattctctccctttgccgacacattcaagaagcgcgtcagcaagaacacgttcttcgtgctggtacgggtggtggatgagctctgcctggtggagttgacagaagagatcctgaagctgctgatggaactggtcttccgcctggtgtgcaatggggagctgagcctggcccgtgtgctccggaagaacatcctggacaaggtggaccagaagaagctactcaggtgtgccacctccagccagcccctggcagcccggggggtagcagccaggccggggaccttgcacgactttcacagccatgagatagcggagcagctaacgctgctggatgctgagctcttctataaaatagagattcctgaggttttgctttgggcaaaagagcagaatgaggagaagagccccaacttgacccagttcacggagcacttcaacaacatgtcctactgggtccggtccataatcatgttacaggaaaaggcccaggacagggaacggctgctcttgaagttcatcaagatcatgaagcacttgcggaagctgaataacttcaactcctacttggccatcctctctgccctggactcggcgcccatccgcaggctggagtggcagaagcagacttcagagggcctggccgagtactgcacactgatcgacagctcgtcctccttccgagcctaccgggccgccctctcggaggtggaaccgccgtgcatcccgtacctggggctgatcctgcaggacctgaccttcgttcacctgggaaacccagactacatcgacgggaaagtgaacttctccaagcggtggcagcagttcaacatcctcgacagcatgcgctgcttccagcaggcgcactatgacatgcggaggaacgacgacattataaacttcttcaatgacttcagtgaccacctggctgaggaggccctatgggaactgtctctgaaaattaaacccaggaacataacaaggagaaaaacagaccgggaagagaagacctaggagcagacgccgggatccaggagaatgctcgaggggcgcagagggcagctcccagaccggagaggaccttggacctgttaggcgcatggcaggagtcccggcctcggagccatgaggctggccagccctcagcggggccgggcgggagctggagcctgccagccgcttcctgcctccttcctctgtgggagcagacccgtgggcctcagggcagccagcaggcaggtcttgttgccaatttacaaaccggtggttttctggtttggttttgttttctgcttttacttccatctctcccctcttgaccttccacccactcccctccagggagagagcagcagagacctcatcagcagaccaaggaagtggtgggtgctccccctccctaagctccagggtccctgaatcttctgaaatctcaaatgagtggaggcctcctggggtggcctgtcctgcaggggccctggaatgggggcaagcagctgggtgggcagaatgcagagtagactcgggggaggatcctttcactttccgcttccccttctgatgcatggaggatggtgtgagcttttcagcaggcccggaaaggtacgcaggtgacgccttagcagccccgcagctggtgctctgccccgcggtactggcgccatcagggcctcccttgcccgcctgagagcagcagcagtctctgtcatcccgcataggcaagcaccggaagcaccccggcggccgc

SEQ ID NO: 303895 - DNA, 3661 bp, Homo sapiens
gcgtggcataagggtctgtatgaaaatgtttctcctggcatgccccagaatggttcatttatgactttcagcattttgatcacctgattccccatttctcctgcggagaaaagtggtattaaaagtatttggacataaaattcatcttgcaagccgctgttgtgctgatgagtaataaagtgtcaaaaggatgctgaggaaagagcttcttaatatagaccatgcctgagaggcaccggtagggcgataacaagccctttcttctgatttcctccctggggccaaagggattttgaaaggcagaaggcaaagacttgagaatgagattcctcaggcttcccttgtgaggctgcctgggttctgccgctgggtggtttgggatgtccaagagatatcccctttcagccagtgactcggtcctcagttgctgctccggaaagacgctggggctgggaagggccctgtgtcctctggctttaaaatgggcaatgctattgaaaaacagaagcccttgaaacgaagtcatctgtacccctggaaacaagactctcagcgttctcatctctcttccttcaccatgaagctgatggacaaattccactcacccaaaatcaagagaacgccatcaaagaagggaaaaccagctgaggtgtccgtaaagattccagagaagcctgtgaacaaagaggcaacagacagatttctaccagagggctaccctctccccttggatctggagcagcaggcagtagaatttatgtccaccagtgctgtggcttccaggtctcaaaggcagaagaacctgagctggctggaggagaaagagaaggaagttgtcagtgccctgcgctactttaagaccattgtggacaaaatggcaattgataagaaggtactggagatgcttccagggtcagccagcaaggtgctggaggccatcttacccctggtgcagaacgatcctcgaattcagcacagctcagccctctcttcctgctatagccgagtgtaccaaagcctcgccaacctcattcgctggtctgaccaagtgatgctggaaggcgtgaactcagaagacaaggagatggtgacgactgtgaagggggtcatcaaggctgtgctggatggagtgaaggagctggtcaggctcaccatcgagaagcagggacgtccgtctccgacgagccccgtgaagcccagttcccctgccagcaagcctgatggcccagcagagctccccctgacagaccgcgaggtagagatcctaaacaagacgactgggatgtcacagtcaactgagctcctcccagatgccacggatgaagaggtcgcgccccccaagcctcctctgcctggcattcgggtggttgataatagtcctccaccagcattgccacccaagaaaagacagtcggcgccgtcccctacccgagtggctgtggtggcccccatgagccgagccaccagtggctccagtttgcctgttggaatcaataggcaggattttgatgttgactgttacgcacagaggcgactgtcaggaggcagccactcatatggtggagagtcgccccgcctctccccctgcagcagcataggcaagctcagcaagtcagacgagcagctgtcctctctggacagggacagtgggcagtgctcccggaacacaagctgtgaaacactagaccactatgatcccgactatgaattcctccagcaagacctctctaacgcagaccagatacctcagcagacggcctggaaccttagcccgttgccagagtctttgggggagtctgggtctccatttcttggccctcctttccagctgcctcttggcggccatccccagccagacggacctctggccccagggcagcagacagatacgccacctgctctccccgagaagaagcgcaggagcgcagcctcccagacggcggacggctctggctgcagggtgtcctacgagcggcatccctcgcagtatgacaacatctctggggaggacctgcagagcacagccccgatcccatccgtcccctacgcgccctttgctgctattctgccctttcagcatggaggttcctcagcccctgtcgaatttgtgggtgattttactgctcctgagtcaaccggtgacccagaaaaaccacctcctctaccagagaagaaaaacaaacacatgctggcctacatgcagttgctggaggactactcggagccgcagccctctatgttctaccagacgccacagaacgagcacatctaccagcagaagaacaagctcctcatggaggtatacggcttcagcgactccttcagtggggtggactccgtgcaggagctggccccgccgcccgccctaccccccaagcagcggcagctggagccaccggctgggaaagacggacatcccagagatccctcagcggtcagcggcgtccctgggaaggacagcagagacggcagtgagagggccccaaagtcaccagatgctctggagtcggctcagtcggaggaggaagtggacgagctgtccctcattgaccacaacgaaattatgtccaggctgacgctcaagcaggagggtgatgacgggccggacgtccgcggaggatctggggacatcttactggtccatgctactgagactgacaggaaagatttggtgttgtactgcgaggcattcctgaccacctacaggaccttcatctccccagaggagctcatcaagaagctgcagtacagatatgagaaattctctccctttgccgacacattcaagaagcgcgtcagcaagaacacgttcttcgtgctggtacgggtggtggatgagctctgcctggtggagttgacagaagagatcctgaagctgctgatggaactggtcttccgcctggtgtgcaatggggagctgagcctggcccgtgtgctccggaagaacatcctggacaaggtggaccagaagaagctactcaggtgtgccacctccagccagcccctggcagcccggggggtagcagccaggccggggaccttgcacgactttcacagccatgagatagcggagcagctaacgctgctggatgctgagctcttctataaaatagagattcctgaggttttgctttgggcaaaagagcagaatgaggagaagagccccaacttgacccagttcacggagcacttcaacaacatgtcctactgggtccggtccataatcatgttacaggaaaaggcccaggacagggaacggctgctcttgaagttcatcaagatcatgaagcacttgcggaagctgaataacttcaactcctacttggccatcctctctgccctggactcggcgcccatccgcaggctggagtggcagaagcagacttcagagggcctggccgagtactgcacactgatcgacagctcgtcctccttccgagcctaccgggccgccctctcggaggtggaaccgccgtgcatcccgtacctggggctgatcctgcaggacctgaccttcgttcacctgggaaacccagactacacctacctctctctgggcttctatttcgaccgcgatgatgtggctctggaaggcgtgagccacttcttccgcgaactggccgaggagaagcgcgagggctacgagcgtctcctgaagatg

SEQ ID NO: 303896 - DNA, 3028 bp, Homo sapiens
gcgtggcataagggtctgtatgaaaatgtttctcctggcatgccccagaatggttcatttatgactttcagcattttgatcacctgattccccatttctcctgcggagaaaagtggtattaaaagtatttggacataaaattcatcttgcaagccgctgttgtgctgatgagtaataaagtgtcaaaaggatgctgaggaaagagcttcttaatatagaccatgcctgagaggcaccggtagggcgataacaagccctttcttctgatttcctccctggggccaaagggattttgaaaggcagaaggcaaagacttgagaatgagattcctcaggcttcccttgtgaggctgcctgggttctgccgctgggtggtttgggatgtccaagagatatcccctttcagccagtgactcggtcctcagttgctgctccggaaagacgctggggctgggaagggccctgtgtcctctggctttaaaatgggcaatgctattgaaaaacagaagcccttgaaacgaagtcatctgtacccctggaaacaagactctcagcgttctcatctctcttccttcaccatgaagctgatggacaaattccactcacccaaaatcaagagaacgccatcaaagaagggaaaaccagctgaggtgtccgtaaagattccagagaagcctgtgaacaaagaggcaacagacagatttctaccagagggctaccctctccccttggatctggagcagcaggcagtagaatttatgtccaccagtgctgtggcttccaggtctcaaaggcagaagaacctgagctggctggaggagaaagagaaggaagttgtcagtgccctgcgctactttaagaccattgtggacaaaatggcaattgataagaaggtactggagatgcttccagggtcagccagcaaggtgctggaggccatcttacccctggtgcagaacgatcctcgaattcagcacagctcagccctctcttcctgctatagccgagtgtaccaaagcctcgccaacctcattcgctggtctgaccaagtgatgctggaaggcgtgaactcagaagacaaggagatggtgacgactgtgaagggggtcatcaaggctgtgctggatggagtgaaggagctggtcaggctcaccatcgagaagcagggacgtccgtctccgacgagccccgtgaagcccagttcccctgccagcaagcctgatggcccagcagagctccccctgacagaccgcgaggtagagatcctaaacaagacgactgggatgtcacagtcaactgagctcctcccagatgccacggatgaagaggtcgcgccccccaagcctcctctgcctggcattcgggtggttgataatagtcctccaccagcattgccacccaagaaaagacagtcggcgccgtcccctacccgagtggctgtggtggcccccatgagccgagccaccagtggctccagtttgcctgttggaatcaataggcaggattttgatgttgactgttacgcacagaggcgactgtcaggaggcagccactcatatggtggagagtcgccccgcctctccccctgcagcagcataggcaagctcagcaagtcagacgagcagctgtcctctctggacagggacagtgggcagtgctcccggaacacaagctgtgaaacactagaccactatgatcccgactatgaattcctccagcaagacctctctaacgcagaccagatacctcagcagacggcctggaaccttagcccgttgccagagtctttgggggagtctgggtctccatttcttggccctcctttccagctgcctcttggcggccatccccagccagacggacctctggccccagggcagcagacagatacgccacctgctctccccgagaagaagcgcaggagcgcagcctcccagacggcggacggctctggctgcagggtgtcctacgagcggcatccctcgcagtatgacaacatctctggggaggacctgcagagcacagccccgatcccatccgtcccctacgcgccctttgctgctattctgccctttcagcatggaggttcctcagcccctgtcgaatttgtgggtgattttactgctcctgagtcaaccggtgacccagaaaaaccacctcctctaccagagaagaaaaacaaacacatgctggcctacatgcagttgctggaggactactcggagccgcagccctctatgttctaccagacgccacagaacgagcacatctaccagcagaagaacaagctcctcatggaggtatacggcttcagcgactccttcagtggggtggactccgtgcaggagctggccccgccgcccgccctaccccccaagcagcggcagctggagccaccggctgggaaagacggacatcccagagatccctcagcggtcagcggcgtccctgggaaggacagcagagacggcagtgagagggccccaaagtcaccagatgctctggagtcggctcagtcggaggaggaagtggacgagctgtccctcattgaccacaacgaaattatgtccaggctgacgctcaagcaggagggtgatgacgggccggacgtccgcggaggatctggggacatcttactggtccatgctactgagactgacaggaaagatttggtgttgtactgcgaggcattcctgaccacctacaggaccttcatctccccagaggagctcatcaagaagctgcagtacagatatgagaaattctctccctttgccgacacattcaagaagcgcgtcagcaagaacacgttcttcgtgctggtacgggtggtggatgagctctgcctggtggagttgacagaagagatcctgaagctgaagagcatggaggccgagatgatccagttgcaggaggaactggcaccgcggagcagtgccaagcagccaggcccagcaggagcgggatgagctggctgacgagatcgccatcagcagcggcaaagtacctggcggtagagaggaggagat

SEQ ID NO: 303897 - DNA, 3061 bp, Homo sapiens
gcgtggcataagggtctgtatgaaaatgtttctcctggcatgccccagaatggttcatttatgactttcagcattttgatcacctgattccccatttctcctgcggagaaaagtggtattaaaagtatttggacataaaattcatcttgcaagccgctgttgtgctgatgagtaataaagtgtcaaaaggatgctgaggaaagagcttcttaatatagaccatgcctgagaggcaccggtagggcgataacaagccctttcttctgatttcctccctggggccaaagggattttgaaaggcagaaggcaaagacttgagaatgagattcctcaggcttcccttgtgaggctgcctgggttctgccgctgggtggtttgggatgtccaagagatatcccctttcagccagtgactcggtcctcagttgctgctccggaaagacgctggggctgggaagggccctgtgtcctctggctttaaaatgggcaatgctattgaaaaacagaagcccttgaaacgaagtcatctgtacccctggaaacaagactctcagcgttctcatctctcttccttcaccatgaagctgatggacaaattccactcacccaaaatcaagagaacgccatcaaagaagggaaaaccagctgaggtgtccgtaaagattccagagaagcctgtgaacaaagaggcaacagacagatttctaccagagggctaccctctccccttggatctggagcagcaggcagtagaatttatgtccaccagtgctgtggcttccaggtctcaaaggcagaagaacctgagctggctggaggagaaagagaaggaagttgtcagtgccctgcgctactttaagaccattgtggacaaaatggcaattgataagaaggtactggagatgcttccagggtcagccagcaaggtgctggaggccatcttacccctggtgcagaacgatcctcgaattcagcacagctcagccctctcttcctgctatagccgagtgtaccaaagcctcgccaacctcattcgctggtctgaccaagtgatgctggaaggcgtgaactcagaagacaaggagatggtgacgactgtgaagggggtcatcaaggctgtgctggatggagtgaaggagctggtcaggctcaccatcgagaagcagggacgtccgtctccgacgagccccgtgaagcccagttcccctgccagcaagcctgatggcccagcagagctccccctgacagaccgcgaggtagagatcctaaacaagacgactgggatgtcacagtcaactgagctcctcccagatgccacggatgaagaggtcgcgccccccaagcctcctctgcctggcattcgggtggttgataatagtcctccaccagcattgccacccaagaaaagacagtcggcgccgtcccctacccgagtggctgtggtggcccccatgagccgagccaccagtggctccagtttgcctgttggaatcaataggcaggattttgatgttgactgttacgcacagaggcgactgtcaggaggcagccactcatatggtggagagtcgccccgcctctccccctgcagcagcataggcaagctcagcaagtcagacgagcagctgtcctctctggacagggacagtgggcagtgctcccggaacacaagctgtgaaacactagaccactatgatcccgactatgaattcctccagcaagacctctctaacgcagaccagatacctcagcagacggcctggaaccttagcccgttgccagagtctttgggggagtctgggtctccatttcttggccctcctttccagctgcctcttggcggccatccccagccagacggacctctggccccagggcagcagacagatacgccacctgctctccccgagaagaagcgcaggagcgcagcctcccagacggcggacggctctggctgcagggtgtcctacgagcggcatccctcgcagtatgacaacatctctggggaggacctgcagagcacagccccgatcccatccgtcccctacgcgccctttgctgctattctgccctttcagcatggaggttcctcagcccctgtcgaatttgtgggtgattttactgctcctgagtcaaccggtgacccagaaaaaccacctcctctaccagagaagaaaaacaaacacatgctggcctacatgcagttgctggaggactactcggagccgcagccctctatgttctaccagacgccacagaacgagcacatctaccagcagaagaacaagctcctcatggaggtatacggcttcagcgactccttcagtggggtggactccgtgcaggagctggccccgccgcccgccctaccccccaagcagcggcagctggagccaccggctgggaaagacggacatcccagagatccctcagcggtcagcggcgtccctgggaaggacagcagagacggcagtgagagggccccaaagtcaccagatgctctggagtcggctcagtcggaggaggaagtggacgagctgtccctcattgaccacaacgaaattatgtccaggctgacgctcaagcaggaggtgagaacttcccgggctggggctttgcagcctggccccacagaggagagcaggtggggcagagaagaatgtgatcttgtcataagcagaacaaccctaggaggcttagagaccaagtctttcaatgcccctggtgagcctctgggctgtgggctctggaggggtagactccaggggaagtgtgctgtctccttctgatgcttatagaaagtcatcttacacaggtcaagttctgcagcctctctagctaaagatgccagaactcctgagggtgtggagatggaacccctgtaaatgctctgcagacagagcctgcatgtggccggccctcactaatgggaaactttttctgtggttgaaaaaatagctccactgtagcttcagtctgggagacagaggcaggggaatggcttgagtccaggcgttcaagaccagcctgggcaacacagcaagacccatctctaaaaaaaa

SEQ ID NO: 303898 - DNA, 347 bp, Homo sapiens
gtgagttgctccctgctgttctttacttggaaacgcgtgaacagggccgttccttggaagcgtgtgcctcagccatgtgttctgctgcccgtcgcggcccctgcccttctgcgggtccctacacctagatgggaaggctatgaatggttggttctctggggccttaaagaccatgaggcatccaggtgaggcaggggcaggcatgggaaatgtgagtggccaccttgggagcatcaccagtctggcataaactgacagagacattttagcctttttatcccaatctcgctttggaccttggatcagccctctgtgttccaggattaaaaaggaatatagccaggtgt

SEQ ID NO: 303899 - DNA, 664 bp, Homo sapiens
tgtttctcctggcctcacctgcttccagcaatatgagtttgtgcgatttgtatgttccctccctggggattgagctttcagtgcatcatacctacttcgtagcattccatgggcgggacctttggtgtccttgtaaaataagaaccattaggatggtgagtgtttgccacgttagccaagctcagttggctaagacagttctccttttccagctgtgtcatcctctgggcatttaaaacagctcagcacatcatgtccacaccccaggctgctgcctccctgccctgcagttccctacgttgccttggcgcacactcaaacacagggaactctgtgatgtccagaacatccatcatttggctttagggcctgtgctctgaaacatgcaaaccccttgagacacagccaaagatgtcctcaagagttagtggcctcagcagggccagtcaagccagatatgttgaaacagctattgactttcatcaacccctcccttcggcctcaaacagccatttcaaactctgtaggaatccaggtttcctctcttccaggaggcaacagacagatttctaccagagggctaccctctccccttggatctggagcagcaggcagtagaatttatgtccaccagtgctgtggcttccaggtctcaaaggcagaa

SEQ ID NO: 303900 - DNA, 549 bp, Homo sapiens
ctggtcacgtcctcaccctctcagggcctgtgtgtgctctgtcccgcctttgaccttctgtaaccccaagttcttcccaattctccagcccagcagagctccccctgacagaccgcgaggtagagatcctaaacaagacgactgggatgtcacagtcaactgagctcctcccagatgccacggatgaagaggtcgcgccccccaagcctcctctgcctggcattcgggtggttgataataggtaattaccttcctatttgtccagtgcctcccatggcagaatgagaaagaaagggaggaagacagggctcgggccctttcccctcagcgctgagggcttggccccccttgggaggctgactctggagctgtccccaccccgccggccctcgctggccaccctgagctctcctgaaggcctccttgtgccctcagcccagggagacatggtatgatttattatgaaagaaaaagaaagggttgttcttttttgttcatttggtatttacaggttttattttggcggaggggagtaggcaggagttgaag

SEQ ID NO: 303901 - DNA, 372 bp, Homo sapiens
tgggatcacctggggccccctccctgtgagcagcccagcctcagggccctgtttgtgctccatgtgctggtggcaccgtctctgagcactggtgtcccctctgtcacattggtcaacggtagcccctgcagcatccgtttgctgcgaggctgtggggatggtccccgcggcaccttccaggagggtggcgccatcgggccatccagcccacacaggtgctcactgactgctccccatcccctgcaccaggcactatgacatgcggaggaacgacgacattataaacttcttcaatgacttcagtgaccacctggctgaggaggccctatgggaactgtctctgaaaattaaacccaggaacataacaaggag

SEQ ID NO: 303902 - DNA, 4692 bp, Homo sapiens
ggcgtcgccgcaagagcgcgagaggcgcggcgggaggagccggcggcgcgcgcctccctgggcccggactcggccccggcagctcccggggcgtctgggctgcctgctcgaggagggcctctgcggagcgtccgaggcctgtgtgaacgatggagtgtttggaaggtgccagaaggttccggcaatggacttttaccgctacgaggtgtcgcccgtggccctgcagcgcctgcgcgtggcgttgcagaagctttccggcacaggtttcacgtggcaggatgactatactcagtatgtgatggaccaggaacttgcagacctcccgaaaacctacctgaggcgtcctgaagcatccagcccagccaggccctcaaaacacagcgttggcagcgagaggaggtacagtcgggagggcggtgctgccctggccaacgccctccgacgccacctgcccttcctggaggccctgtcccaggccccagcctcagacgtgctcgccaggacccatacggcgcaggacagaccccccgctgagggtgatgaccgcttctccgagagcatcctgacctatgtggcccacacgtctgcgctgacctaccctcccgggccccggacccagctccgcgaggacctcctgccgcggaccctcggccagctccagccagatgagctcagccctaaggtggacagtggtgtggacagacaccatctgatggcggccctcagtgcctatgctgcccagaggcccccagctccccccggggagggcagcctggagccacagtaccttctgcgtgcaccctcaagaatgcccaggcctttgctggcaccagccgccccccagaagtggccttcacctctgggagattccgaagacccctccagcacaggcgatggagcacggattcataccctcctgaaggacctgcagaggcagccggctgaggtgaggggcctgagtggcctggagctggacggcatggctgagctgatggctggcctgatgcaaggcgtggaccatggagtagctcgaggcagccctgggagagcggccctgggagagtctggagaacaggcggatggccccaaggccaccctccgtggagacagctttccagatgacggagtgcaggacgacgatgatagactttaccaagaggtccatcgtctgagtgccacactcgggggcctcctgcaggaccacgggtctcgactcttacctggagccctcccctttgcaaggcccctcgacatggagaggaagaagtccgagcaccctgagtcttccctgtcttcagaagaggagactgccggagtggagaacgtcaagagccagacgtattccaaagatctgctggggcagcagccgcattcggagcccggggccgctgcgtttggggagctccaaaaccagatgcctgggccctcgaaggaggagcagagccttccagcgggtgctcaggaggccctcagcgacggcctgcaattggaggtccagccttccgaggaagaggcgcggggctacatcgtgacagacagagaccccctgcgccccgaggaaggaaggcggctggtggaggacgtcgcccgcctcctgcaggtgcccagcagtgcgttcgctgacgtggaggttctcggaccagcagtgaccttcaaagtgagcgccaatgtccaaaacgtgaccactgaggatgtggagaaggccacagttgacaacaaagacaaactggaggaaacctctggactgaaaattcttcaaaccggagtcgggtcgaaaagcaaactcaagttcctgcctcctcaggcggagcaagaagactccaccaagttcatcgcgctcaccctggtctccctcgcctgcatcctgggcgtcctcctggcctctggcctcatctactgcctccgccatagctctcagcacaggctgaaggagaagctctcgggactagggggcgacccaggtgcagatgccactgccgcctaccaggagctgtgccgccagcgtatggccacgcggccaccagaccgacctgagggcccgcacacgtcacgcatcagcagcgtctcatcccagttcagcgacgggccgatccccagcccctccgcacgcagcagcgcctcatcctggtccgaggagcctgtgcagtccaacatggacatctccaccggccacatgatcctgtcctacatggaggaccacctgaagaacaagaaccggctggagaaggagtgggaagcgctgtgcgcctaccaggcggagcccaacagctcgttcgtggcccagagggaggagaacgtgcccaagaaccgctccctggccgtgctgacctatgaccactcccgggtcctgctgaaggcggagaacagccacagccactcagactacatcaacgctagccccatcatggatcacgacccgaggaaccccgcgtacatcgccacccagggaccgctgcccgccaccgtggctgacttttggcagatggtgtgggagagcggctgcgtggtgatcgtcatgctgacacccctcgcggagaacggcgtccggcagtgctaccactactggccggatgaaggctccaatctctaccacatctatgaggtgaacctggtctccgagcacatctggtgtgaggacttcctggtgaggagcttctatctgaagaacctgcagaccaacgagacgcgcaccgtgacgcagttccacttcctgagttggtatgaccgaggagtcccttcctcctcaaggtccctcctggacttccgcagaaaagtaaacaagtgctacaggggccgttcttgtccaataattgttcattgcagtgacggtgcaggccggagcggcacctacgtcctgatcgacatggttctcaacaagatggccaaaggtgctaaagagattgatatcgcagcgaccctggagcacttgagggaccagagacccggcatggtccagacgaaggagcagtttgagttcgcgctgacagccgtggctgaggaggtgaacgccatcctcaaggcccttccccagtgagcggcagcctcaggggcctcaggggagcccccaccccacggatgttgtcaggaatcatgatctgactttaattgtgtgtcttctattataactgcatagtaatagggcccttagctctcccgtagtcagcgcagtttagcagttaaaagtgtatttttgtttaatcaaacaataataaagagagatttgtggaaaaatccagttacgggtggaggggaatcggttcatcaattttcacttgcttaaaaaaaatactttttcttaaagcacccgttcaccttcttggttgaagttgtgttaacaatgcagtagccagcacgttcgaggcggtttccaggaagagtgtgcttgtcatctgccactttcgggagggtggatccactgtgcaggagtggccggggaagctggcagcactcagtgaggccgcccggcacacaaggcacgtttggcatttctctttgagagagtttatcattgggagaagccgcggggacagaactgaacgtcctgcagcttcggggcaagtgagacaatcacagctcctcgctgcgtctccatcaacactgcgccgggtaccatggacggccccgtcagccacacctgtcagcccaagcagagtgattcaggggctccccgggggcagacacctgtgcaccccatgagtagtgcccacttgaggctggcactcccctgacctcacctttgcaaagttacagatgcaccccaacattgagatgtgtttttaatgttaaaatattgatttctacgttatgaaaacagatgcccccgtgaatgcttacctgtgagataaccacaaccaggaagaacaaatctgggcattgagcaagctatgagggtccccgggagcacacgaaccctgccaggcccccgctggctcctccaggcacgtcccggacctgtggggccccagagaggggacatttccctcctgggagagaaggagatcagggcaactcggagagggctgcgagcatttccctcccgggagaggagatcagggcgacctgcacgcactgcgtagagcctggaagggaagtgagaaaccagccgaccggccctgcccctcttcccgggatcacttaatgaaccacgtgttttgacatcatgtaaacctaagcacgtagagatgattcggatttgacaaaataacatttgagtatccgattcgccatcaccccctaccccagaaataggacaattcacttcattgaccaggatgatcacatggaaggcggcgcagaggcagctgtgtgggctgcagatttcctgtgtggggttcagcgtagaaaacgcacctccatcccgcccttcccacagcattcctccatcttagatagatggtactctccaaaggccctaccagagggaacacggcctactgagcggacagaatgatgccaaaatattgcttatgtctctacatggtattgtaatgaatatctgctttaatatagctatcatttcttttccaaaattacttctctctatctggaatttaattaatcgaaatgaatttatctgaatataggaagcatatgcctacttgtaatttctaactccttatgtttgaagagaaacctccggtgtgagatatacaaatatatttaattgtgtcatattaaacttctgatttcaca

SEQ ID NO: 303903 - DNA, 472 bp, Homo sapiens
gttgtgggtcgggcttccgtgtggacggcagcactttcatttctctccttctgttggcagtgacggtgcaggccggagcggcacctacgtcctgatcgacatggttctcaacaagatggccaaaggtgctaaagagattgatatcgcagcgaccctggagcacttgagggaccagagacccggcatggtccagacgaaggagcagtttgagttcgcgctgacagccgtggctgaggaggtgaacgccatcctcaaggcccttccccagtgagcggcagcctcaggggcctcaggggagcccccaccccacggatgttgtcaggaatcatgatctgactttaattgtgtgtcttctattataactgcatagtaatagggcccttagctctcccgtagtcagcgcagtttagcagttaaaagtgtatttttgtttaatcaaacaataataaagagagatttgtggaaaaatcca

SEQ ID NO: 303904 - DNA, 1330 bp, Homo sapiens
agtccggatagcagcgccgaggtctgctcgtggtgagagaccccgagtcccggcacactgtgggggggccgcaggacggcggcccggggtgccctcgggacccctgcgctccgagactcgaggactacgcgacaaacggcagttcaggctgccgcgggtgcaggtttgctcatccacggccgccgggttagggagacgattctggcacgttccaggcaggccggtgtcgggagagggtccctgcgtgtgggagacggaggcggcggggtcggctggagaaccggggaaggaacgcggcggcctcctcccgcgggaagaggcccaagccgggctcgccctgcggctcagcgaggagcccgccctgccggcttctgaggacgcgccccggaccctgctctcctgggcctgaggtgacacgttctgtcgattgaggccccgaggtttgcggaagtctctggccgcagccgcgggaggcgcaacacgctgaggctgcgcgacgtggggcccgcccggacccgcctccgcccgtgtctccccgcagccgtctctgccagaactatcggaagagaccggaactgttggttttgtgtctgtgagaagagcagcactgggaataagtcacctgctgagctgacagcggaaacgaaggacaagcggagtcgcctagcgccgtcgctgcttagcccagaaaacggcctcgtcagcgccctcgacctgtttgcggaccgcttcaggagctgaaggaaccaccgagatgaccactcccgggtcctgctgaaggcggagaacagccacagccactcagactacatcaacgctagccccatcctcttctcaattctggtcttcagggaaggatgaggacatctcactaaaattccaaatttgcctttaatcaaacatggtgcctgcaggatgcaatgctgttctagggctgagtgagacggggcaggtgatcgaggcacaaatcgcaccctacggtgtcccaaagtttctttgctcgtccatagggagctttggatgaaagtattggcccaactgcctgcaggccacggccactgatggcggacagtgctcagctctcggctctgctgatctcagcagccactgatggtggagggtgctcagctctcggctctgctggtctcagcggccactgatgacggacggtgctcagctctcagctctgctggtctcagtggccactgatggcagatggcgctcagctctcagctctgctggtctcagcggtcactgatggtggagggtgctcagctctcagctctgctggtctcagtggccactgatggcagacagtgctcagctctcg

SEQ ID NO: 303905 - DNA, 758 bp, Homo sapiens
ggcgtcgccgcaagagcgcgagaggcgcggcgggaggagccggcggcgcgcgcctccctgggcccggactcggccgcctcccgccgcctcccgcgcggccatggactgagcgccgccggccaggccgcggggatggggccgccgctcccgctgctgctgctgctactgctgctgctgccgccacgcgtcctgcctgccgccccttcgtccgtcccccgcggccggcagctcccggggcgtctgggctgcctgctcgaggagggcctctgcggagcgtccgaggcctgtgtgaacggtggtgccgagtcccacaaaggaacctggaatccagctgagtgggcacgtgctgcctgtcacggcccttcatgtcctgaacatctgttgagaggaggcgggggtgtcaccttaattccatcttggacaccacagtgacacaaagtgcaaagtgccgtgcccctcatccccacagatatgtggcatcccactggtctcctaaccacccaacgccgttgctcctgaccattggaaacgctggtggggctggagcacctggacagtccagtctcgttctagtggctggactggagtggggttgccttgaacccgtcttaggctggaaatgcccccagcagcagtgccaggggaactctcactggggcctgccctgggagccccggggaacacttgtcagttcagctctgaccttaaggtgggactgccccatgcccttggcccaggagtgggagctgcaggaggag

SEQ ID NO: 303906 - DNA, 696 bp, Homo sapiens
cgccccatcctcagtcagagtcccagcatccgccgcacctgcctgtcccttctcccttctcccctttattgtattttcactgaaggctgagaggagccagtctccacacggtgggccacttgcgattcccacagccccgtccgcactgcactgtttgtcttgttgctggaaactcagccccctgcgccccgaggaaggaaggcggctggtggaggacgtcgcccgcctcctgcaggtgcccagcagtgcgttcgctgacgtggacagtatacagacaacccaaagagtgagaaaaaatcttcatgatctatatatccgacaaaagactaatatccagactctacaaagaactcacattagcaagaaacaaacagtcccatcaaacaatgggctaaagacatgaatagacaattcttgaaagaagatatacaaatggccaacaaacatatgaaaaaatgcccaacatcactaatgatcagggaaatgcaaatcgaaaccacaatgttataccaccttactcctgcaagattggatataatcaaaaaatcaaaaaacagtagatgctggtgtggatgtggtgaacagggaacacttctacactgctggtgggagtgcaaactagcacagccactatggaaaacagtgtggagattccttaaagaactaaaagaactaccatttgattcagcaatccca

SEQ ID NO: 303907 - DNA, 4838 bp, Homo sapiens
ggcgtcgccgcaagagcgcgagaggcgcggcgggaggagccggcggcgcgcgcctccctgggcccggactcggccgcctcccgccgcctcccgcgcggccatggactgagcgccgccggccaggccgcggggatggggccgccgctcccgctgctgctgctgctactgctgctgctgccgccacgcgtcctgcctgccgccccttcgtccgtcccccgcggccggcagctcccggggcgtctgggctgcctgctcgaggagggcctctgcggagcgtccgaggcctgtgtgaacgatggagtgtttggaaggtgccagaaggttccggcaatggacttttaccgctacgaggtgtcgcccgtggccctgcagcgcctgcgcgtggcgttgcagaagctttccggcacaggtttcacgtggcaggatgactatactcagtatgtgatggaccaggaacttgcagacctcccgaaaacctacctgaggcgtcctgaagcatccagcccagccaggccctcaaaacacagcgttggcagcgagaggaggtacagtcgggagggcggtgctgccctggccaacgccctccgacgccacctgcccttcctggaggccctgtcccaggccccagcctcagacgtgctcgccaggacccatacggcgcaggacagaccccccgctgagggtgatgaccgcttctccgagagcatcctgacctatgtggcccacacgtctgcgctgacctaccctcccgggccccggacccagctccgcgaggacctcctgccgcggaccctcggccagctccagccagatgagctcagccctaaggtggacagtggtgtggacagacaccatctgatggcggccctcagtgcctatgctgcccagaggcccccagctccccccggggagggcagcctggagccacagtaccttctgcgtgcaccctcaagaatgcccaggcctttgctggcaccagccgccccccagaagtggccttcacctctgggagattccgaagacccctccagcacaggcgatggagcacggattcataccctcctgaaggacctgcagaggcagccggctgaggtgaggggcctgagtggcctggagctggacggcatggctgagctgatggctggcctgatgcaaggcgtggaccatggagtagctcgaggcagccctgggagagcggccctgggagagtctggagaacaggcggatggccccaaggccaccctccgtggagacagctttccagatgacggagtgcaggacgacgatgatagactttaccaagaggtccatcgtctgagtgccacactcgggggcctcctgcaggaccacgggtctcgactcttacctggagccctcccctttgcaaggcccctcgacatggagaggaagaagtccgagcaccctgagtcttccctgtcttcagaagaggagactgccggagtggagaacgtcaagagccagacgtattccaaagatctgctggggcagcagccgcattcggagcccggggccgctgcgtttggggagctccaaaaccagatgcctgggccctcgaaggaggagcagagccttccagcgggtgctcaggaggccctcagcgacggcctgcaattggaggtccagccttccgaggaagaggcgcggggctacatcgtgacagacagagaccccctgcgccccgaggaaggaaggcggctggtggaggacgtcgcccgcctcctgcaggtgcccagcagtgcgttcgctgacgtggaggttctcggaccagcagtgaccttcaaagtgagcgccaatgtccaaaacgtgaccactgaggatgtggagaaggccacagttgacaacaaagacaaactggaggaaacctctggactgaaaattcttcaaaccggagtcgggtcgaaaagcaaactcaagttcctgcctcctcaggcggagcaagaagactccaccaagttcatcgcgctcaccctggtctccctcgcctgcatcctgggcgtcctcctggcctctggcctcatctactgcctccgccatagctctcagcacaggctgaaggagaagctctcgggactagggggcgacccaggtgcagatgccactgccgcctaccaggagctgtgccgccagcgtatggccacgcggccaccagaccgacctgagggcccgcacacgtcacgcatcagcagcgtctcatcccagttcagcgacgggccgatccccagcccctccgcacgcagcagcgcctcatcctggtccgaggagcctgtgcagtccaacatggacatctccaccggccacatgatcctgtcctacatggaggaccacctgaagaacaagaaccggctggagaaggagtgggaagcgctgtgcgcctaccaggcggagcccaacagctcgttcgtggcccagagggaggagaacgtgcccaagaaccgctccctggccgtgctgacctatgaccactcccgggtcctgctgaaggcggagaacagccacagccactcagactacatcaacgctagccccatcatggatcacgacccgaggaaccccgcgtacatcgccacccagggaccgctgcccgccaccgtggctgacttttggcagatggtgtgggagagcggctgcgtggtgatcgtcatgctgacacccctcgcggagaacggcgtccggcagtgctaccactactggccggatgaaggctccaatctctaccacatctatgaggtgaacctggtctccgagcacatctggtgtgaggacttcctggtgaggagcttctatctgaagaacctgcagaccaacgagacgcgcaccgtgacgcagttccacttcctgagttggtatgaccgaggagtcccttcctcctcaaggtccctcctggacttccgcagaaaagtaaacaagtgctacaggggccgttcttgtccaataattgttcattgcagtgacggtgcaggccggagcggcacctacgtcctgatcgacatggttctcaacaagatggccaaaggtgctaaagagattgatatcgcagcgaccctggagcacttgagggaccagagacccggcatggtccagacgaaggagcagtttgagttcgcgctgacagccgtggctgaggaggtgaacgccatcctcaaggcccttccccagtgagcggcagcctcaggggcctcaggggagcccccaccccacggatgttgtcaggaatcatgatctgactttaattgtgtgtcttctattataactgcatagtaatagggcccttagctctcccgtagtcagcgcagtttagcagttaaaagtgtatttttgtttaatcaaacaataataaagagagatttgtggaaaaatccagttacgggtggaggggaatcggttcatcaattttcacttgcttaaaaaaaatactttttcttaaagcacccgttcaccttcttggttgaagttgtgttaacaatgcagtagccagcacgttcgaggcggtttccaggaagagtgtgcttgtcatctgccactttcgggagggtggatccactgtgcaggagtggccggggaagctggcagcactcagtgaggccgcccggcacacaaggcacgtttggcatttctctttgagagagtttatcattgggagaagccgcggggacagaactgaacgtcctgcagcttcggggcaagtgagacaatcacagctcctcgctgcgtctccatcaacactgcgccgggtaccatggacggccccgtcagccacacctgtcagcccaagcagagtgattcaggggctccccgggggcagacacctgtgcaccccatgagtagtgcccacttgaggctggcactcccctgacctcacctttgcaaagttacagatgcaccccaacattgagatgtgtttttaatgttaaaatattgatttctacgttatgaaaacagatgcccccgtgaatgcttacctgtgagataaccacaaccaggaagaacaaatctgggcattgagcaagctatgagggtccccgggagcacacgaaccctgccaggcccccgctggctcctccaggcacgtcccggacctgtggggccccagagaggggacatttccctcctgggagagaaggagatcagggcaactcggagagggctgcgagcatttccctcccgggagaggagatcagggcgacctgcacgcactgcgtagagcctggaagggaagtgagaaaccagccgaccggccctgcccctcttcccgggatcacttaatgaaccacgtgttttgacatcatgtaaacctaagcacgtagagatgattcggatttgacaaaataacatttgagtatccgattcgccatcaccccctaccccagaaataggacaattcacttcattgaccaggatgatcacatggaaggcggcgcagaggcagctgtgtgggctgcagatttcctgtgtggggttcagcgtagaaaacgcacctccatcccgcccttcccacagcattcctccatcttagatagatggtactctccaaaggccctaccagagggaacacggcctactgagcggacagaatgatgccaaaatattgcttatgtctctacatggtattgtaatgaatatctgctttaatatagctatcatttcttttccaaaattacttctctctatctggaatttaattaatcgaaatgaatttatctgaatataggaagcatatgcctacttgtaatttctaactccttatgtttgaagagaaacctccggtgtgagatatacaaatatatttaattgtgtcatattaaacttctgatttcaca

SEQ ID NO: 303908 - DNA, 4787 bp, Homo sapiens
ggcgtcgccgcaagagcgcgagaggcgcggcgggaggagccggcggcgcgcgcctccctgggcccggactcggccgcctcccgccgcctcccgcgcggccatggactgagcgccgccggccaggccgcggggatggggccgccgctcccgctgctgctgctgctactgctgctgctgccgccacgcgtcctgcctgccgccccttcgtccgtcccccgcggccggcagctcccggggcgtctggatggagtgtttggaaggtgccagaaggttccggcaatggacttttaccgctacgaggtgtcgcccgtggccctgcagcgcctgcgcgtggcgttgcagaagctttccggcacaggtttcacgtggcaggatgactatactcagtatgtgatggaccaggaacttgcagacctcccgaaaacctacctgaggcgtcctgaagcatccagcccagccaggccctcaaaacacagcgttggcagcgagaggaggtacagtcgggagggcggtgctgccctggccaacgccctccgacgccacctgcccttcctggaggccctgtcccaggccccagcctcagacgtgctcgccaggacccatacggcgcaggacagaccccccgctgagggtgatgaccgcttctccgagagcatcctgacctatgtggcccacacgtctgcgctgacctaccctcccgggccccggacccagctccgcgaggacctcctgccgcggaccctcggccagctccagccagatgagctcagccctaaggtggacagtggtgtggacagacaccatctgatggcggccctcagtgcctatgctgcccagaggcccccagctccccccggggagggcagcctggagccacagtaccttctgcgtgcaccctcaagaatgcccaggcctttgctggcaccagccgccccccagaagtggccttcacctctgggagattccgaagacccctccagcacaggcgatggagcacggattcataccctcctgaaggacctgcagaggcagccggctgaggtgaggggcctgagtggcctggagctggacggcatggctgagctgatggctggcctgatgcaaggcgtggaccatggagtagctcgaggcagccctgggagagcggccctgggagagtctggagaacaggcggatggccccaaggccaccctccgtggagacagctttccagatgacggagtgcaggacgacgatgatagactttaccaagaggtccatcgtctgagtgccacactcgggggcctcctgcaggaccacgggtctcgactcttacctggagccctcccctttgcaaggcccctcgacatggagaggaagaagtccgagcaccctgagtcttccctgtcttcagaagaggagactgccggagtggagaacgtcaagagccagacgtattccaaagatctgctggggcagcagccgcattcggagcccggggccgctgcgtttggggagctccaaaaccagatgcctgggccctcgaaggaggagcagagccttccagcgggtgctcaggaggccctcagcgacggcctgcaattggaggtccagccttccgaggaagaggcgcggggctacatcgtgacagacagagaccccctgcgccccgaggaaggaaggcggctggtggaggacgtcgcccgcctcctgcaggtgcccagcagtgcgttcgctgacgtggaggttctcggaccagcagtgaccttcaaagtgagcgccaatgtccaaaacgtgaccactgaggatgtggagaaggccacagttgacaacaaagacaaactggaggaaacctctggactgaaaattcttcaaaccggagtcgggtcgaaaagcaaactcaagttcctgcctcctcaggcggagcaagaagactccaccaagttcatcgcgctcaccctggtctccctcgcctgcatcctgggcgtcctcctggcctctggcctcatctactgcctccgccatagctctcagcacaggctgaaggagaagctctcgggactagggggcgacccaggtgcagatgccactgccgcctaccaggagctgtgccgccagcgtatggccacgcggccaccagaccgacctgagggcccgcacacgtcacgcatcagcagcgtctcatcccagttcagcgacgggccgatccccagcccctccgcacgcagcagcgcctcatcctggtccgaggagcctgtgcagtccaacatggacatctccaccggccacatgatcctgtcctacatggaggaccacctgaagaacaagaaccggctggagaaggagtgggaagcgctgtgcgcctaccaggcggagcccaacagctcgttcgtggcccagagggaggagaacgtgcccaagaaccgctccctggccgtgctgacctatgaccactcccgggtcctgctgaaggcggagaacagccacagccactcagactacatcaacgctagccccatcatggatcacgacccgaggaaccccgcgtacatcgccacccagggaccgctgcccgccaccgtggctgacttttggcagatggtgtgggagagcggctgcgtggtgatcgtcatgctgacacccctcgcggagaacggcgtccggcagtgctaccactactggccggatgaaggctccaatctctaccacatctatgaggtgaacctggtctccgagcacatctggtgtgaggacttcctggtgaggagcttctatctgaagaacctgcagaccaacgagacgcgcaccgtgacgcagttccacttcctgagttggtatgaccgaggagtcccttcctcctcaaggtccctcctggacttccgcagaaaagtaaacaagtgctacaggggccgttcttgtccaataattgttcattgcagtgacggtgcaggccggagcggcacctacgtcctgatcgacatggttctcaacaagatggccaaaggtgctaaagagattgatatcgcagcgaccctggagcacttgagggaccagagacccggcatggtccagacgaaggagcagtttgagttcgcgctgacagccgtggctgaggaggtgaacgccatcctcaaggcccttccccagtgagcggcagcctcaggggcctcaggggagcccccaccccacggatgttgtcaggaatcatgatctgactttaattgtgtgtcttctattataactgcatagtaatagggcccttagctctcccgtagtcagcgcagtttagcagttaaaagtgtatttttgtttaatcaaacaataataaagagagatttgtggaaaaatccagttacgggtggaggggaatcggttcatcaattttcacttgcttaaaaaaaatactttttcttaaagcacccgttcaccttcttggttgaagttgtgttaacaatgcagtagccagcacgttcgaggcggtttccaggaagagtgtgcttgtcatctgccactttcgggagggtggatccactgtgcaggagtggccggggaagctggcagcactcagtgaggccgcccggcacacaaggcacgtttggcatttctctttgagagagtttatcattgggagaagccgcggggacagaactgaacgtcctgcagcttcggggcaagtgagacaatcacagctcctcgctgcgtctccatcaacactgcgccgggtaccatggacggccccgtcagccacacctgtcagcccaagcagagtgattcaggggctccccgggggcagacacctgtgcaccccatgagtagtgcccacttgaggctggcactcccctgacctcacctttgcaaagttacagatgcaccccaacattgagatgtgtttttaatgttaaaatattgatttctacgttatgaaaacagatgcccccgtgaatgcttacctgtgagataaccacaaccaggaagaacaaatctgggcattgagcaagctatgagggtccccgggagcacacgaaccctgccaggcccccgctggctcctccaggcacgtcccggacctgtggggccccagagaggggacatttccctcctgggagagaaggagatcagggcaactcggagagggctgcgagcatttccctcccgggagaggagatcagggcgacctgcacgcactgcgtagagcctggaagggaagtgagaaaccagccgaccggccctgcccctcttcccgggatcacttaatgaaccacgtgttttgacatcatgtaaacctaagcacgtagagatgattcggatttgacaaaataacatttgagtatccgattcgccatcaccccctaccccagaaataggacaattcacttcattgaccaggatgatcacatggaaggcggcgcagaggcagctgtgtgggctgcagatttcctgtgtggggttcagcgtagaaaacgcacctccatcccgcccttcccacagcattcctccatcttagatagatggtactctccaaaggccctaccagagggaacacggcctactgagcggacagaatgatgccaaaatattgcttatgtctctacatggtattgtaatgaatatctgctttaatatagctatcatttcttttccaaaattacttctctctatctggaatttaattaatcgaaatgaatttatctgaatataggaagcatatgcctacttgtaatttctaactccttatgtttgaagagaaacctccggtgtgagatatacaaatatatttaattgtgtcatattaaacttctgatttcaca

SEQ ID NO: 303909 - DNA, 4751 bp, Homo sapiens
ggcgtcgccgcaagagcgcgagaggcgcggcgggaggagccggcggcgcgcgcctccctgggcccggactcggccgcctcccgccgcctcccgcgcggccatggactgagcgccgccggccaggccgcggggatggggccgccgctcccgctgctgctgctgctactgctgctgctgccgccacgcgtcctgcctgccgccccttcgtccgtcccccgcggccggcagctcccggggcgtctgggctgcctgctcgaggagggcctctgcggagcgtccgaggcctgtgtgaacgatggagtgtttggaaggtgccagaaggttccggcaatggacttttaccgctacgaggtgtcgcccgtggccctgcagcgcctgcgcgtggcgttgcagaagctttccggcacaggtttcacgtggcaggatgactatactcagtatgtgatggaccaggaacttgcagacctcccgaaaacctacctgaggcgtcctgaagcatccagcccagccaggccctcaaaacacagcgttggcagcgagaggaggtacagtcgggagggcggtgctgccctggccaacgccctccgacgccacctgcccttcctggaggccctgtcccaggccccagcctcagacgtgctcgccaggacccatacggcgcaggacagaccccccgctgagggtgatgaccgcttctccgagagcatcctgacctatgtggcccacacgtctgcgctgacctaccctcccgggccccggacccagctccgcgaggacctcctgccgcggaccctcggccagctccagccagatgagctcagccctaaggtggacagtggtgtggacagacaccatctgatggcggccctcagtgcctatgctgcccagaggcccccagctccccccggggagggcagcctggagccacagtaccttctgcgtgcaccctcaagaatgcccaggcctttgctggcaccagccgccccccagaagtggccttcacctctgggagattccgaagacccctccagcacaggcgatggagcacggattcataccctcctgaaggacctgcagaggcagccggctgaggtgaggggcctgagtggcctggagctggacggcatggctgagctgatggctggcctgatgcaaggcgtggaccatggagtagctcgaggcagccctgggagagcggccctgggagagtctggagaacaggcggatggccccaaggccaccctccgtggagacagctttccagatgacggagtgcaggacgacgatgatagactttaccaagaggtccatcgtctgagtgccacactcgggggcctcctgcaggaccacgggtctcgactcttacctggagccctcccctttgcaaggcccctcgacatggagaggaagaagtccgagcaccctgagtcttccctgtcttcagaagaggagactgccggagtggagaacgtcaagagccagacgtattccaaagatctgctggggcagcagccgcattcggagcccggggccgctgcgtttggggagctccaaaaccagatgcctgggccctcgaaggaggagcagagccttccagcgggtgctcaggaggccctcagcgacggcctgcaattggaggtccagccttccgaggaagaggcgcggggctacatcgtgacagacagagaggttctcggaccagcagtgaccttcaaagtgagcgccaatgtccaaaacgtgaccactgaggatgtggagaaggccacagttgacaacaaagacaaactggaggaaacctctggactgaaaattcttcaaaccggagtcgggtcgaaaagcaaactcaagttcctgcctcctcaggcggagcaagaagactccaccaagttcatcgcgctcaccctggtctccctcgcctgcatcctgggcgtcctcctggcctctggcctcatctactgcctccgccatagctctcagcacaggctgaaggagaagctctcgggactagggggcgacccaggtgcagatgccactgccgcctaccaggagctgtgccgccagcgtatggccacgcggccaccagaccgacctgagggcccgcacacgtcacgcatcagcagcgtctcatcccagttcagcgacgggccgatccccagcccctccgcacgcagcagcgcctcatcctggtccgaggagcctgtgcagtccaacatggacatctccaccggccacatgatcctgtcctacatggaggaccacctgaagaacaagaaccggctggagaaggagtgggaagcgctgtgcgcctaccaggcggagcccaacagctcgttcgtggcccagagggaggagaacgtgcccaagaaccgctccctggccgtgctgacctatgaccactcccgggtcctgctgaaggcggagaacagccacagccactcagactacatcaacgctagccccatcatggatcacgacccgaggaaccccgcgtacatcgccacccagggaccgctgcccgccaccgtggctgacttttggcagatggtgtgggagagcggctgcgtggtgatcgtcatgctgacacccctcgcggagaacggcgtccggcagtgctaccactactggccggatgaaggctccaatctctaccacatctatgaggtgaacctggtctccgagcacatctggtgtgaggacttcctggtgaggagcttctatctgaagaacctgcagaccaacgagacgcgcaccgtgacgcagttccacttcctgagttggtatgaccgaggagtcccttcctcctcaaggtccctcctggacttccgcagaaaagtaaacaagtgctacaggggccgttcttgtccaataattgttcattgcagtgacggtgcaggccggagcggcacctacgtcctgatcgacatggttctcaacaagatggccaaaggtgctaaagagattgatatcgcagcgaccctggagcacttgagggaccagagacccggcatggtccagacgaaggagcagtttgagttcgcgctgacagccgtggctgaggaggtgaacgccatcctcaaggcccttccccagtgagcggcagcctcaggggcctcaggggagcccccaccccacggatgttgtcaggaatcatgatctgactttaattgtgtgtcttctattataactgcatagtaatagggcccttagctctcccgtagtcagcgcagtttagcagttaaaagtgtatttttgtttaatcaaacaataataaagagagatttgtggaaaaatccagttacgggtggaggggaatcggttcatcaattttcacttgcttaaaaaaaatactttttcttaaagcacccgttcaccttcttggttgaagttgtgttaacaatgcagtagccagcacgttcgaggcggtttccaggaagagtgtgcttgtcatctgccactttcgggagggtggatccactgtgcaggagtggccggggaagctggcagcactcagtgaggccgcccggcacacaaggcacgtttggcatttctctttgagagagtttatcattgggagaagccgcggggacagaactgaacgtcctgcagcttcggggcaagtgagacaatcacagctcctcgctgcgtctccatcaacactgcgccgggtaccatggacggccccgtcagccacacctgtcagcccaagcagagtgattcaggggctccccgggggcagacacctgtgcaccccatgagtagtgcccacttgaggctggcactcccctgacctcacctttgcaaagttacagatgcaccccaacattgagatgtgtttttaatgttaaaatattgatttctacgttatgaaaacagatgcccccgtgaatgcttacctgtgagataaccacaaccaggaagaacaaatctgggcattgagcaagctatgagggtccccgggagcacacgaaccctgccaggcccccgctggctcctccaggcacgtcccggacctgtggggccccagagaggggacatttccctcctgggagagaaggagatcagggcaactcggagagggctgcgagcatttccctcccgggagaggagatcagggcgacctgcacgcactgcgtagagcctggaagggaagtgagaaaccagccgaccggccctgcccctcttcccgggatcacttaatgaaccacgtgttttgacatcatgtaaacctaagcacgtagagatgattcggatttgacaaaataacatttgagtatccgattcgccatcaccccctaccccagaaataggacaattcacttcattgaccaggatgatcacatggaaggcggcgcagaggcagctgtgtgggctgcagatttcctgtgtggggttcagcgtagaaaacgcacctccatcccgcccttcccacagcattcctccatcttagatagatggtactctccaaaggccctaccagagggaacacggcctactgagcggacagaatgatgccaaaatattgcttatgtctctacatggtattgtaatgaatatctgctttaatatagctatcatttcttttccaaaattacttctctctatctggaatttaattaatcgaaatgaatttatctgaatataggaagcatatgcctacttgtaatttctaactccttatgtttgaagagaaacctccggtgtgagatatacaaatatatttaattgtgtcatattaaacttctgatttcaca

SEQ ID NO: 303910 - DNA, 4724 bp, Homo sapiens
ggcgtcgccgcaagagcgcgagaggcgcggcgggaggagccggcggcgcgcgcctccctgggcccggactcggccgcctcccgccgcctcccgcgcggccatggactgagcgccgccggccaggccgcggggatggggccgccgctcccgctgctgctgctgctactgctgctgctgccgccacgcgtcctgcctgccgccccttcgtccgtcccccgcggccggcagctcccggggcgtctgggctgcctgctcgaggagggcctctgcggagcgtccgaggcctgtgtgaacggtttcacgtggcaggatgactatactcagtatgtgatggaccaggaacttgcagacctcccgaaaacctacctgaggcgtcctgaagcatccagcccagccaggccctcaaaacacagcgttggcagcgagaggaggtacagtcgggagggcggtgctgccctggccaacgccctccgacgccacctgcccttcctggaggccctgtcccaggccccagcctcagacgtgctcgccaggacccatacggcgcaggacagaccccccgctgagggtgatgaccgcttctccgagagcatcctgacctatgtggcccacacgtctgcgctgacctaccctcccgggccccggacccagctccgcgaggacctcctgccgcggaccctcggccagctccagccagatgagctcagccctaaggtggacagtggtgtggacagacaccatctgatggcggccctcagtgcctatgctgcccagaggcccccagctccccccggggagggcagcctggagccacagtaccttctgcgtgcaccctcaagaatgcccaggcctttgctggcaccagccgccccccagaagtggccttcacctctgggagattccgaagacccctccagcacaggcgatggagcacggattcataccctcctgaaggacctgcagaggcagccggctgaggtgaggggcctgagtggcctggagctggacggcatggctgagctgatggctggcctgatgcaaggcgtggaccatggagtagctcgaggcagccctgggagagcggccctgggagagtctggagaacaggcggatggccccaaggccaccctccgtggagacagctttccagatgacggagtgcaggacgacgatgatagactttaccaagaggtccatcgtctgagtgccacactcgggggcctcctgcaggaccacgggtctcgactcttacctggagccctcccctttgcaaggcccctcgacatggagaggaagaagtccgagcaccctgagtcttccctgtcttcagaagaggagactgccggagtggagaacgtcaagagccagacgtattccaaagatctgctggggcagcagccgcattcggagcccggggccgctgcgtttggggagctccaaaaccagatgcctgggccctcgaaggaggagcagagccttccagcgggtgctcaggaggccctcagcgacggcctgcaattggaggtccagccttccgaggaagaggcgcggggctacatcgtgacagacagagaccccctgcgccccgaggaaggaaggcggctggtggaggacgtcgcccgcctcctgcaggtgcccagcagtgcgttcgctgacgtggaggttctcggaccagcagtgaccttcaaagtgagcgccaatgtccaaaacgtgaccactgaggatgtggagaaggccacagttgacaacaaagacaaactggaggaaacctctggactgaaaattcttcaaaccggagtcgggtcgaaaagcaaactcaagttcctgcctcctcaggcggagcaagaagactccaccaagttcatcgcgctcaccctggtctccctcgcctgcatcctgggcgtcctcctggcctctggcctcatctactgcctccgccatagctctcagcacaggctgaaggagaagctctcgggactagggggcgacccaggtgcagatgccactgccgcctaccaggagctgtgccgccagcgtatggccacgcggccaccagaccgacctgagggcccgcacacgtcacgcatcagcagcgtctcatcccagttcagcgacgggccgatccccagcccctccgcacgcagcagcgcctcatcctggtccgaggagcctgtgcagtccaacatggacatctccaccggccacatgatcctgtcctacatggaggaccacctgaagaacaagaaccggctggagaaggagtgggaagcgctgtgcgcctaccaggcggagcccaacagctcgttcgtggcccagagggaggagaacgtgcccaagaaccgctccctggccgtgctgacctatgaccactcccgggtcctgctgaaggcggagaacagccacagccactcagactacatcaacgctagccccatcatggatcacgacccgaggaaccccgcgtacatcgccacccagggaccgctgcccgccaccgtggctgacttttggcagatggtgtgggagagcggctgcgtggtgatcgtcatgctgacacccctcgcggagaacggcgtccggcagtgctaccactactggccggatgaaggctccaatctctaccacatctatgaggtgaacctggtctccgagcacatctggtgtgaggacttcctggtgaggagcttctatctgaagaacctgcagaccaacgagacgcgcaccgtgacgcagttccacttcctgagttggtatgaccgaggagtcccttcctcctcaaggtccctcctggacttccgcagaaaagtaaacaagtgctacaggggccgttcttgtccaataattgttcattgcagtgacggtgcaggccggagcggcacctacgtcctgatcgacatggttctcaacaagatggccaaaggtgctaaagagattgatatcgcagcgaccctggagcacttgagggaccagagacccggcatggtccagacgaaggagcagtttgagttcgcgctgacagccgtggctgaggaggtgaacgccatcctcaaggcccttccccagtgagcggcagcctcaggggcctcaggggagcccccaccccacggatgttgtcaggaatcatgatctgactttaattgtgtgtcttctattataactgcatagtaatagggcccttagctctcccgtagtcagcgcagtttagcagttaaaagtgtatttttgtttaatcaaacaataataaagagagatttgtggaaaaatccagttacgggtggaggggaatcggttcatcaattttcacttgcttaaaaaaaatactttttcttaaagcacccgttcaccttcttggttgaagttgtgttaacaatgcagtagccagcacgttcgaggcggtttccaggaagagtgtgcttgtcatctgccactttcgggagggtggatccactgtgcaggagtggccggggaagctggcagcactcagtgaggccgcccggcacacaaggcacgtttggcatttctctttgagagagtttatcattgggagaagccgcggggacagaactgaacgtcctgcagcttcggggcaagtgagacaatcacagctcctcgctgcgtctccatcaacactgcgccgggtaccatggacggccccgtcagccacacctgtcagcccaagcagagtgattcaggggctccccgggggcagacacctgtgcaccccatgagtagtgcccacttgaggctggcactcccctgacctcacctttgcaaagttacagatgcaccccaacattgagatgtgtttttaatgttaaaatattgatttctacgttatgaaaacagatgcccccgtgaatgcttacctgtgagataaccacaaccaggaagaacaaatctgggcattgagcaagctatgagggtccccgggagcacacgaaccctgccaggcccccgctggctcctccaggcacgtcccggacctgtggggccccagagaggggacatttccctcctgggagagaaggagatcagggcaactcggagagggctgcgagcatttccctcccgggagaggagatcagggcgacctgcacgcactgcgtagagcctggaagggaagtgagaaaccagccgaccggccctgcccctcttcccgggatcacttaatgaaccacgtgttttgacatcatgtaaacctaagcacgtagagatgattcggatttgacaaaataacatttgagtatccgattcgccatcaccccctaccccagaaataggacaattcacttcattgaccaggatgatcacatggaaggcggcgcagaggcagctgtgtgggctgcagatttcctgtgtggggttcagcgtagaaaacgcacctccatcccgcccttcccacagcattcctccatcttagatagatggtactctccaaaggccctaccagagggaacacggcctactgagcggacagaatgatgccaaaatattgcttatgtctctacatggtattgtaatgaatatctgctttaatatagctatcatttcttttccaaaattacttctctctatctggaatttaattaatcgaaatgaatttatctgaatataggaagcatatgcctacttgtaatttctaactccttatgtttgaagagaaacctccggtgtgagatatacaaatatatttaattgtgtcatattaaacttctgatttcaca

SEQ ID NO: 303911 - DNA, 4037 bp, Homo sapiens
ggcgtcgccgcaagagcgcgagaggcgcggcgggaggagccggcggcgcgcgcctccctgggcccggactcggccccggcagctcccggggcgtctgggctgcctgctcgaggagggcctctgcggagcgtccgaggcctgtgtgaacgatggagtgtttggaaggtgccagaaggttccggcaatggacttttaccgctacgaggtgtcgcccgtggccctgcagcgcctgcgcgtggcgttgcagaagctttccggcacaggtttcacgtggcaggatgactatactcagtatgtgatggaccaggaacttgcagacctcccgaaaacctactgatggctggcctgatgcaaggcgtggaccatggagtagctcgaggcagccctgggagagcggccctgggagagtctggagaacaggcggatggccccaaggccaccctccgtggagacagctttccagatgacggagtgcaggacgacgatgatagactttaccaagaggtccatcgtctgagtgccacactcgggggcctcctgcaggaccacgggtctcgactcttacctggagccctcccctttgcaaggcccctcgacatggagaggaagaagtccgagcaccctgagtcttccctgtcttcagaagaggagactgccggagtggagaacgtcaagagccagacgtattccaaagatctgctggggcagcagccgcattcggagcccggggccgctgcgtttggggagctccaaaaccagatgcctgggccctcgaaggaggagcagagccttccagcgggtgctcaggaggccctcagcgacggcctgcaattggaggtccagccttccgaggaagaggcgcggggctacatcgtgacagacagagaccccctgcgccccgaggaaggaaggcggctggtggaggacgtcgcccgcctcctgcaggtgcccagcagtgcgttcgctgacgtggaggttctcggaccagcagtgaccttcaaagtgagcgccaatgtccaaaacgtgaccactgaggatgtggagaaggccacagttgacaacaaagacaaactggaggaaacctctggactgaaaattcttcaaaccggagtcgggtcgaaaagcaaactcaagttcctgcctcctcaggcggagcaagaagactccaccaagttcatcgcgctcaccctggtctccctcgcctgcatcctgggcgtcctcctggcctctggcctcatctactgcctccgccatagctctcagcacaggctgaaggagaagctctcgggactagggggcgacccaggtgcagatgccactgccgcctaccaggagctgtgccgccagcgtatggccacgcggccaccagaccgacctgagggcccgcacacgtcacgcatcagcagcgtctcatcccagttcagcgacgggccgatccccagcccctccgcacgcagcagcgcctcatcctggtccgaggagcctgtgcagtccaacatggacatctccaccggccacatgatcctgtcctacatggaggaccacctgaagaacaagaaccggctggagaaggagtgggaagcgctgtgcgcctaccaggcggagcccaacagctcgttcgtggcccagagggaggagaacgtgcccaagaaccgctccctggccgtgctgacctatgaccactcccgggtcctgctgaaggcggagaacagccacagccactcagactacatcaacgctagccccatcatggatcacgacccgaggaaccccgcgtacatcgccacccagggaccgctgcccgccaccgtggctgacttttggcagatggtgtgggagagcggctgcgtggtgatcgtcatgctgacacccctcgcggagaacggcgtccggcagtgctaccactactggccggatgaaggctccaatctctaccacatctatgaggtgaacctggtctccgagcacatctggtgtgaggacttcctggtgaggagcttctatctgaagaacctgcagaccaacgagacgcgcaccgtgacgcagttccacttcctgagttggtatgaccgaggagtcccttcctcctcaaggtccctcctggacttccgcagaaaagtaaacaagtgctacaggggccgttcttgtccaataattgttcattgcagtgacggtgcaggccggagcggcacctacgtcctgatcgacatggttctcaacaagatggccaaaggtgctaaagagattgatatcgcagcgaccctggagcacttgagggaccagagacccggcatggtccagacgaaggagcagtttgagttcgcgctgacagccgtggctgaggaggtgaacgccatcctcaaggcccttccccagtgagcggcagcctcaggggcctcaggggagcccccaccccacggatgttgtcaggaatcatgatctgactttaattgtgtgtcttctattataactgcatagtaatagggcccttagctctcccgtagtcagcgcagtttagcagttaaaagtgtatttttgtttaatcaaacaataataaagagagatttgtggaaaaatccagttacgggtggaggggaatcggttcatcaattttcacttgcttaaaaaaaatactttttcttaaagcacccgttcaccttcttggttgaagttgtgttaacaatgcagtagccagcacgttcgaggcggtttccaggaagagtgtgcttgtcatctgccactttcgggagggtggatccactgtgcaggagtggccggggaagctggcagcactcagtgaggccgcccggcacacaaggcacgtttggcatttctctttgagagagtttatcattgggagaagccgcggggacagaactgaacgtcctgcagcttcggggcaagtgagacaatcacagctcctcgctgcgtctccatcaacactgcgccgggtaccatggacggccccgtcagccacacctgtcagcccaagcagagtgattcaggggctccccgggggcagacacctgtgcaccccatgagtagtgcccacttgaggctggcactcccctgacctcacctttgcaaagttacagatgcaccccaacattgagatgtgtttttaatgttaaaatattgatttctacgttatgaaaacagatgcccccgtgaatgcttacctgtgagataaccacaaccaggaagaacaaatctgggcattgagcaagctatgagggtccccgggagcacacgaaccctgccaggcccccgctggctcctccaggcacgtcccggacctgtggggccccagagaggggacatttccctcctgggagagaaggagatcagggcaactcggagagggctgcgagcatttccctcccgggagaggagatcagggcgacctgcacgcactgcgtagagcctggaagggaagtgagaaaccagccgaccggccctgcccctcttcccgggatcacttaatgaaccacgtgttttgacatcatgtaaacctaagcacgtagagatgattcggatttgacaaaataacatttgagtatccgattcgccatcaccccctaccccagaaataggacaattcacttcattgaccaggatgatcacatggaaggcggcgcagaggcagctgtgtgggctgcagatttcctgtgtggggttcagcgtagaaaacgcacctccatcccgcccttcccacagcattcctccatcttagatagatggtactctccaaaggccctaccagagggaacacggcctactgagcggacagaatgatgccaaaatattgcttatgtctctacatggtattgtaatgaatatctgctttaatatagctatcatttcttttccaaaattacttctctctatctggaatttaattaatcgaaatgaatttatctgaatataggaagcatatgcctacttgtaatttctaactccttatgtttgaagagaaacctccggtgtgagatatacaaatatatttaattgtgtcatattaaacttctgatttcaca

SEQ ID NO: 303912 - DNA, 3608 bp, Homo sapiens
ggcactccggagtctcctcttctgaatacaggaagactagggtgctcggacgacgatgatagactttaccaagaggtccatcgtctgagtgccacactcgggggcctcctgcaggaccacgggtctcgactcttacctggagccctcccctttgcaaggcccctcgacatggagaggaagaagtccgagcaccctgagtcttccctgtcttcagaagaggagactgccggagtggagaacgtcaagagccagacgtattccaaagatctgctggggcagcagccgcattcggagcccggggccgctgcgtttggggagctccaaaaccagatgcctgggccctcgaaggaggagcagagccttccagcgggtgctcaggaggccctcagcgacggcctgcaattggaggtccagccttccgaggaagaggcgcggggctacatcgtgacagacagagaccccctgcgccccgaggaaggaaggcggctggtggaggacgtcgcccgcctcctgcaggtgcccagcagtgcgttcgctgacgtggaggttctcggaccagcagtgaccttcaaagtgagcgccaatgtccaaaacgtgaccactgaggatgtggagaaggccacagttgacaacaaagacaaactggaggaaacctctggactgaaaattcttcaaaccggagtcgggtcgaaaagcaaactcaagttcctgcctcctcaggcggagcaagaagactccaccaagttcatcgcgctcaccctggtctccctcgcctgcatcctgggcgtcctcctggcctctggcctcatctactgcctccgccatagctctcagcacaggctgaaggagaagctctcgggactagggggcgacccaggtgcagatgccactgccgcctaccaggagctgtgccgccagcgtatggccacgcggccaccagaccgacctgagggcccgcacacgtcacgcatcagcagcgtctcatcccagttcagcgacgggccgatccccagcccctccgcacgcagcagcgcctcatcctggtccgaggagcctgtgcagtccaacatggacatctccaccggccacatgatcctgtcctacatggaggaccacctgaagaacaagaaccggctggagaaggagtgggaagcgctgtgcgcctaccaggcggagcccaacagctcgttcgtggcccagagggaggagaacgtgcccaagaaccgctccctggccgtgctgacctatgaccactcccgggtcctgctgaaggcggagaacagccacagccactcagactacatcaacgctagccccatcatggatcacgacccgaggaaccccgcgtacatcgccacccagggaccgctgcccgccaccgtggctgacttttggcagatggtgtgggagagcggctgcgtggtgatcgtcatgctgacacccctcgcggagaacggcgtccggcagtgctaccactactggccggatgaaggctccaatctctaccacatctatgaggtgaacctggtctccgagcacatctggtgtgaggacttcctggtgaggagcttctatctgaagaacctgcagaccaacgagacgcgcaccgtgacgcagttccacttcctgagttggtatgaccgaggagtcccttcctcctcaaggtccctcctggacttccgcagaaaagtaaacaagtgctacaggggccgttcttgtccaataattgttcattgcagtgacggtgcaggccggagcggcacctacgtcctgatcgacatggttctcaacaagatggccaaaggtgctaaagagattgatatcgcagcgaccctggagcacttgagggaccagagacccggcatggtccagacgaaggagcagtttgagttcgcgctgacagccgtggctgaggaggtgaacgccatcctcaaggcccttccccagtgagcggcagcctcaggggcctcaggggagcccccaccccacggatgttgtcaggaatcatgatctgactttaattgtgtgtcttctattataactgcatagtaatagggcccttagctctcccgtagtcagcgcagtttagcagttaaaagtgtatttttgtttaatcaaacaataataaagagagatttgtggaaaaatccagttacgggtggaggggaatcggttcatcaattttcacttgcttaaaaaaaatactttttcttaaagcacccgttcaccttcttggttgaagttgtgttaacaatgcagtagccagcacgttcgaggcggtttccaggaagagtgtgcttgtcatctgccactttcgggagggtggatccactgtgcaggagtggccggggaagctggcagcactcagtgaggccgcccggcacacaaggcacgtttggcatttctctttgagagagtttatcattgggagaagccgcggggacagaactgaacgtcctgcagcttcggggcaagtgagacaatcacagctcctcgctgcgtctccatcaacactgcgccgggtaccatggacggccccgtcagccacacctgtcagcccaagcagagtgattcaggggctccccgggggcagacacctgtgcaccccatgagtagtgcccacttgaggctggcactcccctgacctcacctttgcaaagttacagatgcaccccaacattgagatgtgtttttaatgttaaaatattgatttctacgttatgaaaacagatgcccccgtgaatgcttacctgtgagataaccacaaccaggaagaacaaatctgggcattgagcaagctatgagggtccccgggagcacacgaaccctgccaggcccccgctggctcctccaggcacgtcccggacctgtggggccccagagaggggacatttccctcctgggagagaaggagatcagggcaactcggagagggctgcgagcatttccctcccgggagaggagatcagggcgacctgcacgcactgcgtagagcctggaagggaagtgagaaaccagccgaccggccctgcccctcttcccgggatcacttaatgaaccacgtgttttgacatcatgtaaacctaagcacgtagagatgattcggatttgacaaaataacatttgagtatccgattcgccatcaccccctaccccagaaataggacaattcacttcattgaccaggatgatcacatggaaggcggcgcagaggcagctgtgtgggctgcagatttcctgtgtggggttcagcgtagaaaacgcacctccatcccgcccttcccacagcattcctccatcttagatagatggtactctccaaaggccctaccagagggaacacggcctactgagcggacagaatgatgccaaaatattgcttatgtctctacatggtattgtaatgaatatctgctttaatatagctatcatttcttttccaaaattacttctctctatctggaatttaattaatcgaaatgaatttatctgaatataggaagcatatgcctacttgtaatttctaactccttatgtttgaagagaaacctccggtgtgagatatacaaatatatttaattgtgtcatattaaacttctgatttcaca

SEQ ID NO: 303913 - DNA, 3116 bp, Homo sapiens
agtccggatagcagcgccgaggtctgctcgtggtgagagaccccgagtcccggcacactgtgggggggccgcaggacggcggcccggggtgccctcgggacccctgcgctccgagactcgaggactacgcgacaaacggcagttcaggctgccgcgggtgcaggtttgctcatccacggccgccgggttagggagacgattctggcacgttccaggcaggccggtgtcgggagagggtccctgcgtgtgggagacggaggcggcggggtcggctggagaaccggggaaggaacgcggcggcctcctcccgcgggaagaggcccaagccgggctcgccctgcggctcagcgaggagcccgccctgccggcttctgaggacgcgccccggaccctgctctcctgggcctgaggtgacacgttctgtcgattgaggccccgaggtttgcggaagtctctggccgcagccgcgggaggcgcaacacgctgaggctgcgcgacgtggggcccgcccggacccgcctccgcccgtgtctccccgcagccgtctctgccagaactatcggaagagaccggaactgttggttttgtgtctgtgagaagagcagcactgggaataagtcacctgctgagctgacagcggaaacgaaggacaagcggagtcgcctagcgccgtcgctgcttagcccagaaaacggcctcgtcagcgccctcgacctgtttgcggaccgcttcaggagctgaaggaaccaccgagatgaccactcccgggtcctgctgaaggcggagaacagccacagccactcagactacatcaacgctagccccatcatggatcacgacccgaggaaccccgcgtacatcgccacccagggaccgctgcccgccaccgtggctgacttttggcagatggtgtgggagagcggctgcgtggtgatcgtcatgctgacacccctcgcggagaacggcgtccggcagtgctaccactactggccggatgaaggctccaatctctaccacatctatgaggtgaacctggtctccgagcacatctggtgtgaggacttcctggtgaggagcttctatctgaagaacctgcagaccaacgagacgcgcaccgtgacgcagttccacttcctgagttggtatgaccgaggagtcccttcctcctcaaggtccctcctggacttccgcagaaaagtaaacaagtgctacaggggccgttcttgtccaataattgttcattgcagtgacggtgcaggccggagcggcacctacgtcctgatcgacatggttctcaacaagatggccaaaggtgctaaagagattgatatcgcagcgaccctggagcacttgagggaccagagacccggcatggtccagacgaaggagcagtttgagttcgcgctgacagccgtggctgaggaggtgaacgccatcctcaaggcccttccccagtgagcggcagcctcaggggcctcaggggagcccccaccccacggatgttgtcaggaatcatgatctgactttaattgtgtgtcttctattataactgcatagtaatagggcccttagctctcccgtagtcagcgcagtttagcagttaaaagtgtatttttgtttaatcaaacaataataaagagagatttgtggaaaaatccagttacgggtggaggggaatcggttcatcaattttcacttgcttaaaaaaaatactttttcttaaagcacccgttcaccttcttggttgaagttgtgttaacaatgcagtagccagcacgttcgaggcggtttccaggaagagtgtgcttgtcatctgccactttcgggagggtggatccactgtgcaggagtggccggggaagctggcagcactcagtgaggccgcccggcacacaaggcacgtttggcatttctctttgagagagtttatcattgggagaagccgcggggacagaactgaacgtcctgcagcttcggggcaagtgagacaatcacagctcctcgctgcgtctccatcaacactgcgccgggtaccatggacggccccgtcagccacacctgtcagcccaagcagagtgattcaggggctccccgggggcagacacctgtgcaccccatgagtagtgcccacttgaggctggcactcccctgacctcacctttgcaaagttacagatgcaccccaacattgagatgtgtttttaatgttaaaatattgatttctacgttatgaaaacagatgcccccgtgaatgcttacctgtgagataaccacaaccaggaagaacaaatctgggcattgagcaagctatgagggtccccgggagcacacgaaccctgccaggcccccgctggctcctccaggcacgtcccggacctgtggggccccagagaggggacatttccctcctgggagagaaggagatcagggcaactcggagagggctgcgagcatttccctcccgggagaggagatcagggcgacctgcacgcactgcgtagagcctggaagggaagtgagaaaccagccgaccggccctgcccctcttcccgggatcacttaatgaaccacgtgttttgacatcatgtaaacctaagcacgtagagatgattcggatttgacaaaataacatttgagtatccgattcgccatcaccccctaccccagaaataggacaattcacttcattgaccaggatgatcacatggaaggcggcgcagaggcagctgtgtgggctgcagatttcctgtgtggggttcagcgtagaaaacgcacctccatcccgcccttcccacagcattcctccatcttagatagatggtactctccaaaggccctaccagagggaacacggcctactgagcggacagaatgatgccaaaatattgcttatgtctctacatggtattgtaatgaatatctgctttaatatagctatcatttcttttccaaaattacttctctctatctggaatttaattaatcgaaatgaatttatctgaatataggaagcatatgcctacttgtaatttctaactccttatgtttgaagagaaacctccggtgtgagatatacaaatatatttaattgtgtcatattaaacttctgatttcaca

SEQ ID NO: 303914 - DNA, 4774 bp, Homo sapiens
  misc_feature (3324)..(3324): n is a, c, g, or t
  misc_feature (3365)..(3365): n is a, c, g, or t
ggcgtcgccgcaagagcgcgagaggcgcggcgggaggagccggcggcgcgcgcctccctgggcccggactcggccgcctcccgccgcctcccgcgcggccatggactgagcgccgccggccaggccgcggggatggggccgccgctcccgctgctgctgctgctactgctgctgctgccgccacgcgtcctgcctgccgccccttcgtccgtcccccgcggccggcagctcccggggcgtctgggctgcctgctcgaggagggcctctgcggagcgtccgaggcctgtgtgaacggtttcacgtggcaggatgactatactcagtatgtgatggaccaggaacttgcagacctcccgaaaacctacctgaggcgtcctgaagcatccagcccagccaggccctcaaaacacagcgttggcagcgagaggaggtacagtcgggagggcggtgctgccctggccaacgccctccgacgccacctgcccttcctggaggccctgtcccaggccccagcctcagacgtgctcgccaggacccatacggcgcaggacagaccccccgctgagggtgatgaccgcttctccgagagcatcctgacctatgtggcccacacgtctgcgctgacctaccctcccgggccccggacccagctccgcgaggacctcctgccgcggaccctcggccagctccagccagatgagctcagccctaaggtggacagtggtgtggacagacaccatctgatggcggccctcagtgcctatgctgcccagaggcccccagctccccccggggagggcagcctggagccacagtaccttctgcgtgcaccctcaagaatgcccaggcctttgctggcaccagccgccccccagaagtggccttcacctctgggagattccgaagacccctccagcacaggcgatggagcacggattcataccctcctgaaggacctgcagaggcagccggctgaggtgaggggcctgagtggcctggagctggacggcatggctgagctgatggctggcctgatgcaaggcgtggaccatggagtagctcgaggcagccctgggagagcggccctgggagagtctggagaacaggcggatggccccaaggccaccctccgtggagacagctttccagatgacggagtgcaggacgacgatgatagactttaccaagaggtccatcgtctgagtgccacactcgggggcctcctgcaggaccacgggtctcgactcttacctggagccctcccctttgcaaggcccctcgacatggagaggaagaagtccgagcaccctgagtcttccctgtcttcagaagaggagactgccggagtggagaacgtcaagagccagacgtattccaaagatctgctggggcagcagccgcattcggagcccggggccgctgcgtttggggagctccaaaaccagatgcctgggccctcgaaggaggagcagagccttccagcgggtgctcaggaggccctcagcgacggcctgcaattggaggtccagccttccgaggaagaggcgcggggctacatcgtgacagacagagaccccctgcgccccgaggaaggaaggcggctggtggaggacgtcgcccgcctcctgcaggtgcccagcagtgcgttcgctgacgtggaggttctcggaccagcagtgaccttcaaagtgagcgccaatgtccaaaacgtgaccactgaggatgtggagaaggccacagttgacaacaaagacaaactggaggaaacctctggactgaaaattcttcaaaccggagtcgggtcgaaaagcaaactcaagttcctgcctcctcaggcggagcaagaagactccaccaagttcatcgcgctcaccctggtctccctcgcctgcatcctgggcgtcctcctggcctctggcctcatctactgcctccgccatagctctcagcacaggctgaaggagaagctctcgggactagggggcgacccaggtgcagatgccactgccgcctaccaggagctgtgccgccagcgtatggccacgcggccaccagaccgacctgagggcccgcacacgtcacgcatcagcagcgtctcatcccagttcagcgacgggccgatccccagcccctccgcacgcagcagcgcctcatcctggtccgaggagcctgtgcagtccaacatggacatctccaccggccacatgatcctgtcctacatggaggaccacctgaagaacaagaaccggctggagaaggagtgggaagcgctgtgcgcctaccaggcggagcccaacagctcgttcgtggcccagagggaggagaacgtgcccaagaaccgctccctggccgtgctgacctatgaccactcccgggtcctgctgaaggcggagaacagccacagccactcagactacatcaacgctagccccatcatggatcacgacccgaggaaccccgcgtacatcgccacccagggaccgctgcccgccaccgtggctgacttttggcagatggtgtgggagagcggctgcgtggtgatcgtcatgctgacacccctcgcggagaacggcgtccggcagtgctaccactactggccggatgaaggctccaatctctaccacatctatgaggtgaacctggtctccgagcacatctggtgtgaggacttcctggtgaggagcttctatctgaagaacctgcagaccaacgagacgcgcaccgtgacgcagttccacttcctgagttggtatgaccgaggagtcccttcctcctcaaggtccctcctggacttccgcagaaaagtaaacaagtgctacaggggccgttcttgtccaataattgttcattgcagtgacggtgcaggccggagcggcacctacgtcctgatcgacatggttctcaacaagatggccaaaggtgctaaagagattgatatcgcagcgaccctggagcacttaggtgaacgccatcctcaaggcccttccccgggggcagacacctgtgcaccccatgagtagtgcccacttgaggctggcactcccctgacctcacctttgcaaagttacagatgcaccccaacattgagatgtgtttttaatgttaaaatattgatttctacgttatgaaaacagatgcccccgtgaatgcttacctgtgagataaccacaacaggaagaacaaatctgggcattgagcaagctatgagggtccccgggagcacacgaaccctgccaggcccccgctggctcctccaggcacgtcccggactgtggggccccagagaggggacatttccctcctgggagagaaggagatcaggncaactcggagagggctgcgagcatttccctcccgggaaganatcagggcgacctgcacgcacccgttcaccttcttggttgaagttgtgttaacaatgcagtagccagcacgttcgaggcggtttccaggaagagtgtgcttgtcatctgccactttcgggagggtggatccactgtgcaggagtggccggggaagctggcagcactcagtgaggccgcccggcacacaaggcacgtttggcatttctctttgagagagtttatcattgggagaagccgcggggacagaactgaacgtcctgcagcttcggggcaagtgagacaatcacagctcctcgctgcgtctccatcaacactgcgccgggtaccatggacggccccgtcagccacacctgtcagcccaagcagagtgattcaggggctccccgggggcagacacctgtgcaccccatgagtagtgcccacttgaggctggcactcccctgacctcacctttgcaaagttacagatgcaccccaacattgagatgtgtttttaatgttaaaatattgatttctacgttatgaaaacagatgcccccgtgaatgcttacctgtgagataaccacaaccaggaagaacaaatctgggcattgagcaagctatgagggtccccgggagcacacgaaccctgccaggcccccgctggctcctccaggcacgtcccggacctgtggggccccagagaggggacatttccctcctgggagagaaggagatcagggcaactcggagagggctgcgagcatttccctcccgggagaggagatcagggcgacctgcacgcactgcgtagagcctggaagggaagtgagaaaccagccgaccggccctgcccctcttcccgggatcacttaatgaaccacgtgttttgacatcatgtaaacctaagcacgtagagatgattcggatttgacaaaataacatttgagtatccgattcgccatcaccccctaccccagaaataggacaattcacttcattgaccaggatgatcacatggaaggcggcgcagaggcagctgtgtgggctgcagatttcctgtgtggggttcagcgtagaaaacgcacctccatcccgcccttcccacagcattcctccatcttagatagatggtactctccaaaggccctaccagagggaacacggcctactgagcggacagaatgatgccaaaatattgcttatgtctctacatggtattgtaatgaatatctgctttaatatagctatcatttcttttccaaaattacttctctctatctggaatttaattaatcgaaatgaatttatctgaatataggaagcatatgcctacttgtaatttctaactccttatgtttgaagagaaacctccggtgtgagatatacaaatatatttaattgtgtcatattaaacttctgatttcaca

SEQ ID NO: 303915 - DNA, 1929 bp, Homo sapiens
gttgtgggtcgggcttccgtgtggacggcagcactttcatttctctccttctgttggcagtgacggtgcaggccggagcggcacctacgtcctgatcgacatggttctcaacaagatggccaaaggtgctaaagagattgatatcgcagcgaccctggagcacttgagggaccagagacccggcatggtccagacgaaggagcagtttgagttcgcgctgacagccgtggctgaggaggtgaacgccatcctcaaggcccttccccagtgagcggcagcctcaggggcctcaggggagcccccaccccacggatgttgtcaggaatcatgatctgactttaattgtgtgtcttctattataactgcatagtaatagggcccttagctctcccgtagtcagcgcagtttagcagttaaaagtgtatttttgtttaatcaaacaataataaagagagatttgtggaaaaatccagttacgggtggaggggaatcggttcatcaattttcacttgcttaaaaaaaatactttttcttaaagcacccgttcaccttcttggttgaagttgtgttaacaatgcagtagccagcacgttcgaggcggtttccaggaagagtgtgcttgtcatctgccactttcgggagggtggatccactgtgcaggagtggccggggaagctggcagcactcagtgaggccgcccggcacacaaggcacgtttggcatttctctttgagagagtttatcattgggagaagccgcggggacagaactgaacgtcctgcagcttcggggcaagtgagacaatcacagctcctcgctgcgtctccatcaacactgcgccgggtaccatggacggccccgtcagccacacctgtcagcccaagcagagtgattcaggggctccccgggggcagacacctgtgcaccccatgagtagtgcccacttgaggctggcactcccctgacctcacctttgcaaagttacagatgcaccccaacattgagatgtgtttttaatgttaaaatattgatttctacgttatgaaaacagatgcccccgtgaatgcttacctgtgagataaccacaaccaggaagaacaaatctgggcattgagcaagctatgagggtccccgggagcacacgaaccctgccaggcccccgctggctcctccaggcacgtcccggacctgtggggccccagagaggggacatttccctcctgggagagaaggagatcagggcaactcggagagggctgcgagcatttccctcccgggagaggagatcagggcgacctgcacgcactgcgtagagcctggaagggaagtgagaaaccagccgaccggccctgcccctcttcccgggatcacttaatgaaccacgtgttttgacatcatgtaaacctaagcacgtagagatgattcggatttgacaaaataacatttgagtatccgattcgccatcaccccctaccccagaaataggacaattcacttcattgaccaggatgatcacatggaaggcggcgcagaggcagctgtgtgggctgcagatttcctgtgtggggttcagcgtagaaaacgcacctccatcccgcccttcccacagcattcctccatcttagatagatggtactctccaaaggccctaccagagggaacacggcctactgagcggacagaatgatgccaaaatattgcttatgtctctacatggtattgtaatgaatatctgctttaatatagctatcatttcttttccaaaattacttctctctatctggaatttaattaatcgaaatgaatttatctgaatataggaagcatatgcctacttgtaatttctaactccttatgtttgaagagaaacctccggtgtgagatatacaaatatatttaattgtgtcatattaaacttctgatttcaca

SEQ ID NO: 303916 - DNA, 2114 bp, Homo sapiens
caactctgacacagtcaaacgcttagttcattttgttctggcaaaatttaccacatctttggccaaagaggggggaacaagcaagagggagtcacatctgagcacagcagctcatcccacaagctacaagctgctcagaggctcgaagcccccaggggcctcccttctcccctcacttggattctcccagcccgcgtccttcctccccctctcacatccgccatcctttcctctcgccggccccctgacggtgcaggccggagcggcacctacgtcctgatcgacatggttctcaacaagatggccaaaggtgctaaagagattgatatcgcagcgaccctggagcacttgagggaccagagacccggcatggtccagacgaaggagcagtttgagttcgcgctgacagccgtggctgaggaggtgaacgccatcctcaaggcccttccccagtgagcggcagcctcaggggcctcaggggagcccccaccccacggatgttgtcaggaatcatgatctgactttaattgtgtgtcttctattataactgcatagtaatagggcccttagctctcccgtagtcagcgcagtttagcagttaaaagtgtatttttgtttaatcaaacaataataaagagagatttgtggaaaaatccagttacgggtggaggggaatcggttcatcaattttcacttgcttaaaaaaaatactttttcttaaagcacccgttcaccttcttggttgaagttgtgttaacaatgcagtagccagcacgttcgaggcggtttccaggaagagtgtgcttgtcatctgccactttcgggagggtggatccactgtgcaggagtggccggggaagctggcagcactcagtgaggccgcccggcacacaaggcacgtttggcatttctctttgagagagtttatcattgggagaagccgcggggacagaactgaacgtcctgcagcttcggggcaagtgagacaatcacagctcctcgctgcgtctccatcaacactgcgccgggtaccatggacggccccgtcagccacacctgtcagcccaagcagagtgattcaggggctccccgggggcagacacctgtgcaccccatgagtagtgcccacttgaggctggcactcccctgacctcacctttgcaaagttacagatgcaccccaacattgagatgtgtttttaatgttaaaatattgatttctacgttatgaaaacagatgcccccgtgaatgcttacctgtgagataaccacaaccaggaagaacaaatctgggcattgagcaagctatgagggtccccgggagcacacgaaccctgccaggcccccgctggctcctccaggcacgtcccggacctgtggggccccagagaggggacatttccctcctgggagagaaggagatcagggcaactcggagagggctgcgagcatttccctcccgggagaggagatcagggcgacctgcacgcactgcgtagagcctggaagggaagtgagaaaccagccgaccggccctgcccctcttcccgggatcacttaatgaaccacgtgttttgacatcatgtaaacctaagcacgtagagatgattcggatttgacaaaataacatttgagtatccgattcgccatcaccccctaccccagaaataggacaattcacttcattgaccaggatgatcacatggaaggcggcgcagaggcagctgtgtgggctgcagatttcctgtgtggggttcagcgtagaaaacgcacctccatcccgcccttcccacagcattcctccatcttagatagatggtactctccaaaggccctaccagagggaacacggcctactgagcggacagaatgatgccaaaatattgcttatgtctctacatggtattgtaatgaatatctgctttaatatagctatcatttcttttccaaaattacttctctctatctggaatttaattaatcgaaatgaatttatctgaatataggaagcatatgcctacttgtaatttctaactccttatgtttgaagagaaacctccggtgtgagatatacaaatatatttaattgtgtcatattaaacttctgatttcaca

SEQ ID NO: 303917 - DNA, 4697 bp, Homo sapiens
ggcgtcgccgcaagagcgcgagaggcgcggcgggaggagccggcggcgcgcgcctccctgggcccggactcggccgcctcccgccgcctcccgcgcggccatggactgagcgccgccggccaggccgcggggatggggccgccgctcccgctgctgctgctgctactgctgctgctgccgccacgcgtcctgcctgccgccccttcgtccgtcccccgcggccggcagctcccggggcgtctgggctgcctgctcgaggagggcctctgcggagcgtccgaggcctgtgtgaacgatggagtgtttggaaggtgccagaaggttccggcaatggacttttaccgctacgaggtgtcgcccgtggccctgcagcgcctgcgcgtggcgttgcagaagctttccggcacaggtttcacgtggcaggatgactatactcagtatgtgatggaccaggaacttgcagacctcccgaaaacctacctgaggcgtcctgaagcatccagcccagccaggccctcaaaacacagcgttggcagcgagaggaggtacagtcgggagggcggtgctgccctggccaacgccctccgacgccacctgcccttcctggaggccctgtcccaggccccagcctcagacgtgctcgccaggacccatacggcgcaggacagaccccccgctgagggtgatgaccgcttctccgagagcatcctgacctatgtggcccacacgtctgcgctgacctaccctcccgggccccggacccagctccgcgaggacctcctgccgcggaccctcggccagctccagccagatgagctcagccctaaggtggacagtggtgtggacagacaccatctgatggcggccctcagtgcctatgctgcccagaggcccccagctccccccggggagggcagcctggagccacagtaccttctgcgtgcaccctcaagaatgcccaggcctttgctggcaccagccgccccccagaagtggccttcacctctgggagattccgaagacccctccagcacaggcgatggagcacggattcataccctcctgaaggacctgcagaggcagccggctgaggtgaggggcctgagtggcctggagctggacggcatggctgagctgatggctggcctgatgcaaggcgtggaccatggagtagctcgaggcagccctgggagagcggccctgggagagtctggagaacaggcggatggccccaaggccaccctccgtggagacagctttccagatgacggagtgcaggacgacgatgatagactttaccaagaggtccatcgtctgagtgccacactcgggggcctcctgcaggaccacgggtctcgactcttacctggagccctcccctttgcaaggcccctcgacatggagaggaagaagtccgagcaccctgagtcttccctgtcttcagaagaggagactgccggagtggagaacgtcaagagccagacgtattccaaagatctgctggggcagcagccgcattcggagcccggggccgctgcgtttggggagctccaaaaccagatgcctgggccctcgaaggaggagcagagccttccagcgggtgctcaggaggccctcagcgacggcctgcaattggaggtccagccttccgaggaagaggcgcggggctacatcgtgacagacagagaggttctcggaccagcagtgaccttcaaagtgagcgccaatgtccaaaacgtgaccactgaggatgtggagaaggccacagttgacaacaaagacaaactggaggaaacctctggactgaaaattcttcaaaccggagtcgggtcgaaaagcaaactcaagttcctgcctcctcaggcggagcaagaagactccaccaagttcatcgcgctcaccctggtctccctcgcctgcatcctgggcgtcctcctggcctctggcctcatctactgcctccgccatagctctcagcacaggctgaaggagaagctctcgggactagggggcgacccaggtgcagatgccactgccgcctaccaggagctgtgccgccagcgtatggccacgcggccaccagaccgacctgagggcccgcacacgtcacgcatcagcagcgtctcatcccagttcagcgacgggccgatccccagcccctccgcacgcagcagcgcctcatcctggtccgaggagcctgtgcagtccaacatggacatctccaccggccacatgatcctgtcctacatggaggaccacctgaagaacaagaaccggctggagaaggagtgggaagcgctgtgcgcctaccaggcggagcccaacagctcgttcgtggcccagagggaggagaacgtgcccaagaaccgctccctggccgtgctgacctatgaccactcccgggtcctgctgaaggcggagaacagccacagccactcagactacatcaacgctagccccatcatggatcacgacccgaggaaccccgcgtacatcgccacccagggaccgctgcccgccaccgtggctgacttttggcagatggtgtgggagagcggctgcgtggtgatcgtcatgctgacacccctcgcggagaacggcgtccggcagtgctaccactactggccggatgaaggctccaatctctaccacatctatgaggtgaacctggtctccgagcacatctggtgtgaggacttcctggtgaggagcttctatctgaagaacctgcagaccaacgagacgcgcaccgtgacgcagttccacttcctgagttggtatgaccgaggagtcccttcctcctcaaggtccctcctggacttccgcagaaaagtaaacaagtgctacaggggccgttcttgtccaataattgttcattgcagtgacggtgcaggccggagcggcacctacgtcctgatcgacatggttctcaacaagatggccaaaggtgctaaagagattgatatcgcagcgaccctggagcacttgagggaccagagacccggcatggtccagacgaaggagcagtttgagttcgcgctgacagccgtggctgaggaggtgaacgccatcctcaaggcccttccccagtgagcggcagcctcaggggcctcaggggagcccccaccccacggatgttgtcaggaatcatgatctgactttaattgtgtgtcttctattataactgcatagtaatagggcccttagctctcccgtagtcagcgcagtttagcagttaaaagtgtatttttgtttaatcaaacaataataaagagagatttgtggaaaaatccagttacgggtggaggggaatcggttcatcaattttcacttgcttaaaaaaaatactttttcttaaagcacccgttcaccttcttggttgaagttgtgttaacaatgcagtagccagcacgttcgaggcggtttccaggaagagtgtgcttgtcatctgccactttcgggagggtggatccactgtgcaggagtggccggggaagctggcagcactcagtgaggccgcccggcacacaaggcacgtttggcatttctctttgagagagtttatcattgggagaagccgcggggacagaactgaacgtcctgcagcttcggggcaagtgagacaatcacagctcctcgctgcgtctccatcaacactgcgccgggtaccatggacggccccgtcagccacacctgtcagcccaagcagagtgattcaggggctccccgggggcagacacctgtgcaccccatgagtagtgcccacttgaggctggcactcccctgacctcacctttgcaaagttacagatgcaccccaacattgagatgtgtttttaatgttaaaatattgatttctacgttatgaaaacagatgcccccgtgaatgcttacctgtgagataaccacaaccaggaagaacaaatctgggcattgagcaagctatgagggtccccgggagcacacgaaccctgccaggcccccgctggctcctccaggcacgtcccggacctgtggggccccagagaggggacatttccctcctgggagagaaggagatcagggcaactcggagagggctgcgagcatttccctcccgggagaggagatcagggcgacctgcacgcactgcgtagagcctggaagggaagtgagaaaccagccgaccggccctgcccctcttcccgggatcacttaatgaaccacgtgttttgacatcatgtaaacctaagcacgtagagatgattcggatttgacaaaataacatttgagtatccgattcgccatcaccccctaccccagaaataggacaattcacttcattgaccaggatgatcacatggaaggcggcgcagaggcagctgtgtgggctgcagatttcctgtgtggggttcagcgtagaaaacgcacctccatcccgcccttcccacagcattcctccatcttagatagatggtactctccaaaggccctaccagagggaacacggcctactgagcggacagaatgatgccaaaatattgcttatgccaaaattacttctctctatctggaatttaattaatcgaaatgaatttatctgaatataggaagcatatgcctacttgtaatttctaactccttatgtttgaagagaaacctccggtgtgagatatacaaatatatttaattgtgtcatattaaacttctgatttcaca

SEQ ID NO: 303918 - DNA, 4134 bp, Homo sapiens
ggcgtcgccgcaagagcgcgagaggcgcggcgggaggagccggcggcgcgcgcctccctgggcccggactcggccgcctcccgccgcctcccgcgcggccatggactgagcgccgccggccaggccgcggggatggggccgccgctcccgctgctgctgctgctactgctgctgctgccgccacgcgtcctgcctgccgccccttcgtccgtcccccgcggccggcagctcccggggcgtctgggctgcctgctcgaggagggcctctgcggagcgtccgaggcctgtgtgaacggtttcacgtggcaggatgactatactcagtatgtgatggaccaggaacttgcagacctcccgaaaacctacctgaggcgtcctgaagcatccagcccagccaggccctcaaaacacagcgttggcagcgagaggaggtacagtcgggagggcggtgctgccctggccaacgccctccgacgccacctgcccttcctggaggccctgtcccaggccccagcctcagacgtgctcgccaggacccatacggcgcaggacagaccccccgctgagggtgatgaccgcttctccgagagcatcctgacctatgtggcccacacgtctgcgctgacctaccctcccgggccccggacccagctccgcgaggacctcctgccgcggaccctcggccagctccagccagatgagctcagccctaaggtggacagtggtgtggacagacaccatctgatggcggccctcagtgcctatgctgcccagaggcccccagctccccccggggagggcagcctggagccacagtaccttctgcgtgcaccctcaagaatgcccaggcctttgctggcaccagccgccccccagaagtggccttcacctctgggagattccgaagacccctccagcacaggcgatggagcacggattcataccctcctgaaggacctgcagaggcagccggctgaggtgaggggcctgagtggcctggagctggacggcatggctgagctgatggctggcctgatgcaaggcgtggaccatggagtagctcgaggcagccctgggagagcggccctgggagagtctggagaacaggcggatggccccaaggccaccctccgtggagacagctttccagatgacggagtgcaggacgacgatgatagactttaccaagaggtccatcgtctgagtgccacactcgggggcctcctgcaggaccacgggtctcgactcttacctggagccctcccctttgcaaggcccctcgacatggagaggaagaagtccgagcaccctgagtcttccctgtcttcagaagaggagactgccggagtggagaacgtcaagagccagacgtattccaaagatctgctggggcagcagccgcattcggagcccggggccgctgcgtttggggagctccaaaaccagatgcctgggccctcgaaggaggagcagagccttccagcgggtgctcaggaggccctcagcgacggcctgcaattggaggtccagccttccgaggaagaggcgcggggctacatcgtgacagacagagaccccctgcgccccgaggaaggaaggcggctggtggaggacgtcgcccgcctcctgcaggtgcccagcagtgcgttcgctgacgtggaggttctcggaccagcagtgaccttcaaagtgagcgccaatgtccaaaacgtgaccactgaggatgtggagaaggccacagttgacaacaaagacaaactggaggaaacctctggactgaaaattcttcaaaccggagtcgggtcgaaaagcaaactcaagttcctgcctcctcaggcggagcaagaagactccaccaagttcatcgcgctcaccctggtctccctcgcctgcatcctgggcgtcctcctggcctctggcctcatctactgcctccgccatagctctcagcacaggctgaaggagaagctctcgggactagggggcgacccaggtgcagatgccactgccgcctaccaggagctgtgccgccagcgtatggccacgcggccaccagaccgacctgagggcccgcacacgtcacgcatcagcagcgtctcatcccagttcagcgacgggccgatccccagcccctccgcacgcagcagcgcctcatcctggtccgaggagcctgtgcagtccaacatggacatctccaccggccacatgatcctgtcctacatggaggaccacctgaagaacaagaaccggctggagaaggagtgggaagcgctgtgcgcctaccaggcggagcccaacagctcgttcgtggcccagagggaggagaacgtgcccaagaaccgctccctggccgtgctgacctatgaccactcccgggtcctgctgaaggcggagaacagccacagccactcagactacatcaacgctagccccatcatggatcacgacccgaggaaccccgcgtacatcgccacccagggaccgctgcccgccaccgtggctgacttttggcagatggtgtgggagagcggctgcgtggtgatcgtcatgctgacacccctcgcggagaacggcgtccggcagtgctaccactactggccggatgaaggctccaatctctaccacatctatgaggtgaacctggtctccgagcacatctggtgtgaggacttcctggtgaggagcttctatctgaagaacctgcagaccaacgagacgcgcaccgtgacgcagttccacttcctgagttggtatgaccgaggagtcccttcctcctcaaggtccctcctggacttccgcagaaaagtaaacaagtgctacaggggccgttcttgtccaataattgttcattgcagtgacggtgcaggccggagcggcacctacgtcctgatcgacatggttctcaacaagatggccaaaggtgctaaagagattgatatcgcagcgaccctggagcacttgagcagtttgagttcgcgctgacagccgtggctgaggaggtgaacgccatcctcaaggcccttccccagtgagcggcagcctcaggggcctcaggggagcccccaccccacggatgttgtcagcccaagcagagtgattcaggggctccccgggggcagacacctgtgcaccccatgagtagtgcccacttgaggctggcactcccctgacctcacctttgcaaagttacagatgcaccccaacattgagatgtgtttttaatgttaaaatattgatttctacgttatgaaaacagatgcccccgtgaatgcttacctgtgagataaccacaaccaggaagaacaaatctgggcattgagcaagctatgagggtccccgggagcacacgaaccctgccaggcccccgctggctcctccaggcacgtcccggacctgtggggccccagagaggggacatttccctcctgggagagaaggagatcagggcaactcggagagggctgcgagcatttccctcccgggagaggagatcagggcgacctgcacgcactgcgtagagcctggaagggaagtgagaaaccagccgaccggccctgcccctcttcccgggatcacttaatgaaccacgtgttttgacatcatgtaaacctaagcacgtagagatgattcggatttgacaaaataacatttgagtatccgattcgccatcaccccctaccccagaaataggacaattcacttcattgaccaggatgatcacatggaaggcggcgcagaggcagctgtgtgggctgcagatttcctgtgtggggttcagcgtagaaaacgcacctccatcccgcccttcccacagcattcctccatcttagatagatggtactctccaaaggccctaccagagggaacacggcctactgagcggacagaatgatgccaaaatattgcttatgtctctacatggtattgtaatgaatatctgctttaatatagctatcatttcttttccaaaattacttctctctatctggaatttaattaatcgaaatgaatttatctgaatataggaagcatatgcctacttgtaatttctaactccttatgtttgaagagaaacctccggtgtgagatatacaaatatatttaattgtgtcatattaaacttctgatttcaca

SEQ ID NO: 303919 - DNA, 4420 bp, Homo sapiens
ggcgtcgccgcaagagcgcgagaggcgcggcgggaggagccggcggcgcgcgcctccctgggcccggactcggccgcctcccgccgcctcccgcgcggccatggactgagcgccgccggccaggccgcggggatggggccgccgctcccgctgctgctgctgctactgctgctgctgccgccacgcgtcctgcctgccgccccttcgtccgtcccccgcggccggcagctcccggggcgtctgggctgcctgctcgaggagggcctctgcggagcgtccgaggcctgtgtgaacgatggagtgtttggaaggtgccagaaggttccggcaatggacttttaccgctacgaggtgtcgcccgtggccctgcagcgcctgcgcgtggcgttgcagaagctttccggcacaggtttcacgtggcaggatgactatactcagtatgtgatggaccaggaacttgcagacctcccgaaaacctacctgaggcgtcctgaagcatccagcccagccaggccctcaaaacacagcgttggcagcgagaggaggtacagtcgggagggcggtgctgccctggccaacgccctccgacgccacctgcccttcctggaggccctgtcccaggccccagcctcagacgtgctcgccaggacccatacggcgcaggacagaccccccgctgagggtgatgaccgcttctccgagagcatcctgacctatgtggcccacacgtctgcgctgacctaccctcccgggccccggacccagctccgcgaggacctcctgccgcggaccctcggccagctccagccagatgagctcagccctaaggtggacagtggtgtggacagacaccatctgatggcggccctcagtgcctatgctgcccagaggcccccagctccccccggggagggcagcctggagccacagtaccttctgcgtgcaccctcaagaatgcccaggcctttgctggcaccagccgccccccagaagtggccttcacctctgggagattccgaagacccctccagcacaggcgatggagcacggattcataccctcctgaaggacctgcagaggcagccggctgaggtgaggggcctgagtggcctggagctggacggcatggctgagctgatggctggcctgatgcaaggcgtggaccatggagtagctcgaggcagccctgggagagcggccctgggagagtctggagaacaggcggatggccccaaggccaccctccgtggagacagctttccagatgacggagtgcaggacgacgatgatagactttaccaagaggtccatcgtctgagtgccacactcgggggcctcctgcaggaccacgggtctcgactcttacctggagccctcccctttgcaaggcccctcgacatggagaggaagaagtccgagcaccctgagtcttccctgtcttcagaagaggagactgccggagtggagaacgtcaagagccagacgtattccaaagatctgctggggcagcagccgcattcggagcccggggccgctgcgtttggggagctccaaaaccagatgcctgggccctcgaaggaggagcagagccttccagcgggtgctcaggaggccctcagcgacggcctgcaattggaggtccagccttccgaggaagaggcgcggggctacatcgtgacagacagagaggttctcggaccagcagtgaccttcaaagtgagcgccaatgtccaaaacgtgaccactgaggatgtggagaaggccacagttgacaacaaagacaaactggaggaaacctctggactgaaaattcttcaaaccggagtcgggtcgaaaagcaaactcaagttcctgcctcctcaggcggagcaagaagactccaccaagttcatcgcgctcaccctggtctccctcgcctgcatcctgggcgtcctcctggcctctggcctcatctactgcctccgccatagctctcagcacaggctgaaggagaagctctcgggactagggggcgacccaggtgcagatgccactgccgcctaccaggagctgtgccgccagcgtatggccacgcggccaccagaccgacctgagggcccgcacacgtcacgcatcagcagcgtctcatcccagttcagcgacgggccgatccccagcccctccgcacgcagcagcgcctcatcctggtccgaggagcctgtgcagtccaacatggacatctccaccggccacatgatcctgtcctacatggaggaccacctgaagaacaagaaccggctggagaaggagtgggaagcgctgtgcgcctaccaggcggagcccaacagctcgttcgtggcccagagggaggagaacgtgcccaagaaccgctccctggccgtgctgacctatgaccactcccgggtcctgctgaaggcggagaacagccacagccactcagactacatcaacgctagccccatcatggatcacgacccgaggaaccccgcgtacatcgccacccagggaccgctgcccgccaccgtggctgacttttggcagatggtgtgggagagcggctgcgtggtgatcgtcatgctgacacccctcgcggagaacggcgtccggcagtgctaccactactggccggatgaaggctccaatctctaccacatctatgaggtgaacctggtctccgagcacatctggtgtgaggacttcctggtgaggagcttctatctgaagaacctgcagaccaacgagacgcgcaccgtgacgcagttccacttcctgagttggtatgaccgaggagtcccttcctcctcaaggtccctcctggacttccgcagaaaagtaaacaagtgctacaggggccgttcttgtccaataattgttcattgcagtgacggtgcaggccggagcggcacctacgtcctgatcgacatggttctcaacaagatggccaaaggtgctaaagagattgatatcgcagcgaccctggagcacttgagggaccagagacccggcatggtccagacgaaggagcagtttgagttcgcgctgacagccgtggctgaggaggtgaacgccatcctcaaggcccttccccagtgagcggcagcctcaggggcctcaggggagcccccaccccacggatgttgtcaggaatcatgatctgactttaattgtgtgtcttctattataactgcatagtaatagggcccttagctctcccgtagtcagcgcagtttagcagttaaaagtgtatttttgtttaatcaaacaataataaagagagatttgtggaaaaatccagttacgggtggaggggaatcggttcatcaattttcacttgcttaaaaaaaatactttttcttaaagcacccgttcaccttcttggttgaagttgtgttaacaatgcagtagccagcacgttcgaggcggtttccaggaagagtgtgcttgtcatctgccactttcgggagggtggatccactgtgcaggagtggccggggaagctggcagcactcagtgaggccgcccggcacacaaggcacgtttggcatttctctttgagagagtttatcattgggagaagccgcggggacagaactgaacgtcctgcagcttcggggcaagtgagacaatcacagctcctcgctgcgtctccatcaacactgcgccgggtaccatggacggccccgtcagccacacctgtcagcccaagcagagtgattcaggggctccccgggggcagacacctgtgcaccccatgagtagtgcccacttgaggctggcactcccctgacctcacctttgcaaagttacagatgcaccccaacattgagatgtgtttttaatgttaaaatattgatttctacgttatgaaaacagatgcccccgtgaatgcttacctgtgagataaccacaaccaggaagaacaaatctgggcattgagcaagctatgagggtccccgggagcacacgaaccctgccaggcccccgctggctcctccaggcacgtcccggacctgtggggccccagagaggggacatttccctcctgggagagaaggagatcagggcaactcggagagggctgcgagcatttccctcccgggagaggagatcagggcgacctgcacgcactgcgtagagcctggaagggaagtgagaaaccagccgaccggccagaatgatgccaaaatattgcttatgtctctacatggtattgtaatgaatatctgctttaatatagctatcatttcttttccaaaattacttctctctatctggaatttaattaatcgaaatgaatttatctgaatataggaagcatatgcctacttgtaatttctaactccttatgtttgaagagaaacctccggtgtgagatatacaaatatatttaattgtgtcatattaaacttctgatttcaca

SEQ ID NO: 303920 - DNA, 3381 bp, Homo sapiens
ggcgtcgccgcaagagcgcgagaggcgcggcgggaggagccggcggcgcgcgcctccctgggcccggactcggccgcctcccgccgcctcccgcgcggccatggactgagcgccgccggccaggccgcggggatggggccgccgctcccgctgctgctgctgctactgctgctgctgccgccacgcgtcctgcctgccgccccttcgtccgtcccccgcggccggcagctcccggggcgtctgggctgcctgctcgaggagggcctctgcggagcgtccgaggcctgtgtgaacgatggagtgtttggaaggtgccagaaggttccggcaatggacttttaccgctacgaggtgtcgcccgtggccctgcagcgcctgcgcgtggcgttgcagaagctttccggcacaggtttcacgtggcaggatgactatactcagtatgtgatggaccaggaacttgcagacctcccgaaaacctacctgaggcgtcctgaagcatccagcccagccaggccctcaaaacacagcgttggcagcgagaggaggtacagtcgggagggcggtgctgccctggccaacgccctccgacgccacctgcccttcctggaggccctgtcccaggccccagcctcagacgtgctcgccaggacccatacggcgcaggacagaccccccgctgagggtgatgaccgcttctccgagagcatcctgacctatgtggcccacacgtctgcgctgacctaccctcccgggccccggacccagctccgcgaggacctcctgccgcggaccctcggccagctccagccagatgagctcagccctaaggtggacagtggtgtggacagacaccatctgatggcggccctcagtgcctatgctgcccagaggcccccagctccccccggggagggcagcctggagccacagtaccttctgcgtgcaccctcaagaatgcccaggcctttgctggcaccagccgccccccagaagtggccttcacctctgggagattccgaagacccctccagcacaggcgatggagcacggattcataccctcctgaaggacctgcagaggcagccggctgaggtgaggggcctgagtggcctggagctggacggcatggctgagctgatggctggcctgatgcaaggcgtggaccatggagtagctcgaggcagccctgggagagcggccctgggagagtctggagaacaggcggatggccccaaggccaccctccgtggagacagctttccagatgacggagtgcaggacgacgatgatagactttaccaagaggtccatcgtctgagtgccacactcgggggcctcctgcaggaccacgggtctcgactcttacctggagccctcccctttgcaaggcccctcgacatggagaggaagaagtccgagcaccctgagtcttccctgtcttcagaagaggagactgccggagtggagaacgtcaagagccagacgtattccaaagatctgctggggcagcagccgcattcggagcccggggccgctgcgtttggggagctccaaaaccagatgcctgggccctcgaaggaggagcagagccttccagcgggtgctcaggaggccctcagcgacggcctgcaattggaggtccagccttccgaggaagaggcgcggggctacatcgtgacagacagagaccccctgcgccccgaggaaggaaggcggctggtggaggacgtcgcccgcctcctgcaggtgcccagcagtgcgttcgctgacgtggaggttctcggaccagcagtgaccttcaaagtgagcgccaatgtccaaaacgtgaccactgaggatgtggagaaggccacagttgacaacaaagacaaactggaggaaacctctggactgaaaattcttcaaaccggagtcgggtcgaaaagcaaactcaagttcctgcctcctcaggcggagcaagaagactccaccaagttcatcgcgctcaccctggtctccctcgcctgcatcctgggcgtcctcctggcctctggcctcatctactgcctccgccatagctctcagcacaggctgaaggagaagctctcgggactagggggcgacccaggtgcagatgccactgccgcctaccaggagctgtgccgccagcgtatggccacgcggccaccagaccgacctgagggcccgcacacgtcacgcatcagcagcgtctcatcccagttcagcgacgggccgatccccagcccctccgcacgcagcagcgcctcatcctggtccgaggagcctgtgcagtccaacatggacatctccaccggccacatgatcctgtcctacatggaggaccacctgaagaacaagaaccggctggagaaggagtgggaagcgctgtgcgcctaccaggcggagcccaacagctcgttcgtggcccagagggaggagaacgtgcccaagaaccgctccctggccgtgctgacctatgaccactcccgggtcctgctgaaggcggagaacagccacagccactcagactacatcaacgctagccccatcatggatcacgacccgaggaaccccgcgtacatcgccacccagggaccgctgcccgccaccgtggctgacttttggcagatggtgtgggagagcggctgcgtggtgatcgtcatgctgacacccctcgcggagaacggcgtccggcagtgctaccactactggccggatgaaggctccaatctctaccacatctatgaggtgaacctggtctccgagcacatctggtgtgaggacttcctggtgaggagcttctatctgaagaacctgcagaccaacgagacgcgcaccgtgacgcagttccacttcctgagttggtatgaccgaggagtcccttcctcctcaaggtccctcctggacttccgcagaaaagtaaacaagtgctacaggggccgttcttgtccaataattgttcattgcagtgacggtgcaggccggagcggcacctacgtcctgatcgacatggttctcaacaagatggccaaaggtgctaaagagattgatatcgcagcgaccctggagcacttgagggaccagagacccggcatggtccagacgaaggagcagtttgagttcgcgctgacagccgtggctgaggaggtgaacgccatcctcaaggcccttccccagtgagcggcagcctcaggggcctcaggggagcccccaccccacggatgttgtcaggaatcatgatctgactttaattgtgtgtcttctattataactgcatagtaatagggcccttagctctcccgtagtcagcgcagtttagcagttaaaagtgtatttttgtttaatcaaacaataataaagagagatttgtggaaaaatcca

SEQ ID NO: 303921 - DNA, 978 bp, Homo sapiens
gctgctcgggggcatctgttttcataacgtagaaatcaatattttaacattaaaaacacatctcaatgttaaaatattgatttctacgttatgaaaacagatgcccccgtgaatgcttacctgtgagataaccacaaccaggaagaacaaatctgggcattgagcaagctatgagggtccccgggagcacacgaaccctgccaggcccccgctggctcctccaggcacgtcccggacctgtggggccccagagaggggacatttccctcctgggagagaaggagatcagggcaactcggagagggctgcgagcatttccctcccgggagaggagatcagggcgacctgcacgcactgcgtagagcctggaagggaagtgagaaaccagccgaccggccctgcccctcttcccgggatcacttaatgaaccacgtgttttgacatcatgtaaacctaagcacgtagagatgattcggatttgacaaaataacatttgagtatccgattcgccatcaccccctaccccagaaataggacaattcacttcattgaccaggatgatcacatggaaggcggcgcagaggcagctgtgtgggctgcagatttcctgtgtggggttcagcgtagaaaacgcacctccatcccgcccttcccacagcattcctccatcttagatagatggtactctccaaaggccctaccagagggaacacggcctactgagcggacagaatgatgccaaaatattgcttatgtctctacatggtattgtaatgaatatctgctttaatatagctatcatttcttttccaaaattacttctctctatctggaatttaattaatcgaaatgaatttatctgaatataggaagcatatgcctacttgtaatttctaactccttatgtttgaagagaaacctccggtgtgagatatacaaatatatttaattgtgtcatattaaacttctgatttcaca

SEQ ID NO: 303922 - DNA, 2657 bp, Homo sapiens
ggcgtcgccgcaagagcgcgagaggcgcggcgggaggagccggcggcgcgcgcctccctgggcccggactcggccgcctcccgccgcctcccgcgcggccatggactgagcgccgccggccaggccgcggggatggggccgccgctcccgctgctgctgctgctactgctgctgctgccgccacgcgtcctgcctgccgccccttcgtccgtcccccgcggccggcagctcccggggcgtctgggctgcctgctcgaggagggcctctgcggagcgtccgaggcctgtgtgaacggtttcacgtggcaggatgactatactcagtatgtgatggaccaggaacttgcagacctcccgaaaacctacctgaggcgtcctgaagcatccagcccagccaggccctcaaaacacagcgttggcagcgagaggaggtacagtcgggagggcggtgctgccctggccaacgccctccgacgccacctgcccttcctggaggccctgtcccaggccccagcctcagacgtgctcgccaggacccatacggcgcaggacagaccccccgctgagggtgatgaccgcttctccgagagcatcctgacctatgtggcccacacgtctgcgctgacctaccctcccgggccccggacccagctccgcgaggacctcctgccgcggaccctcggccagctccagccagatgagctcagccctaaggtggacagtggtgtggacagacaccatctgatggcggccctcagtgcctatgctgcccagaggcccccagctccccccggggagggcagcctggagccacagtaccttctgcgtgcaccctcaagaatgcccaggcctttgctggcaccagccgccccccagaagtggccttcacctctgggagattccgaagacccctccagcacaggcgatggagcacggattcataccctcctgaaggacctgcagaggcagccggctgaggtgaggggcctgagtggcctggagctggacggcatggctgagctgatggctggcctgatgcaaggcgtggaccatggagtagctcgaggcagccctgggagagcggccctgggagagtctggagaacaggcggatggccccaaggccaccctccgtggagacagctttccagatgacggagtgcaggacgacgatgatagactttaccaagaggtccatcgtctgagtgccacactcgggggcctcctgcaggaccacgggtctcgactcttacctggagccctcccctttgcaaggcccctcgacatggagaggaagaagtccgagcaccctgagtcttccctgtcttcagaagaggagactgccggagtggagaacgtcaagagccagacgtattccaaagatctgctggggcagcagccgcattcggagcccggggccgctgcgtttggggagctccaaaaccagatgcctgggccctcgaaggaggagcagagccttccagcgggtgctcaggaggccctcagcgacggcctgcaattggaggtccagccttccgaggaagaggcgcggggctacatcgtgacagacagagaccccctgcgccccgaggaaggaaggcggctggtggaggacgtcgcccgcctcctgcaggtgcccagcagtgcgttcgctgacgtggaggttctcggaccagcagtgaccttcaaagtgagcgccaatgtccaaaacgtgaccactgaggatgtggagaaggccacagttgacaacaaagacaaactggaggaaacctctggactgaaaattcttcaaaccggagtcgggtcgaaaagcaaactcaagttcctgcctcctcaggcggagcaagaagactccaccaagttcatcgcgctcaccctggtctccctcgcctgcatcctgggcgtcctcctggcctctggcctcatctactgcctccgccatagctctcagcacaggctgaaggagaagctctcgggactagggggcgacccaggtgcagatgccactgccgcctaccaggagctgtgccgccagcgtatggccacgcggccaccagaccgacctgagggcccgcacacgtcacgcatcagcagcgtctcatcccagttcagcgacgggccgatccccagcccctccgcacgcagcagcgcctcatcctggtccgaggagcctgtgcagtccaacatggacatctccaccggccacatgatcctgtcctacatggaggaccacctgaagaacaagaaccggctggagaaggagtgggaagcgctgtgcgcctaccaggcggagcccaacagctcgttcgtggcccagagggaggagaacgtgcccaagaaccgctccctggccgtgctgacctatgaccactcccgggtcctgctgaaggcggagaacagccacagccactcagactacatcaacgctagccccatcatggatcacgacccgaggaaccccgcgtacatcgccacccagggaccgctgcccgccaccgtggctgacttttggcaggtgaacatttttaaattaaaatctctctttctgaaaagaagatctcaataactgggtcacgaatcatgtcttgaatctgattaggccaatcaaacttcttacaaatgctcatcaaatgttacttatatcagaatttcagtctg

SEQ ID NO: 303923 - DNA, 467 bp, Homo sapiens
attttgttctggcaaaatttaccacatctttggccaaagaggggggaacaagcaagagggagtcacatctgagcacagcagctcatcccacaagctacaagctgctcagaggctcgaagcccccaggggcctcccttctcccctcacttggattctcccagcccgcgtccttcctccccctctcacatccgccatcctttcctctcgccggcccccgtaagcaggaaggaaatgaactgtcactagctttgttgtgggtcgggcttccgtgtggacggcagcactttcatttctctccttctgttggcagtgacggtgcaggccggagcggcacctacgtcctgatcgacatggttctcaacaagatggccaaaggtgagacacagacactgccgctttgttgcggctcagagctgggatggcgtcgctatggcaacgtagggtgccgtgttcacgggaggccctgg

SEQ ID NO: 303924 - DNA, 600 bp, Homo sapiens
aggggtcccacactgctgggctataggccctggaggctgtttgggagtcccacactgctgtgtgatggaccctggaggctgggcaggggtcctgtgctgctgggtggggggccctggaggccaagtgggggtctcacactgctgggtgggccaatgttcctctgacccctgcactgtgtccttgcagatgaccactcccgggtcctgctgaaggcggagaacagccacagccactcagactacatcaacgctagccccatcgtaagtgcactgccgggacaggggccccaggctttcccttgggtggcacggacgcggcaaatcacgtgggaaggttctcgggggaaatcacgtccccacccagctcagcgtctctgcggtggacagggccgactctgcccattgggctcccgccactcccctgttccttcaccagcggggctgtttatgagccgtgtgggtcccggctcacgctgggcggtgggttccgtgacttgtagaacatccagcaatggtgactggacagtttcctgactagaagacatggcttttaggagaggttcgtagtgggtgccgttcctctttcctggagctacacat

SEQ ID NO: 303925 - DNA, 511 bp, Homo sapiens
ggggtgcgttgaccgtcatgttgcgctggcctgccctggggtaaactctcgcctgcctgaaccttggatcttagcaggagaaggggttgtgccacgtgggtgccgtggccctcgtcctgctgggtgtccccaatgccactaaccccctgctcttcctccccctgtcctgcaggagctgtgccgccagcgtatggccacgcggccaccagaccgacctgagggcccgcacacgtcacgcatcagcagcgtctcatcccagttcagcgacgggccgatccccagcccctccgcacgcagcagcgcctcatcctggtccgaggagcctgtgcagtccaacatggacatctccaccggccacatgatcctggtaagcccagtctttgcactccctgccacacaaacaccagggccctccttcctcggcccctgcaacacccagcatctgcgcccgctgaccctcggggactgggcgatgatggctgcaccctgcccgctgcagaggctgacaggc

SEQ ID NO: 303926 - DNA, 2369 bp, Homo sapiens
gctcccagcctgttgcttattcattcagagtgggaaagcgccagccgagcggccagccagtgcggggctggccatgtaaggcccacaggcggtcctgcccgcccggtgccctgcggagagcctcgtgcagccctgggcaccgcccctgccctgccctgaccccttggccttgaaatgctgtcatcggaggagccgtcccgctcgggacaaggccagcatggacaaagctagagctggggcaagcaaggagccttcctgtcctcgaggccgtgggaagagaagcacgcccagggggccactcctgagagcctctctgtccaccaggcctctgcagaggggtcaccatggctctggcccgaggcagccggcagctgggggccctggtgtggggcgcctgcctgtgcgtgctggtgcacgggcagcaggcgcagcccgggcagggctcggaccccgcccgctggcggcagctgatccagtgggagaacaacgggcaggtgtacagcttgctcaactcgggctcagagtacgtgccggccggacctcagcgctccgagagtagctcccgggtgctgctggccggcgcgccccaggcccagcagcggcgcagccacgggagcccccggcgtcggcaggcgccgtccctgcccctgccggggcgcgtgggctcggacaccgtgcgcggccaggcgcggcacccattcggctttggccaggtgcccgacaactggcgcgaggtggccgtcggggacagcacgggcatggcccgggcccgcacctccgtctcccagcaacggcacgggggctccgcctcctcggtctcggcttcggccttcgccagcacctaccgccagcagccctcctacccgcagcagttcccctacccgcaggcgcccttcgtcagccagtacgagaactacgaccccgcgtcgcggacctacgaccagggtttcgtgtactaccggcccgcgggcggcggcgtgggcgcgggggcggcggccgtggcctcggcgggggtcatctacccctaccagccccgggcgcgctacgaggagtacggcggcggcgaagagctgcccgagtacccgcctcagggcttctacccggcccccgagaggccctacgtgccgccgccgccgccgccccccgacggcctggaccgccgctactcgcacagtctgtacagcgagggcacccccggcttcgagcaggcctaccctgaccccggtcccgaggcggcgcaggcccatggcggagacccacgcctgggctggtacccgccctacgccaacccgccgcccgaggcgtacgggccgccgcgcgcgctggagccgccctacctgccggtgcgcagctccgacacgcccccgccgggtggggagcggaacggcgcgcagcagggccgcctcagcgtgggcagcgtgtaccggcccaaccagaacggccgcggtctccctgacttggtcccagaccccaactatgtgcaagcatccacttatgtgcagagagcccacctgtactccctgcgctgtgctgcggaggagaagtgtctggccagcacagcctatgcccctgaggccaccgactacgatgtgcgggtgctactgcgcttcccccagcgcgtgaagaaccagggcacagcagacttcctccccaaccggccacggcacacctgggagtggcacagctgccaccagcattaccacagcatggacgagttcagccactacgacctactggatgcagccacaggcaagaaggtggccgagggccacaaggccagtttctgcctggaggacagcacctgtgacttcggcaacctcaagcgctatgcatgcacctctcatacccagggcctgagcccaggctgctatgacacctacaatgcggacatcgactgccagtggatcgacataaccgacgtgcagcctgggaactacatcctcaaggtgcacgtgaacccaaagtatattgttttggagtctgacttcaccaacaacgtggtgagatgcaacattcactacacaggtcgctacgtttctgcaacaaactgcaaaattgtccaatcctgatctccgggagggacagatggccaatctctccccttccaaagcaggccctgctccccgggcagcctcccgccgaggggcccagcccccaacccacaggcagggaggggcatccctccctgccggcctcagggagcgaacgtggatgaaaaccacagggattccggatgccagaccccattttatacttcacttttctctacagtgttgttttgttgttgttggtttttattttttatactttggccataccacagagctagattgcccaggtctgggctgaataaaacaaggtttttctac

SEQ ID NO: 303927 - DNA, 1534 bp, Homo sapiens
gctcccagcctgttgcttattcattcagagtgggaaagcgccagccgagcggccagccagtgcggggctggccatgtaaggcccacaggcggtcctgcccgcccggtgccctgcggagagcctcgtgcagccctgggcaccgcccctgccctgccctgaccccttggccttgaaatgctgtcatcggaggagccgtcccgctcgggacaaggccagcatggacaaagctagagctggggcaagcaaggagccttcctgtcctcgaggccgtgggaagagaagcacgcccagggggccactcctgagagcctctctgtccaccaggcctctgcagaggggtcaccatggctctggcccgaggcagccggcagctgggggccctggtgtggggcgcctgcctgtgcgtgctggtgcacgggcagcaggcgcagcccgggcagggctcggaccccgcccgctggcggcagctgatccagtgggagaacaacgggcaggtgtacagcttgctcaactcgggctcagagtacgtgccggccggacctcagcgctccgagagtagctcccgggtgctgctggccggcgcgccccaggcccagcagcggcgcagccacgggagcccccggcgtcggcaggcgccgtccctgcccctgccggggcgcgtgggctcggacaccgtgcgcggccaggcgcggcacccattcggctttggccaggtgcccgacaactggcgcgaggtggccgtcggggacagcacgggcatggcccgggcccgcacctccgtctcccagcaacggcacgggggctccgcctcctcggtctcggcttcggccttcgccagcacctaccgccagcagccctcctacccgcagcagttcccctacccgcaggcgcccttcgtcagccagtacgagaactacgaccccgcgtcgcggacctacgaccagggtttcgtgtactaccggcccgcgggcggcggcgtgggcgcgggggcggcggccgtggcctcggcgggggtcatctacccctaccagccccgggcgcgctacgaggagtacggcggcggcgaagagctgcccgagtacccgcctcagggcttctacccggcccccgagaggccctacgtgccgccgccgccgccgccccccgacggcctggaccgccgctactcgcacagtctgtacagcgagggcacccccggcttcgagcaggcctaccctgaccccggtcccgaggcggcgcaggcccatggcggagacccacgcctgggctggtacccgccctacgccaacccgccgcccgaggcgtacgggccgccgcgcgcgctggagccgccctacctgccggtgcgcagctccgacacgcccccgccgggtggggagcggaacggcgcgcagcagggccgcctcagcgtgggcagcgtgtaccggcccaaccagaacggccgcgtaactcctgctcagactcctgcatgcccagggaggaaggtggaggggcaggaacaggacggacaggccccgggctctggcacatcctg

SEQ ID NO: 303928 - DNA, 671 bp, Homo sapiens
  misc_feature (468)..(468): n is a, c, g, or t
tttttttttgttgttttgacttgaaaacgacacattttattatttcaagtttctgtggttcaggaatccaggtgtggtttagccaagtcttctggctcaaagtctcttacaagggtaaaagtaaggggtcagccaaggctctggtgtcatctgaaggctcaactggggaaggatttgcttctaagttccctcacatggctgctggcagcatgtggttcctcaccagttgttggactgtgggcctcagctcctggcttgctgttggccagccaccaccctcggttctctgccacatgggttttccataaggtggctcacaacacagcagcttcccattccaaccagtgggttgacatttccacctctaagtgaaactggcaatctgactgcaggcccaggatccaggtccagtcctgagggagacaaggtcctaacaggggagggacccaccgctccggaacagagagngtatcttgcggagtgggggacaaagtcttgacctcctcttcatccaggcaggcaggagctcctgccggtgcgcagctccgacacgcccccgccgggtggggagcggaacggcgcgcagcagggccgcctcagcgtgggcagcgtgtaccggcccaaccagaacggccgcggtgagtacggccccggcgcccctccggccgcgc

SEQ ID NO: 303929 - DNA, 1308 bp, Homo sapiens
  misc_feature (215)..(215): n is a, c, g, or t
gatcattcatcaagtggtacacttaggatttgtggacttttgtgtgtgtgtatgctatactcatgtttttaaaagttatttttggccgggcacggctgtcacgcctgtaagcccagcactttgggaggccgaggtgggcagatcatgaggtcaggagatcaagaccatcctggctaacatgggaaatcccgtctcaccgctccggaacagagagngtatcttgcggagtgggggacaaagtcttgacctcctcttcatccaggcaggcaggagctcctgccggtgcgcagctccgacacgcccccgccgggtggggagcggaacggcgcgcagcagggccgcctcagcgtgggcagcgtgtaccggcccaaccagaacggccgcggtctccctgacttggtcccagaccccaactatgtgcaagcatccacttatgtgcagagagcccacctgtactccctgcgctgtgctgcggaggagaagtgtctggccagcacagcctatgcccctgaggccaccgactacgatgtgcgggtgctactgcgcttcccccagcgcgtgaagaaccagggcacagcagacttcctccccaaccggccacggcacacctgggagtggcacagctgccaccagcattaccacagcatggacgagttcagccactacgacctactggatgcagccacaggcaagaaggtggccgagggccacaaggccagtttctgcctggaggacagcacctgtgacttcggcaacctcaagcgctatgcatgcacctctcatacccagggcctgagcccaggctgctatgacacctacaatgcggacatcgactgccagtggatcgacataaccgacgtgcagcctgggaactacatcctcaaggtgcacgtgaacccaaagtatattgttttggagtctgacttcaccaacaacgtggtgagatgcaacattcactacacaggtcgctacgtttctgcaacaaactgcaaaattgtccaatcctgatctccgggagggacagatggccaatctctccccttccaaagcaggccctgctccccgggcagcctcccgccgaggggcccagcccccaacccacaggcagggaggggcatccctccctgccggcctcagggagcgaacgtggatgaaaaccacagggattccggatgccagaccccattttatacttcacttttctctacagtgttgttttgttgttgttggtttttattttttatactttggccataccacagagctagattgcccaggtctgggctgaataaaacaaggtttttctac

SEQ ID NO: 303930 - DNA, 2491 bp, Homo sapiens
gctcccagcctgttgcttattcattcagagtgggaaagcgccagccgagcggccagccagtgcggggctggccatgtaaggcccacaggcggtcctgcccgcccggtgccctgcggagagcctcgtgcagccctgggcaccgcccctgccctgccctgaccccttggccttgaaatgctgtcatcggaggagccgtcccgctcgggacaaggccagcatggacaaagctagagctggggcaagcaaggagccttcctgtcctcgaggccgtgggaagagaagcacgcccagggggccactcctgagagcctctctgtccaccaggcctctgcagaggggtcaccatggctctggcccgaggcagccggcagctgggggccctggtgtggggcgcctgcctgtgcgtgctggtgcacgggcagcaggcgcagcccgggcagggctcggaccccgcccgctggcggcagctgatccagtgggagaacaacgggcaggtgtacagcttgctcaactcgggctcagagtacgtgccggccggacctcagcgctccgagagtagctcccgggtgctgctggccggcgcgccccaggcccagcagcggcgcagccacgggagcccccggcgtcggcaggcgccgtccctgcccctgccggggcgcgtgggctcggacaccgtgcgcggccaggcgcggcacccattcggctttggccaggtgcccgacaactggcgcgaggtggccgtcggggacagcacgggcatggcccgggcccgcacctccgtctcccagcaacggcacgggggctccgcctcctcggtctcggcttcggccttcgccagcacctaccgccagcagccctcctacccgcagcagttcccctacccgcaggcgcccttcgtcagccagtacgagaactacgaccccgcgtcgcggacctacgaccagggtttcgtgtactaccggcccgcgggcggcggcgtgggcgcgggggcggcggccgtggcctcggcgggggtcatctacccctaccagccccgggcgcgctacgaggagtacggcggcggcgaagagctgcccgagtacccgcctcagggcttctacccggcccccgagaggccctacgtgccgccgccgccgccgccccccgacggcctggaccgccgctactcgcacagtctgtacagcgagggcacccccggcttcgagcaggcctaccctgaccccggtcccgaggcggcgcaggcccatggcggagacccacgcctgggctggtacccgccctacgccaacccgccgcccgaggcgtacgggccgccgcgcgcgctggagccgccctacctgccggtgcgcagctccgacacgcccccgccgggtggggagcggaacggcgcgcagcagggccgcctcagcgtgggcagcgtgtaccggcccaaccagaacggccgcggtctccctgacttggtcccagaccccaactatgtgcaagcatccacttatgtgcagagagcccacctgtactccctgcgctgtgctgcggaggagaagtgtctggccagcacagcctatgcccctgaggccaccgactacgatgtgcgggtgctactgcgcttcccccagcgcgtgaagaaccagggcacagcagacttcctccccaaccggccacggcacacctgggagtggcacagctgccaccagcattaccacagcatggacgagttcagccactacgacctactggatgcagccacaggcaagaaggtggccgagggccacaaggccagtttctgcctggaggacagcacctgtgacttcggcaacctcaagcgctatgcatgcacctctcatacccagggcctgagcccaggctgctatgacacctacaatgcggacatcgactgccagtggatcgacataaccgacgtgcagcctgggaactacatcctcaaggtgcacgtgaacccaaagtatattgttttggagtctgacttcaccaacaacgtggtgagatgcaacattcactacacaggtcgctacgtttctgcaacaaactgcaaaattgtccagcaggcagctgggccagcgtgcacaggaagctggacagagcgttcccagaaaggccacgggactgacgcctgtgggtttccatcgtgtttctggaggaaaaaggaggcttaaaaaaaaaaaaatcctgatctccgggagggacagatggccaatctctccccttccaaagcaggccctgctccccgggcagcctcccgccgaggggcccagcccccaacccacaggcagggaggggcatccctccctgccggcctcagggagcgaacgtggatgaaaaccacagggattccggatgccagaccccattttatacttcacttttctctacagtgttgttttgttgttgttggtttttattttttatactttggccataccacagagctagattgcccaggtctgggctgaataaaacaaggtttttctac

SEQ ID NO: 303931 - DNA, 2477 bp, Homo sapiens
gctcccagcctgttgcttattcattcagagtgggaaagcgccagccgagcggccagccagtgcggggctggccatgtaaggcccacaggcggtcctgcccgcccggtgccctgcggagagcctcgtgcagccctgggcaccgcccctgccctgccctgaccccttggccttgaaatgctgtcatcggaggagccgtcccgctcgggacaaggccagcatggacaaagctagagctggggcaagcaaggagccttcctgtcctcgaggccgtgggaagagaagcacgcccagggggccactcctgagagcctctctgtccaccaggcctctgcagaggggtcaccatggctctggcccgaggcagccggcagctgggggccctggtgtggggcgcctgcctgtgcgtgctggtgcacgggcagcaggcgcagcccgggcagggctcggaccccgcccgctggcggcagctgatccagtgggagaacaacgggcaggtgtacagcttgctcaactcgggctcagagtacgtgccggccggacctcagcgctccgagagtagctcccgggtgctgctggccggcgcgccccaggcccagcagcggcgcagccacgggagcccccggcgtcggcaggcgccgtccctgcccctgccggggcgcgtgggctcggacaccgtgcgcggccaggcgcggcacccattcggctttggccaggtgcccgacaactggcgcgaggtggccgtcggggacagcacgggcatggcccgggcccgcacctccgtctcccagcaacggcacgggggctccgcctcctcggtctcggcttcggccttcgccagcacctaccgccagcagccctcctacccgcagcagttcccctacccgcaggcgcccttcgtcagccagtacgagaactacgaccccgcgtcgcggacctacgaccagggtttcgtgtactaccggcccgcgggcggcggcgtgggcgcgggggcggcggccgtggcctcggcgggggtcatctacccctaccagccccgggcgcgctacgaggagtacggcggcggcgaagagctgcccgagtacccgcctcagggcttctacccggcccccgagaggccctacgtgccgccgccgccgccgccccccgacggcctggaccgccgctactcgcacagtctgtacagcgagggcacccccggcttcgagcaggcctaccctgaccccggtcccgaggcggcgcaggcccatggcggagacccacgcctgggctggtacccgccctacgccaacccgccgcccgaggcgtacgggccgccgcgcgcgctggagccgccctacctgccggtgcgcagctccgacacgcccccgccgggtggggagcggaacggcgcgcagcagggccgcctcagcgtgggcagcgtgtaccggcccaaccagaacggccgcggtctccctgacttggtcccagaccccaactatgtgcaagcatccacttatgtgcagagagcccacctgtactccctgcgctgtgctgcggaggagaagtgtctggccagcacagcctatgcccctgaggccaccgactacgatgtgcgggtgctactgcgcttcccccagcgcgtgaagaaccagggcacagcagacttcctccccaaccggccacggcacacctgggagtggcacagctgccaccagcattaccacagcatggacgagttcagccactacgacctactggatgcagccacaggcaagaaggtggccgagggccacaaggccagtttctgcctggaggacagcacctgtgacttcggcaacctcaagcgctatgcatgcacctctcatacccagggcctgagcccaggctgctatgacacctacaatgcggacatcgactgccagtggatcgacataaccgacgtgcagcctgggaactacatcctcaaggtgcacgtgaacccaaagtatattgttttggagtctgacttcaccaacaacgtggtgagatgcaacattcactacacaggtcgctacgtttctgcaacaaactgcaaaattgtccaatcctgatctccgggagggacagatggccaatctctccccttccaaagcaggccaccgactacgatgtgcgggtgctactgcgcttcccccagcgcgtgaagaaccagggcacagcagacttcctccccaaccggccacggcacacctgggagtggcacagctgccaccagcattaccacagcatggacgagttcagcccccaacccacaggcagggaggggcatccctccctgccggcctcagggagcgaacgtggatgaaaaccacagggattccggatgccagaccccattttatacttcacttttctctacagtgttgttttgttgttgttggtttttattttttatactttggccataccacagagctagattgcccaggtctgggctgaataaaacaaggtttttctac

SEQ ID NO: 303932 - DNA, 2332 bp, Homo sapiens
gctcccagcctgttgcttattcattcagagtgggaaagcgccagccgagcggccagccagtgcggggctggccatgtaaggcccacaggcggtcctgcccgcccggtgccctgcggagagcctcgtgcagccctgggcaccgcccctgccctgccctgaccccttggccttgaaatgctgtcatcggaggagccgtcccgctcgggacaaggccagcatggacaaagctagagctggggcaagcaaggagccttcctgtcctcgaggccgtgggaagagaagcacgcccagggggccactcctgagagcctctctgtccaccaggcctctgcagaggggtcaccatggctctggcccgaggcagccggcagctgggggccctggtgtggggcgcctgcctgtgcgtgctggtgcacgggcagcaggcgcagcccgggcagggctcggaccccgcccgctggcggcagctgatccagtgggagaacaacgggcaggtgtacagcttgctcaactcgggctcagagtacgtgccggccggacctcagcgctccgagagtagctcccgggtgctgctggccggcgcgccccaggcccagcagcggcgcagccacgggagcccccggcgtcggcaggcgccgtccctgcccctgccggggcgcgtgggctcggacaccgtgcgcggccaggcgcggcacccattcggctttggccaggtgcccgacaactggcgcgaggtggccgtcggggacagcacgggcatggcccgggcccgcacctccgtctcccagcaacggcacgggggctccgcctcctcggtctcggcttcggccttcgccagcacctaccgccagcagccctcctacccgcagcagttcccctacccgcaggcgcccttcgtcagccagtacgagaactacgaccccgcgtcgcggacctacgaccagggtttcgtgtactaccggcccgcgggcggcggcgtgggcgcgggggcggcggccgtggcctcggcgggggtcatctacccctaccagccccgggcgcgctacgaggagtacggcggcggcgaagagctgcccgagtacccgcctcagggcttctacccggcccccgagaggccctacgtgccgccgccgccgccgccccccgacggcctggaccgccgctactcgcacagtctgtacagcgagggcacccccggcttcgagcaggcctaccctgaccccggtcccgaggcggcgcaggcccatggcggagacccacgcctgggctggtacccgccctacgccaacccgccgcccgaggcgtacgggccgccgcgcgcgctggagccgccctacctgccggtgcgcagctccgacacgcccccgccgggtggggagcggaacggcgcgcagcagggccgcctcagcgtgggcagcgtgtaccggcccaaccagaacggccgcggtctccctgacttggtcccagaccccaactatgtgcaagcatccacttatgtgcagagagcccacctgtactccctgcgctgtgctgcggaggagaagtgtctggccagcacagcctatgcccctgaggccaccgactacgatgtgcgggtgctactgcgcttcccccagcgcgtgaagaaccagggcacagcagacttcctccccaaccggccacggcacacctgggagtggcacagctgccaccagcattaccacagcatggacgagttcagccactacgacctactggatgcagccacaggcaagaaggtggccgagggccacaaggccagtttctgcctggaggacagcacctgtgacttcggcaacctcaagcgctatgcatgcacctctcatacccagggcctgagcccaggctgctatgacacctacaatgcggacatcgactgccagtggatcgacataaccgacgtgcagcctgggaactacatcctcaaggtgcacgtgaacccaaagtatattgttttggagtctgacttcaccaacaacgtggtgagatgcaacattcactacacagatcctgatctccgggagggacagatggccaatctctccccttccaaagcaggccctgctccccgggcagcctcccgccgaggggcccagcccccaacccacaggcagggaggggcatccctccctgccggcctcagggagcgaacgtggatgaaaaccacagggattccggatgccagaccccattttatacttcacttttctctacagtgttgttttgttgttgttggtttttattttttatactttggccataccacagagctagattgcccaggtctgggctgaataaaacaaggtttttctac

SEQ ID NO: 303933 - DNA, 632 bp, Homo sapiens
cagggtcaggggagaaacccaggggaaggtgggccagaaactcctgaaggtgggcgtggggtggctctgggaaacaagcagcatcacagccgctcctcttgtccctttcccagggcctgagcccaggctgctatgacacctacaatgcggacatcgactgccagtggatcgacataaccgacgtgcagcctgggaactacatcctcaaggtgcacgtgaacccaaagtatattgttttggagtctgacttcaccaacaacgtggtgagatgcaacattcactacacaggtcgctacgtttctgcaacaaactgcaaaattgtccaatcctgatctccgggagggacagatggccaatctctccccttccaaagcaggccctgctccccgggcagcctcccgccgaggggcccagcccccaacccacaggcagggaggggcatccctccctgccggcctcagggagcgaacgtggatgaaaaccacagggattccggatgccagaccccattttatacttcacttttctctacagtgttgttttgttgttgttggtttttattttttatactttggccataccacagagctagattgcccaggtctgggctgaataaaacaaggtttttctac

SEQ ID NO: 303934 - DNA, 361 bp, Homo sapiens
agcatccacttatgtgcagagagcccacctgtactccctgcgctgtgctgcggaggagaagtgtctggccaggtaaggagctgaggcagaagtgtagagtgttgggatagtccccgggagtcacccagaacccagcctagctgtggctgccagctaggctgtctgcaagctgatgaccctggccaagtgccccagcctcccaggaccctgaccgtttcatcagtgagccttgcctgccccgagggagtcaggaggggaggggagcaagcgggggcccagcatttctgtatactgtacctcactatacaaggaactccacttttactgtggcacttcatctttatatgagccctgaaggcat

SEQ ID NO: 303935 - DNA, 3784 bp, Homo sapiens
gaaaattgttcattcaattgtgtcatcctttgcagttggaatatttggagttttcctgatcttgttggatgtggctctgatctttgctgacctaattttcactgatagcaaagtttatattcctttggagtatcattctatttctctagctattgctttattttttctcatggatgttcttcttcgagtatttgtagaagggagacagcattatttttctgatttacttaacattttagatactgctgttactgtgattattctgctggttgatgtcgtttacattttttttgacgttaagtttcttaaggatattcccagatggacacgtttatttcgacttctacgacttatcattctgataagagtttttcatctggctcatctaaaaagacaacttggaaagctgataagaaggctggtttcaggaaacaaaaggtgatacgaaagtgatggatttgacctagacctcacttatattacagaacatattgtcgctatgtcgtttccatcttcgggaggccagtctttctatcggaatccaattaaggaagtcatacagtttctagacaaagaaacatccaaaccactatcgagtctacaatctatgcagtgaaagagcttatgatcctaagcacttccataatagggtcagtagaatcatgatcgatgatcataatgtccccactctacgggagatggtagcattctccaaggaagtgttggagtggatggctcaagattctgaaaacatcgtagtgattcactgtaaaggaggcaaaggaagaaccggaactatggtttgtgcctgcctgattgccagtgaaatatttttaactgcagaggaaagattgtactattttggagaacggcgaacagataaaaccaatggcactaaatatcagggagtagaaactccttctcagaatagatatgttggatattttgcacaagtgaaacatagctacaactggaatctccctccaagaaaaacactgtttataaaaagattcgttatttattcgattcatggtgttggaacaggcgatggatatgatctaaaagtccaaatagtaatgaagaaaaagattgtcttttcctgtacttccttaaagaattgtcgggtatttcatgacactgaaacagacagggtaataactgatgtgttcaactgtccacctctgtatgatgatgtgaaagtgcaagcttcctcttcagacaaaaaataatatccaaagatattttggcactaacagcgctatctgtagcaagaaagttgagcagtgtgaactgttgagacttccaagaagacttcagagaaccaagacagtgtaaaggaaaacaggaaaaaagacttgttagacattattaagggcacgaaagttgaattgagcacagtaaatgtacaaacaacaaagccacccaacagaagtccacttaaaagctacaactggcccgcctcaaagagctacagagcatgctccaaagaagagaaatgagcccgtgagtcctgagttggtggcagctgcatctgctgctctgttttgacaagcaaacaagccagaactgctcaggcagctccgtagcatgaggaagagtcaggggcacagagagatggagagagacctagttagagagcgaaccatgtgctggatttagccagtcctgcatttttctatacttcaaatcaaaacgggccatgcttcacatctacccatgatgaataggggtactttgattaagaataaatagagctgactgaattctgaacaagaaaaacatattcaaggggaagagatgtaatagttttgacgtgacgacagttactaaagaagcacctgaacagacacatcaccttcactttgggatgtggaatttgctaaataagccacagaaaatgaacatcccttcagaatgggtttgaagagctgatccagtggattaaagaggggaaactgggagtttccaattaacaatgaagcaggagctgactaaggctttggaacagaaaccagatgatgcacaatattattgtcaaagagcttattgtcacattcttcttgggagttactatggatctgtaaataactgacgaaaaacccatctgtttctacgtagttgctgttgccgacacaaagaagtcttatgaactcaatccaaataattccactgctatgctgagaaaagggggctggcggcatggagtcttgctctgtcacccatcctcgagtgcaatggcaccatcttagttcactgcagccttgaattccagggctcgagccatccttctgcctctgcctcctgagtaggtgggactacaggcatgtgccaccatactgagctaatttgttaaacactttttttgtagagacgaggtcttgctacgtttcccagactggtctctgaactcccggcctcaagtgatcctactgccttggcctcccaaagtactggcataatagacatgagccactgcacctggctcctaagttcttttcttgaataatatctttctttttttttattttttgaggtggagtctcaccctgttgcccaggctggagtgcaatggcgtgatctcggctcactgcaacttctacctcccgggttcaagtgattctcctgcctcagcctcctgaatagctaggattacaggcgtgcgctaccacgcctggctaattttttgtgtctttagtagagatgcggtttcaccatgttggccaggcttgtctcgaactcttgacctcgtgatccacccgccttggcctcccaaagtgttgggattacaggcgtgagccaccacgcctggccaagtaatatcttaatatcatgccattgacatttatcctctaattatttcagaggtggccttcagaagaaggcctctttggtaaaattgctattgaggatatttcactgaaaaacaaatttatctttaaatttaaatccaggaaaaatttaaactttcaggcttctatttttatcagacagggtaaaaaatttataactcagaatattaccctttcccctctttgtgtgatggattgcttggttttagttactgattatttaaaataataagttattcaaatctaggattttgatacaatagttcttctctagaatatagtgtgtgtgtgagagtatatttaaaatttttattaaggcccatggggcagcctttgaggaaaccagaccttggggatcgccaggcaggattagtggcaggaattgagagaacagagccccacagagctcctcggggaccgtcccccagtcacaagagtatctcaaggaagtagtcttctcccacatcccccaaagataactaccagagggtcagttctctgagcccttctcagtgtagaaaagacaagtgtcaaagcttccccactcaccctgagtttgccttctatgacaatacgtcgtttggcctcactgaggctgagcagaggatgctggacctcccaggatattttgggtcaaatgaagaggatgaaaccacaagtacacttagcgtggagaagctggtgatctagactgagaatcagcctgagcttaacacagctggggtctgctactcgcgttttgtagacttttgtgtaactatttgtaccgtaggacagaatgtgaggaggaagtaacacacacagaggaggatgtgtgtgtgtgcatgtgtttgaattcacaaggaagaaattatttatcttgagctttttcctttgttattcagtttttattggtttattactaataatgataataaaatgtaaacaagagcaaa

SEQ ID NO: 303936 - DNA, 3496 bp, Homo sapiens
  misc_feature (411)..(411): n is a, c, g, or t
  misc_feature (616)..(616): n is a, c, g, or t
agaccggaaacggaggagagcgcgggggatgtgtttggcatggggacgcactgttacagttgcgctcctggttggctttgtgtttccgcggtgttggtagagtctcggtgtttctacctcttagcaccctttcctgccaccctttgtcctgtggaagcccggagacatcagcggctgcaattttgctactcgctgctcggcatggaacggtcaggtaccgcagttcagcgctcttggccccgcaggtcctcgggcatccccgtgccccgtgctgtacattcagttatcctccgacttcccggggtcgaaggtattacctgctgggttttagaatctattgctttacatctgagaaaagaaaaatcccagaaagataagatgacttgcccaagatcatagcgtgcctggaanacagtgctccgattacaagctggtcgctgtgcctcattcgtcttgtcatcaactcctgtcagtttatccaagctccaaaagcgaagttgttttagcttttgcttcccaagatttatttgatagtctcatttctgtttccttcgtttattctttcgttcattattggaaaactttacagcgtgccagtactggtcataaaccccantgtgtcttaggccttagtgagctgtgaggtgcatgaccttaggtaagttacttctctgattttcagtttccttatctgcaaaatggagaccttagggagttaatgtgggtatgagaaatgtacataaaacatattgcacaaggtgaggcatgtagtgtatgctaataaatggtaagttgctgctgctatggttgttaacaataattataaaaagcaaatggaaaaggcttgaattgaaaaaaatttagacacatagtttttttccttattagcctgcactgtatttttcattttttttaatgcatctttccaggacaaaaaataatatccaaagatattttggcactaacagcgctatctgtagcaagaaagttgagcagtgtgaactgttgagacttccaagaagacttcagagaaccaagacagtgtaaaggaaaacaggaaaaaagacttgttagacattattaagggcacgaaagttgaattgagcacagtaaatgtacaaacaacaaagccacccaacagaagtccacttaaaagctacaactggcccgcctcaaagagctacagagcatgctccaaagaagagaaatgagcccgtgagtcctgagttggtggcagctgcatctgctgctctgttttgacaagcaaacaagccagaactgctcaggcagctccgtagcatgaggaagagtcaggggcacagagagatggagagagacctagttagagagcgaaccatgtgctggatttagccagtcctgcatttttctatacttcaaatcaaaacgggccatgcttcacatctacccatgatgaataggggtactttgattaagaataaatagagctgactgaattctgaacaagaaaaacatattcaaggggaagagatgtaatagttttgacgtgacgacagttactaaagaagcacctgaacagacacatcaccttcactttgggatgtggaatttgctaaataagccacagaaaatgaacatcccttcagaatgggtttgaagagctgatccagtggattaaagaggggaaactgggagtttccaattaacaatgaagcaggagctgactaaggctttggaacagaaaccagatgatgcacaatattattgtcaaagagcttattgtcacattcttcttgggagttactatggatctgtaaataactgacgaaaaacccatctgtttctacgtagttgctgttgccgacacaaagaagtcttatgaactcaatccaaataattccactgctatgctgagaaaagggggctggcggcatggagtcttgctctgtcacccatcctcgagtgcaatggcaccatcttagttcactgcagccttgaattccagggctcgagccatccttctgcctctgcctcctgagtaggtgggactacaggcatgtgccaccatactgagctaatttgttaaacactttttttgtagagacgaggtcttgctacgtttcccagactggtctctgaactcccggcctcaagtgatcctactgccttggcctcccaaagtactggcataatagacatgagccactgcacctggctcctaagttcttttcttgaataatatctttctttttttttattttttgaggtggagtctcaccctgttgcccaggctggagtgcaatggcgtgatctcggctcactgcaacttctacctcccgggttcaagtgattctcctgcctcagcctcctgaatagctaggattacaggcgtgcgctaccacgcctggctaattttttgtgtctttagtagagatgcggtttcaccatgttggccaggcttgtctcgaactcttgacctcgtgatccacccgccttggcctcccaaagtgttgggattacaggcgtgagccaccacgcctggccaagtaatatcttaatatcatgccattgacatttatcctctaattatttcagaggtggccttcagaagaaggcctctttggtaaaattgctattgaggatatttcactgaaaaacaaatttatctttaaatttaaatccaggaaaaatttaaactttcaggcttctatttttatcagacagggtaaaaaatttataactcagaatattaccctttcccctctttgtgtgatggattgcttggttttagttactgattatttaaaataataagttattcaaatctaggattttgatacaatagttcttctctagaatatagtgtgtgtgtgagagtatatttaaaatttttattaaggcccatggggcagcctttgaggaaaccagaccttggggatcgccaggcaggattagtggcaggaattgagagaacagagccccacagagctcctcggggaccgtcccccagtcacaagagtatctcaaggaagtagtcttctcccacatcccccaaagataactaccagagggtcagttctctgagcccttctcagtgtagaaaagacaagtgtcaaagcttccccactcaccctgagtttgccttctatgacaatacgtcgtttggcctcactgaggctgagcagaggatgctggacctcccaggatattttgggtcaaatgaagaggatgaaaccacaagtacacttagcgtggagaagctggtgatctagactgagaatcagcctgagcttaacacagctggggtctgctactcgcgttttgtagacttttgtgtaactatttgtaccgtaggacagaatgtgaggaggaagtaacacacacagaggaggatgtgtgtgtgtgcatgtgtttgaattcacaaggaagaaattatttatcttgagctttttcctttgttattcagtttttattggtttattactaataatgataataaaatgtaaacaagagcaaa

SEQ ID NO: 303937 - DNA, 788 bp, Homo sapiens
agaccggaaacggaggagagcgcgggggatgtgtttggcatggggacgcactgttacagttgcgctcctggttggctttgtgtttccgcggtgttggtagagtctcggtgtttctacctcttagcaccctttcctgccaccctttgtcctgtggaagcccggagacatcagcggctgcaattttgctactcgctgctcggcatggaacggtcaggacaaaaaataatatccaaagatattttggcactaacagcgctatctgtagcaagaaagttgagcagtgtgaactgttgagacttccaagaagacttcagagaaccaagacagtgtaaaggaaaacaggaaaaaagacttgttagacattattaagggcacgaaagttgaattgagcacagtaaatgtacaaacaacaaagccacccaacagaagtccacttaaaagctacaactggcccgcctcaaagagctacagagcatgctccaaagaagagaaatgagcccgtgagtcctgagttggtggcagctgcatctgctgctctgttttgacaagcaaacaagccagaactgctcaggcagctccgtagcatgaggaagagtcaggggcacagagagatggagagagacctagttagagagcgaaccatgtgctggatttagccagtcctgcatttttctatacttcaaatcaaaacgggccatgcttcacatctacccatgatgaataggggtactttgattaagaataaatagagctgactgaattctgaacaagtgagtattttgtgagaa

SEQ ID NO: 303938 - DNA, 610 bp, Homo sapiens
cccccagccttgctgctgccttgcagtttgatctcagactgctgtgctagcaatcagcgagactccgtgggcgtaggaccctccaagccaggtgaaagagcttatgatcctaagcacttccataatagggtcagtagaatcatgatcgatgatcataatgtccccactctacgggagatggtagcattctccaaggaagtgttggagtggatggctcaagattctgaaaacatcgtagtgattcactgtaaaggaggcaaagaatagatatgttggatattttgcacaagtgaaacatagctacaactggaatctccctccaagaaaaacactgtttataaaaagattcgttatttattcgattcatggtgttggaacaggcgatggatatgatctaaaagtccaaatagtaatgaagaaaaagattgtcttttcctgtacttccttaaagaattgtcgggtatttcatgacactgaaacagacagggtaataactgatgtgttcaactgtccacctctgtatgatgatgtgaaagtgcaagcttcctcttcaagagaagagggcagcacacctcgcagggctaactggaagggggagccatccaggaga

SEQ ID NO: 303939 - DNA, 2781 bp, Homo sapiens
agaccggaaacggaggagagcgcgggggatgtgtttggcatggggacgcactgttacagttgcgctcctggttggctttgtgtttccgcggtgttggtagagtctcggtgtttctacctcttagcaccctttcctgccaccctttgtcctgtggaagcccggagacatcagcggctgcaattttgctactcgctgctcggcatggaacggtcaggacaaaaaataatatccaaagatattttggcactaacagcgctatctgtagcaagaaagttgagcagtgtgaactgttgagacttccaagaagacttcagagaaccaagacagtgtaaaggaaaacaggaaaaaagacttgttagacattattaagggcacgaaagttgaattgagcacagtaaatgtacaaacaacaaagccacccaacagaagtccacttaaaagctacaactggcccgcctcaaagagctacagagcatgctccaaagaagagaaatgagcccgtgagtcctgagttggtggcagctgcatctgctgctctgttttgacaagcaaacaagccagaactgctcaggcagctccgtagcatgaggaagagtcaggggcacagagagatggagagagacctagttagagagcgaaccatgtgctggatttagccagtcctgcatttttctatacttcaaatcaaaacgggccatgcttcacatctacccatgatgaataggggtactttgattaagaataaatagagctgactgaattctgaacaagaaaaacatattcaaggggaagagatgtaatagttttgacgtgacgacagttactaaagaagcacctgaacagacacatcaccttcactttgggatgtggaatttgctaaataagccacagaaaatgaacatcccttcagaatgggtttgaagagctgatccagtggattaaagaggggaaactgggagtttccaattaacaatgaagcaggagctgactaaggctttggaacagaaaccagatgatgcacaatattattgtcaaagagcttattgtcacattcttcttgggagttactatggatctgtaaataactgacgaaaaacccatctgtttctacgtagttgctgttgccgacacaaagaagtcttatgaactcaatccaaataattccactgctatgctgagaaaagggggctggcggcatggagtcttgctctgtcacccatcctcgagtgcaatggcaccatcttagttcactgcagccttgaattccagggctcgagccatccttctgcctctgcctcctgagtaggtgggactacaggcatgtgccaccatactgagctaatttgttaaacactttttttgtagagacgaggtcttgctacgtttcccagactggtctctgaactcccggcctcaagtgatcctactgccttggcctcccaaagtactggcataatagacatgagccactgcacctggctcctaagttcttttcttgaataatatctttctttttttttattttttgaggtggagtctcaccctgttgcccaggctggagtgcaatggcgtgatctcggctcactgcaacttctacctcccgggttcaagtgattctcctgcctcagcctcctgaatagctaggattacaggcgtgcgctaccacgcctggctaattttttgtgtctttagtagagatgcggtttcaccatgttggccaggcttgtctcgaactcttgacctcgtgatccacccgccttggcctcccaaagtgttgggattacaggcgtgagccaccacgcctggccaagtaatatcttaatatcatgccattgacatttatcctctaattatttcagaggtggccttcagaagaaggcctctttggtaaaattgctattgaggatatttcactgaaaaacaaatttatctttaaatttaaatccaggaaaaatttaaactttcaggcttctatttttatcagacagggtaaaaaatttataactcagaatattaccctttcccctctttgtgtgatggattgcttggttttagttactgattatttaaaataataagttattcaaatctaggattttgatacaatagttcttctctagaatatagtgtgtgtgtgagagtatatttaaaatttttattaaggcccatggggcagcctttgaggaaaccagaccttggggatcgccaggcaggattagtggcaggaattgagagaacagagccccacagagctcctcggggaccgtcccccagtcacaagagtatctcaaggaagtagtcttctcccacatcccccaaagataactaccagagggtcagttctctgagcccttctcagtgtagaaaagacaagtgtcaaagcttccccactcaccctgagtttgccttctatgacaatacgtcgtttggcctcactgaggctgagcagaggatgctggacctcccaggatattttgggtcaaatgaagaggatgaaaccacaagtacacttagcgtggagaagctggtgatctagactgagaatcagcctgagcttaacacagctggggtctgctactcgcgttttgtagacttttgtgtaactatttgtaccgtaggacagaatgtgaggaggaagtaacacacacagaggaggatgtgtgtgtgtgcatgtgtttgaattcacaaggaagaaattatttatcttgagctttttcctttgttattcagtttttattggtttattactaataatgataataaaatgtaaacaagagcaaa

SEQ ID NO: 303940 - DNA, 2911 bp, Homo sapiens
agaccggaaacggaggagagcgcgggggatgtgtttggcatggggacgcactgttacagttgcgctcctggttggctttgtgtttccgcggtgttggtagagtctcggtgtttctacctcttagcaccctttcctgccaccctttgtcctgtggaagcccggagacatcagcggctgcaattttgctactcgctgctcggcatggaacggtcaggacaaaaaataatatccaaagatattttggcactaacagcgctatctgtagcaagaaagttgagcagtgtgaactgttgagacttccaagaagacttcagagaaccaagacagtgtaaaggaaaacaggaaaaaagacttgttagacattattaagggcacgaaagttgaattgagcacagtaaatgtacaaacaacaaagccacccaacagaagtccacttaaaagctacaactggcccgcctcaaagagctacagagcatgctccaaagaagagaaatgagcccgtgagtcctgagttggtggcagctgcatctgctgctctgttttgacaagcaaacaagccagaactgctcaggcagctccgtagcatgaggaagagtcaggggcacagagagatggagagagacctagttagagagcgaaccatgtgctggatttagccagtcctgcatttttctatacttcaaatcaaaacgggccatgcttcacatctacccatgatgaataggggtactttgattaagaataaatagagctgactgaattctgaacaagaaaaacatattcaaggggaagagatgtaatagttttgacgtgacgacagttactaaagaagcacctgaacagacacatcaccttcactttgggatgtggaatttgctaaataagccacagaaaatgaacatcccttcagaatgggtttgaagagctgatccagtggattaaagaggggaaactgggagtttccaattaacaatgaagcaggagctgactaaggctttggaacagaaaccagatgatgcacaatattattgtcaaagagcttattgtcacattcttcttgggagttactatggatctgtaaataactgacgaaaaacccatctgtttctacgtagttgctgttgccgacacaaagaagtcttatgaactcaatccaaataattccactgctatgctgagaaaagggggctggcggcatggagtcttgctctgtcacccatcctcgagtgcaatggcaccatcttagttcactgcagccttgaattccagggctcgagccatccttctgcctctgcctcctgagtaggtgggactacaggcatgtgccaccatactgagctaatttgttaaacactttttttgtagagacgaggtcttgctacgtttcccagactggtctctgaactcccggcctcaagtgatcctactgccttggcctcccaaagtactggcataatagacatgagccactgcacctggctcctaagttcttttcttgaataatatctttctttttttttattttttgaggtggagtctcaccctgttgcccaggctggagtgcaatggcgtgatctcggctcactgcaacttctacctcccgggttcaagtgattctcctgcctcagcctcctgaatagctaggattacaggcgtgcgctaccacgcctggctaattttttgtgtctttagtagagatgcggtttcaccatgttggccaggcttgtctcgaactcttgacctcgtgatccacccgccttggcctcccaaagtgttgggattacaggcgtgagccaccacgcctggccaagtaatatcttaatatcatgccattgacatttatcctctaattatttcagaggtggccttcagaagaaggcctctttggtaaaattgctattgaggatatttcactgaaaaacaaatttatctttaaatttaaatccaggaaaaatttaaactttcaggcttctatttttatcagacagggtaaaaaatttataactcagaatattaccctttcccctctttgtgtgatggattgcttggttttagttactgattatttaaaataataagttattcaaatctaggattttgatacaatagttcttctctagaatatagtgtgtgtgtgagagtatatttaaaatttttattaaggcccatggggcagcctttgaggaaaccagaccttggggatcgccaggcaggattagtggcaggaattgagagaacagagccccacagagctcctcggggaccgtcccccagtcacaagagtatctcaaggaagtagtcttctcccacatcccccaaagataactaccagagggtcagttctctgagcccttctcagtgtagaaaagacaagtgtcaaagcttccccactcaccctgagtttgccttctatgacaatacgtcgtttggcctcactgaggctgagcagaggatgctggacctcccaggatattttgggtcaaatgaagaggatgaaaccacaagtacacttagcgtggagaagctggtgatctagactgagaatcagcctgagcttaacacagctggggtctgctactcgcgttttgtagacttttgtgtaactatttgtaccgtaggacagaatgtgaggaggaagtaacacacacagaggaggatgtgtgtgtgtgcatgtgtttgaattcacaaggaagaaattatttatcttgagctttttcctttgttattcagtttttattggtttattactaataatgataataaaatgtaaacaagagcaaaaaaaaaaaaaaaaatcggaaggatccattgccgggtgggaaaaaggggttatgacggggcacgtggccaaagttgttcctgacccagtttttttgttccaagtgctaaatcggcgggctcccctataggg

SEQ ID NO: 303941 - DNA, 559 bp, Homo sapiens
atgatacattataaaaatttataagtaaagtttgttaagaggaaagattatgcttatattttaggggaagggggaatattgaactacatttatagtgattttgtttcaggtttttctgaggaattttaaataccctgtgtcctcttaatagtaaaaacagtttgaggtactctgagtttcttacaactatttgtctctgaatagttttctcttaaaatttgacaaatattaaaaacattgtccttccttctttggttacagtggagtctcttctgttttgccaggaaagttaacatatttttttttccatttttgttcatcatttacaaattagatggtatagattttagcaaatagatctcaagagctggattcaattagcagctttttaggacataaacattaaagggttagatggaaaagattgttttgactgactggataaatgacagggctgtgtttgatgtgcgtccaggaattggtctggagctggtgcccaacttctcagtccatcttgagaagccaaataaaatacttaacctaggcctcattttgttta

SEQ ID NO: 303942 - DNA, 1150 bp, Homo sapiens
atgatacattataaaaatttataagtaaagtttgttaagaggaaagattatgcttatattttaggggaagggggaatattgaactacatttatagtgattttgtttcaggtttttctgaggaattttaaataccctgtgtcctcttaatagtaaaaacagtttgaggtactctgagtttcttacaactatttgtctctgaatagttttctcttaaaatttgacaaatattaaaaacattgtccttccttctttggttacagtggagtctcttctgttttgccaggaaagttaacatatttttttttccatttttgttcatcatttacaaattagatggtatagattttagcaaatagatctcaagagctggattcaattagcagctttttaggacataaacattaaagggttagatggaaaagattgttttgactgactggataaatgacagggctgtgtttgatgtgcgtccaggaattggtctggagctggtgcccaacttctcagtccatcttgagaagccaaataaaatacttaacctaggcctcattttgtttaaaaaaaaaaaaaaaagttgattctttgttaagaccttaagaaatgtttggcatacctttagactaagtgtttaacagttcatttagacctgggttccctaatagaggaaaaaaaatcacttaaaaaaagacagatcccacagtgaatttatatttggtttacaatacacttgggctgtaagatgttttaaaattattgttctttgctttaagttaataccatattagtattttaaatttatagagtacctttgatttcaatatgctgtataaattttagttacttggtaataaccttattgcggaattgcctttttactgaaaggtataaacatttcttgcatggtgacacacacactcacacactcacacactcatacactgtctttctgaaatatttgaaccgtgagagctctgcccacaattgatattagacctttccacatattattcttaaacccacagtcagtgaattgtttggtatttgtcaatgctaagaaggtgggactaatttaataatttgatcccaaattttagattcctcaggcaattgggggttagaatccaatttcatccatcaagctacttctgt

SEQ ID NO: 303943 - DNA, 687 bp, Homo sapiens
ataatgggttcatattcgattggctgcacttagctataaatcctgaggaggagaagaagaaagacatcagaaagtaattggactagaagaaccttagtttggaagcaaaacacagaatccagtagagacggggtttcaccgcgttagccaggatggtctcgatctgacctcgtaatccgcccaacccagcctcccaaagtgctgggattacaggcttgagccactgcacgcagcgagaaagcaccttttaatctctaccactgccaagtacgtgagtagactggaaagaccatgggcttcagaatcaagtggccatggataaaaattgtgtctgagagactttcaaggagttacttagccattctgagctttttgctccgtgattagtatagcagtgataataatatcaaccttacaatattacgttatggaattaaatgtctgtggaagtgtcttcctcacagtaattgctcaataatgattcatgtcctcccttcccttcttaattcagatttatttacatatgctcaatagagcaataaatatttgtgattccatttttctagtacctgcttccagttatttcaggtttttatacaggcacaaaagcccttttcttctacactgctttccctaagaggagttaccttgacctaaaaaataaggaaagcaccaaccataaaaccc

SEQ ID NO: 303944 - DNA, 777 bp, Homo sapiens
ggctggataccgtggcttcacattttaggtagactgggtgttttatctactgagtgaattacagccttcggcaatgatgtcaaggtagcaacaaaacccaaaaaatccatcctttagaaattgttttaagtcacaatgatgataccttctttaaaagctttgacttactgaaataatgcttttcatttgtccaagatgagtacatagcagaatttggaaatatggttccaaaaggctaaatagactgacttttttgatatttttcccttatagggagaaagaaacattaacggtttatcagatgccttgactgtactttttactgctttgtcttcaaggcctagtgtaataattaacatctagtatgtgtttgatggatagccaatttttgcttcattggtatgttgttaccacagtcattggtagagtcaatatatgaatgaagaaagtataacaaatttgccctctagtagagtacaggcaaagtatggccgtcagtttcaccctgattttttttcctccattcttttttagggtttaggtcaagaacaagggcatttcattgtaccacatagctgagagtagggaattgggacatactgtcttgctttaaattaaagttgtctgtttcatcaagtagagaggttcctaagatattgccagatttctgactcggggtttgttaaaaatagaaaaggtagttccttaaggttgtattttattggatgcctccacctgcttcaggctagctcactggagaataaatattccaggtta

SEQ ID NO: 303945 - DNA, 1780 bp, Homo sapiens
tgtttccacacctactgagtcaggtgtcccctcagctgaagaagtatttggttccagccagccagagagaatatctcctgaaagtggacttgccaaggccatgttaaccattgctatcactgcgactccttctctgactgttgatgaaaaggaggaactccttacaagcactaactttcagcccattgtagaagagatcacagaaaccacaaaaggttttctgaagtatatggataatcaatcatttgcaactgaaagtcaggaaggagttggtttgggacattcaccttcatcctatgtgaatactaaggaaatgctaaccaccaatccaaagactgagaaatttgaagcagacacagaccacaggacaacttcttttcctggtgctgagtccacagcaggcagtgagcctggaagcctcacccctgataaggagaagccttcgcagatgacagctgataacacccaggctgctgccaccaagcaaccactcgaaacttccgagtacaccctgagtgttgagccagaaactgatagtctgctgggagccccagaagtcacagtgagtgtcagcacagctgttccagctgcctctgccttaagtgatgagtgggatgacaccaaattagagagtgtaagccggataaggacccccaagcttggagacaatgaagagactcaggtgagaacggagatgtctcagacagcacaagtaagccatgagggtatggaaggaggccagccttggacagaggctgcacaggtggctctggggctgcctgaaggggaaacacacacgggcacagccctgctaatagcgcatgggaatgagagatcacctgctttcactgatcaaagttcctttacccccacaagtctgatggaagacatgaaagtttccattgtgaacttgctccaaagtacgggagacttcacggaatccaccaaggaaaacgatgccctgtttttcttagaaaccactgtttctgtctctgtatatgagtctgaggcagaccaactgttgggaaatacaatgaaagacatcatcactcaagagatgacaacagctgttcaagagccagatgccactttatccatggtgacacaagagcaggttgctaccctcgagcttatcagagacagtggcaagactgaggaagaaaaggaggacccctctcctgtgtctgacgttcctggtgttactcagctgtcaagaagatgggagcctctggccactacaatttcaactacagtcgtccctttgtcttttgaagttactcccactgtggaagaacaaatggacacagtcacagggccaaatgaggagttcacaccagttctgggatctccagtgacacctcctggaataatggtgggggaacccagcatttcccctgcacttcctgctttggaggcatcctctgagagaagaactgttgttccatctattactcgtgttaatacagctgcctcatatggcctggaccaacttgaatctgaagagggacaagaagatgaggatgaagaggatgaagaagatgaagatgaagaagaggaagatgaggaagaagatgaggaagataaagatgcagactcgctggatgagggcttggatggtgacactgagctgccaggttttaccctccctggtatcacatcccaggaaccaggcttagaggagggaaacatggacctgttggagggagctacctaccaggtgccagatgccctcgagtgggaacagcagaatcaaggcctgggtaagagtcatgtgtatttc

SEQ ID NO: 303946 - DNA, 1055 bp, Homo sapiens
cactgtctggcactccctagtgagatgaacccggtacctcagatggaaatgcagaaatcacccgtcttctgcgtcgctcacgctgggagctgtagaccagagctgttcctattcggccatcttggctcctcccctaatgagaagctggatggaaaaattaaaagacaaggctggttacatgtctgggatgctggtgcctgtaggggttgggatagctggagccttgttcatcttgggagccctctacagcattaaggttatgaatcgccgaaggagaaatggcttcaaaaggcataaaagaaagcagagagaattcaacagcatgcaagatcgagtaatgctcttagccgacagctctgaagatgaattttgaattggactgggttttaatggggatattcaacgatgctactattctaatttttattttggagcagaaaaaaaaaaggaacaacctgccacattgctgctatcaggccgttagtcctagtgtctgctgggtgctgggtagtagatttttcttgtactgagcagaaatggcatgttgtatactaaacgtatcatgcagtatttggttttattctgtagtgaattttccacaaccgtgggctacaactcataaatatgcaacatatatgtttttcagtaggagttgctacattaggcagagtaaatattttgtagttttccacagtgtcttttccttggtttgaattacctgcattgagaataatgattgttgccaccaaggcatgcttgactctgagatataaatcttaacaaagaataacttctcaagatatactctacctacttgaaaccacagggttgtgggccatggtacatactgcatttgcatcaaactagcagtaactcagaatgaaatcattttcattaagaagctctctcagcatattaggattatatgtagatttgtatgtattttgcattatgtacttcagtctcctagttttattattctcaccttccgttttattcttggcgaggaaaaaaatgcactagaaataatacattaaactgactcttagtcttaa

SEQ ID NO: 303947 - DNA, 2678 bp, Homo sapiens
tgtttccacacctactgagtcaggtgtcccctcagctgaagaagtatttggttccagccagccagagagaatatctcctgaaagtggacttgccaaggccatgttaaccattgctatcactgcgactccttctctgactgttgatgaaaaggaggaactccttacaagcactaactttcagcccattgtagaagagatcacagaaaccacaaaaggttttctgaagtatatggataatcaatcatttgcaactgaaagtcaggaaggagttggtttgggacattcaccttcatcctatgtgaatactaaggaaatgctaaccaccaatccaaagactgagaaatttgaagcagacacagaccacaggacaacttcttttcctggtgctgagtccacagcaggcagtgagcctggaagcctcacccctgataaggagaagccttcgcagatgacagctgataacacccaggctgctgccaccaagcaaccactcgaaacttccgagtacaccctgagtgttgagccagaaactgatagtctgctgggagccccagaagtcacagtgagtgtcagcacagctgttccagctgcctctgccttaagtgatgagtgggatgacaccaaattagagagtgtaagccggataaggacccccaagcttggagacaatgaagagactcaggtgagaacggagatgtctcagacagcacaagtaagccatgagggtatggaaggaggccagccttggacagaggctgcacaggtggctctggggctgcctgaaggggaaacacacacgggcacagccctgctaatagcgcatgggaatgagagatcacctgctttcactgatcaaagttcctttacccccacaagtctgatggaagacatgaaagtttccattgtgaacttgctccaaagtacgggagacttcacggaatccaccaaggaaaacgatgccctgtttttcttagaaaccactgtttctgtctctgtatatgagtctgaggcagaccaactgttgggaaatacaatgaaagacatcatcactcaagagatgacaacagctgttcaagagccagatgccactttatccatggtgacacaagagcaggttgctaccctcgagcttatcagagacagtggcaagactgaggaagaaaaggaggacccctctcctgtgtctgacgttcctggtgttactcagctgtcaagaagatgggagcctctggccactacaatttcaactacagtcgtccctttgtcttttgaagttactcccactgtggaagaacaaatggacacagtcacagggccaaatgaggagttcacaccagttctgggatctccagtgacacctcctggaataatggtgggggaacccagcatttcccctgcacttcctgctttggaggcatcctctgagagaagaactgttgttccatctattactcgtgttaatacagctgcctcatatggcctggaccaacttgaatctgaagagggacaagaagatgaggatgaagaggatgaagaagatgaagatgaagaagaggaagatgaggaagaagatgaggaagataaagatgcagactcgctggatgagggcttggatggtgacactgagctgccaggttttaccctccctggtatcacatcccaggaaccaggcttagaggagggaaacatggacctgttggagggagctacctaccaggtgccagatgccctcgagtgggaacagcagaatcaaggcctggtgagaagctggatggaaaaattaaaagacaaggctggttacatgtctgggatgctggtgcctgtaggggttgggatagctggagccttgttcatcttgggagccctctacagcattaaggttatgaatcgccgaaggagaaatggcttcaaaaggcataaaagaaagcagagagaattcaacagcatgcaagatcgagtaatgctcttagccgacagctctgaagatgaattttgaattggactgggttttaatggggatattcaacgatgctactattctaatttttattttggagcagaaaaaaaaaaggaacaacctgccacattgctgctatcaggccgttagtcctagtgtctgctgggtgctgggtagtagatttttcttgtactgagcagaaatggcatgttgtatactaaacgtatcatgcagtatttggttttattctgtagtgaattttccacaaccgtgggctacaactcataaatatgcaacatatatgtttttcagtaggagttgctacattaggcagagtaaatattttgtagttttccacagtgtcttttccttggtttgaattacctgcattgagaataatgattgttgccaccaaggcatgcttgactctgagatataaatcttaacaaagaataacttctcaagatatactctacctacttgaaaccacagggttgtgggccatggtacatactgcatttgcatcaaactagcagtaactcagaatgaaatcattttcattaagaagctctctcagcatattaggattatatgtagatttgtatgtattttgcattatgtacttcagtctcctagttttattattctcaccttccgttttattcttggcgaggaaaaaaatgcactagaaataatacattaaactgactcttagtcttaa

SEQ ID NO: 303948 - DNA, 1809 bp, Homo sapiens
tgtttccacacctactgagtcaggtgtcccctcagctgaagaagtatttggttccagccagccagagagaatatctcctgaaagtggacttgccaaggccatgttaaccattgctatcactgcgactccttctctgactgttgatgaaaaggaggaactccttacaagcactaactttcagcccattgtagaagagatcacagaaaccacaaaaggttttctgaagtatatggataatcaatcatttgcaactgaaagtcaggaaggagttggtttgggacattcaccttcatcctatgtgaatactaaggaaatgctaaccaccaatccaaagactgagaaatttgaagcagacacagaccacaggacaacttcttttcctggtgctgagtccacagcaggcagtgagcctggaagcctcacccctgataaggagaagccttcgcagatgacagctgataacacccaggctgctgccaccaagcaaccactcgaaacttccgagtacaccctgagtgttgagccagaaactgatagtctgctgggagccccagaagtcacagtgagtgtcagcacagctgttccagctgcctctgccttaagtgatgagtgggatgacaccaaattagagagtgtaagccggataaggacccccaagcttggagacaatgaagagactcaggtgagaacggagatgtctcagacagcacaagtaagccatgagggtatggaaggaggccagccttggacagaggctgcacaggtggctctggggctgcctgaaggggaaacacacacgggcacagccctgctaatagcgcatgggaatgagagatcacctgctttcactgatcaaagttcctttacccccacaagtctgatggaagacatgaaagtttccattgtgaacttgctccaaagtacgggagacttcacggaatccaccaaggaaaacgatgccctgtttttcttagaaaccactgtttctgtctctgtatatgagtctgaggcagaccaactgttgggaaatacaatgaaagacatcatcactcaagagatgacaacagctgttcaagagccagatgccactttatccatggtgacacaagagcaggttgctaccctcgagcttatcagagacagtggcaagactgaggaagaaaaggaggacccctctcctgtgtctgacgttcctggtgttactcagctgtcaagaagatgggagcctctggccactacaatttcaactacagtcgtccctttgtcttttgaagttactcccactgtggaagaacaaatggacacagtcacagggccaaatgaggagttcacaccagttctgggatctccagtgacacctcctggaataatggtgggggaacccagcatttcccctgcacttcctgctttggaggcatcctctgagagaagaactgttgttccatctattactcgtgttaatacagctgcctcatatggcctggaccaacttgaatctgaaggtattcatgctttgaaggggatcttttcaaggactggttgagtgagtcactgagcaaatgtttttgaaaaagaattaagtaggagtatattcaatctgcagtatagatcagaggacagtaaactacagctgggccaaatctggcctgccacttgtttttgaatggtttgtaagctaagaatggtttttacattttgaaatgattgaaaaaaaaagtcaaaagaagaataatattttgtgacatagaaaagttataaaaattcaaattccagtgttcataaataaagctatattggaacacaaaaata

SEQ ID NO: 303949 - DNA, 1430 bp, Homo sapiens
acggctaggtacgaggccgggtgatgcccagcactttgggaggcctagaggggcggatcacgaggtccgatcaagaccatcctggctaacgcggtgaaaccccgcctctactaaaaatacaaaaaaattagccgggcgtggtggcacgcgcctgtagtcccagctactcaggaggctgaggcatgagaatcgcttgaacccgggaggcagagattgcagtgagccgagatcgcgccactgcactcctgcctgggcaacaagagcaaaacttcgtctcaaaaaaagaaaactggctagaatgcacttcaacttaagtcctgggagctacgctaattcatggagaaccacagaggtttaataggcatttctatacctggatcagccccaaggacagtattaccctgtactgcccttcctattactattttcagtcatttactaatattgggctgtagtactttcacgtttaagctttggctattcagagctcactacgtttaatcttcagttacctgaatggtgtttaccttctggtgtggatcatcccggcttgtgttagtgctctctctttggaagaagccaggatttaagatcgagttagcctagatgtggcccagcagggtacagaaggggaaaggctgcagaaaacgggcgtattttcgtgcaaagaggtttttgcgccatttatttatggttttcaccgtcgtatgagaggactattcatgataggctgtatttgctgacagcctactttgggctcccccatgcgttgtgccgaaaccacctctttctttcctgccttcctccgcctgggctaggaagcccagagctgcggttcgcaggcctgctaagcagccggcggccggaagtctatcccgcagaagcgcagccattcacggcctcacgcaatgcgacacttccgcctgcacgagttcttccggggcggaggtcaccatggcagctgccttggctcggcttggtctgcggcctgtcaaacaggttcgggttcagttctgtcccttcgagaaaaacgtggaatcgacgaggaccttcctgcagacggtgagcagtgagaaggtccgctccactaatctcaactgctcagtgattgcggacgtgaggcatgacggctccgagccctgcgtggacgtgctgttcggagacgggcatcgcctgattatgcgcggcgctcatctcaccgctctggaaatgctcaccgccttcgcctcccacatccgggccagggacgcggcgggcagcggggacaagccgggcgctgatactggtcgctgacagcgccaaagagaccaacaagatgattttagcgtggactaggacacttaacctaagaagagtttcacttaatcattcaaatcactatctgaagggtcacggagcgcaaaataaagtttaaaaccctgctaccacaa

SEQ ID NO: 303950 - DNA, 1779 bp, Homo sapiens
  misc_feature (1441)..(1441): n is a, c, g, or t
acggctaggtacgaggccgggtgatgcccagcactttgggaggcctagaggggcggatcacgaggtccgatcaagaccatcctggctaacgcggtgaaaccccgcctctactaaaaatacaaaaaaattagccgggcgtggtggcacgcgcctgtagtcccagctactcaggaggctgaggcatgagaatcgcttgaacccgggaggcagagattgcagtgagccgagatcgcgccactgcactcctgcctgggcaacaagagcaaaacttcgtctcaaaaaaagaaaactggctagaatgcacttcaacttaagtcctgggagctacgctaattcatggagaaccacagaggtttaataggcatttctatacctggatcagccccaaggacagtattaccctgtactgcccttcctattactattttcagtcatttactaatattgggctgtagtactttcacgtttaagctttggctattcagagctcactacgtttaatcttcagttacctgaatggtgtttaccttctggtgtggatcatcccggcttgtgttagtgctctctctttggaagaagccaggatttaagatcgagttagcctagatgtggcccagcagggtacagaaggggaaaggctgcagaaaacgggcgtattttcgtgcaaagaggtttttgcgccatttatttatggttttcaccgtcgtatgagaggactattcatgataggctgtatttgctgacagcctactttgggctcccccatgcgttgtgccgaaaccacctctttctttcctgccttcctccgcctgggctaggaagcccagagctgcggttcgcaggcctgctaagcagccggcggccggaagtctatcccgcagaagcgcagccattcacggcctcacgcaatgcgacacttccgcctgcacgagttcttccggggcggaggtcaccatggcagctgccttggctcggcttggtctgcggcctgtcaaacaggttcgggttcagttctgtcccttcgagaaaaacgtggaatcgacgaggaccttcctgcagacggtgagcagtgagaaggtccgctccactaatctcaactgctcagtgattgcggacgtgaggcatgacggctccgagccctgcgtggacgtgctgttcggagacgggcatcgcctgattatgcgcggcgctcatctcaccgctctggaaatgctcaccgccttcgcctcccacatccgggccagggacgcggcgggcagcggggacaagccgggcgctgatactggtcgctgacagcgccaaagagaccaacaagatgattttagcgtggactaggacacttaacctaagaagagtttcacttaatcattcaaatcactatctgaagggtcacggagcgcaaaataaagtttaaaaccctgctaccacaaaaaaaaaaaanaaaaaaaaaaaaaaaaagaaaaacaaaaaaaacacaaaaacacaaggggggggccgcgccccccaaaaaatatcccccgccggggggggggcccccacagtcgtcgaggcggcccacacggaagttcggtgggtgagacccaagaggggcgggcccccaacaatgagggagccgggcgaataaaacaggcccgaggcacacggcgcccgcagtgatatcaacaacaagcgggcggaggtgggggaaaacccgctggctgccagccggggggacctcttggggggagagagagcgctatatcactgcggggggggagcaccactggggggcgaggcgct

SEQ ID NO: 303951 - DNA, 1462 bp, Homo sapiens
acggctaggtacgaggccgggtgatgcccagcactttgggaggcctagaggggcggatcacgaggtccgatcaagaccatcctggctaacgcggtgaaaccccgcctctactaaaaatacaaaaaaattagccgggcgtggtggcacgcgcctgtagtcccagctactcaggaggctgaggcatgagaatcgcttgaacccgggaggcagagattgcagtgagccgagatcgcgccactgcactcctgcctgggcaacaagagcaaaacttcgtctcaaaaaaagaaaactggctagaatgcacttcaacttaagtcctgggagctacgctaattcatggagaaccacagaggtttaataggcatttctatacctggatcagccccaaggacagtattaccctgtactgcccttcctattactattttcagtcatttactaatattgggctgtagtactttcacgtttaagctttggctattcagagctcactacgtttaatcttcagttacctgaatggtgtttaccttctggtgtggatcatcccggcttgtgttagtgctctctctttggaagaagccaggatttaagatcgagttagcctagatgtggcccagcagggtacagaaggggaaaggctgcagaaaacgggcgtattttcgtgcaaagaggtttttgcgccatttatttatggttttcaccgtcgtatgagaggactattcatgataggctgtatttgctgacagcctactttgggctcccccatgcgttgtgccgaaaccacctctttctttcctgccttcctccgcctgggctaggaagcccagagctgcggttcgcaggcctgctaagcagccggcggccggaagtctatcccgcagaagcgcagccattcacggcctcacgcaatgcgacacttccgcctgcacgagttcttccggggcggaggtcaccatggcagctgccttggctcggcttggtctgcggcctgtcaaacaggttcgggttcagttctgtcccttcgagaaaaacgtggaatcgacgaggaccttcctgcagacggtgagcagtgagaaggtccgctccactaatctcaactgctcagtgattgcggacgtgaggcatgacggctccgagccctgcgtggacgtgctgttcggagacgggcatcgcctgattatgcgcggcgctcatctcaccgctctggaaatgctcaccgccttcgcctcccacatccgggccagggacgcggcgggcagcggggacaagccgggcgctgatactggtcgctgacagcgccaaagagaccaacaagatgattttagcgtggactaggacacttaacctaagaagagtttcacttaatcattcaaatcactatctgaagggtcacggagcgcaaaataaagtttaaaaccctgctaccacaaatgtttctggaacaagactagatcagagaggt

SEQ ID NO: 303952 - DNA, 1317 bp, Homo sapiens
acggctaggtacgaggccgggtgatgcccagcactttgggaggcctagaggggcggatcacgaggtccgatcaagaccatcctggctaacgcggtgaaaccccgcctctactaaaaatacaaaaaaattagccgggcgtggtggcacgcgcctgtagtcccagctactcaggaggctgaggcatgagaatcgcttgaacccgggaggcagagattgcagtgagccgagatcgcgccactgcactcctgcctgggcaacaagagcaaaacttcgtctcaaaaaaagaaaactggctagaatgcacttcaacttaagtcctgggagctacgctaattcatggagaaccacagaggtttaataggcatttctatacctggatcagccccaaggacagtattaccctgtactgcccttcctattactattttcagtcatttactaatattgggctgtagtactttcacgtttaagctttggctattcagagctcactacgtttaatcttcagttacctgaatggtgtttaccttctggtgtggatcatcccggcttgtgttagtgctctctctttggaagaagccaggatttaagatcgagttagcctagatgtggcccagcagggtacagaaggggaaaggctgcagaaaacgggcgtattttcgtgcaaagaggtttttgcgccatttatttatggttttcaccgtcgtatgagaggactattcatgataggctgtatttgctgacagcctactttgggctcccccatgcgttgtgccgaaaccacctctttctttcctgccttcctccgcctgggctaggaagcccagagctgcggttcgcaggcctgctaagcagccggcggccggaagtctatcccgcagaagcgcagccattcacggcctcacgcaatgcgacacttccgcctgcacgagttcttccggggcggaggtcaccatggcagctgccttggctcggcttggtctgcggcctgtcaaacaggttcgggttcagttctgtcccttcgagaaaaacgtggaatcgacgaggagacgggcatcgcctgattatgcgcggcgctcatctcaccgctctggaaatgctcaccgccttcgcctcccacatccgggccagggacgcggcgggcagcggggacaagccgggcgctgatactggtcgctgacagcgccaaagagaccaacaagatgattttagcgtggactaggacacttaacctaagaagagtttcacttaatcattcaaatcactatctgaagggtcacggagcgcaaaataaagtttaaaaccctgctaccacaa

SEQ ID NO: 303953 - DNA, 644 bp, Homo sapiens
ccccctctagagtggagccaaaacttcaagaaggcaggggtttctgtctgctttgttctctgttgtgatcagtggctgcacacagtaggtgtttagtaaatgcctgctaactgagatggacaccttactgtcattagctcatgcagaggaggggcccaaagcagggggtgatcaaggcgggtgctaagtgcaaatcccacttctgccacctactgagtgcgtgactttggaaaggggcttttgccatcttcaagtctcagtgtccccatctgcaaaatggagatgacatcaggacctggtgtggcattaatgttcacacacagaccctccaccccgacccttctaagaattctgtatttgtgggttcagggtcatggtcccccggtgccagcagtcaccttatggaggacaaaaccagcataaaccacaaggcaaaaggttaaagaaacctgttttctgacttttcccctccaattccaggatgcccttgtgcttactccagcctccttgtggaaacccacctctcctgtctcccagtgaagacttggatggcagccatcagggaaggctgggtcccagctgggagtatgggtgtgagctctatagaccatccctctctgcaatcaataaacacttgcctgtga

SEQ ID NO: 303954 - DNA, 1678 bp, Homo sapiens
tgcaggatataaggttggacttccagacccactgcccgggagaggagaggagcgggccgaggactccagcgtgcccaggtctggcatcctgcacttgctgccctctgacacctgggaagatggccggcccgtggaccttcacccttctctgtggtttgctggcagccaccttgatccaagccaccctcagtcccactgcagttctcatcctcggcccaaaagtcatcaaagaaaagctgacacaggagctgaaggaccacaacgccaccagcatcctgcagcagctgccgctgctcagtgccatgcgggaaaagccagccggaggcatccctgtgctgggcagcctggtgaacaccgtcctgaagcacatcatctggctgaaggtcatcacagctaacatcctccagctgcaggtgaagccctcggccaatgaccaggagctgctagtcaagatccccctggacatggtggctggattcaacacgcccctggtcaagaccatcgtggagttccacatgacgactgaggcccaagccaccatccgcatggacaccagtgcaagtggccccacccgcctggtcctcagtgactgtgccaccagccatgggagcctgcgcatccaactgctgcataagctctccttcctggtgaacgccttagctaagcaggtcatgaacctcctagtgccatccctgcccaatctagtgaaaaaccagctgtgtcccgtgatcgaggcttccttcaatggcatgtatgcagacctcctgcagctggtgaaggtgcccatttccctcagcattgaccgtctggagtttgaccttctgtatcctgccatcaagggtgacaccattcagctctacctgggggccaagttgttggactcacagggaaaggtgaccaagtggttcaataactctgcagcttccctgacaatgcccaccctggacaacatcccgttcagcctcatcgtgagtcaggacgtggtgaaagctgcagtggctgctgtgctctctccagaagaattcatggtcctgttggactctgtgcttcctgagagtgcccatcggctgaagtcaagcatcgggctgatcaatgaaaaggctgcagataagctgggatctacccagatcgtgaagatcctaactcaggacactcccgagttttttatagaccaaggccatgccaaggtggcccaactgatcgtgctggaagtgtttccctccagtgaagccctccgccctttgttcaccctgggcatcgaagccagctcggaagctcagttttacaccaaaggtgaccaacttatactcaacttgaataacatcagctctgatcggatccagctgatgaactctgggattggctggttccaacctgatgttctgaaaaacatcatcactgagatcatccactccatcctgctgccgaaccagaatggcaaattaagatctggggtcccagtgtcattggtgaaggccttgggattcgaggcagctgagtcctcactgaccaaggatgcccttgtgcttactccagcctccttgtggaaacccacctctcctgtctcccagtgaagacttggatggcagccatcagggaaggctgggtcccagctgggagtatgggtgtgagctctatagaccatccctctctgcaatcaataaacacttgcctgtga

SEQ ID NO: 303955 - DNA, 682 bp, Homo sapiens
  misc_feature (631)..(631): n is a, c, g, or t
  misc_feature (666)..(666): n is a, c, g, or t
  misc_feature (681)..(681): n is a, c, g, or t
tgcaggatataaggttggacttccagacccactgcccgggagaggagaggagcgggccgaggactccagcgtgcccaggtctggcatcctgcacttgctgccctctgacacctgggaagatggccggcccgtggaccttcacccttctctgtggtttgctggcagccaccttgatccaagccaccctcagtcccactgcagttctcatcctcggcccaaaagtcatcaaagaaaagctgacacaggagctgaaggaccacaacgccaccagcatcctgcagcagctgccgctgctcagtgccatgcgggaaaagccagccggaggcatccctgtgctgggcagcctggtgaacaccgtcctgaagcacatcatctggctgaaggtcatcacagctaacatcctccagctgcaggtgaagccctcggccaatgaccaggagctgctagtcaagatccccctggacatggtggctggattcaacacgcccctggtcaagaccatcgtggagttccacatgacgactgaggcccaagccaccatccgcatggacaccagtgcaagtggccccacccgcctggtcctcagtgactgtgccaccagccatggaacttggcatcaatgtgataagtntcttctgggacgcttactacaggtatgaactctangcatcttgcaattang

SEQ ID NO: 303956 - DNA, 2206 bp, Homo sapiens
tgcaggatataaggttggacttccagacccactgcccgggagaggagaggagcgggccgaggactccagcgtgcccaggtctggcatcctgcacttgctgccctctgacacctgggaagatggccggcccgtggaccttcacccttctctgtggtttgctggcagccaccttgatccaagccaccctcagtcccactgcagttctcatcctcggcccaaaagtcatcaaagaaaagctgacacaggagctgaaggaccacaacgccaccagcatcctgcagcagctgccgctgctcagtgccatgcgggaaaagccagccggaggcatccctgtgctgggcagcctggtgaacaccgtcctgaagcacatcatctggctgaaggtcatcacagctaacatcctccagctgcaggtgaagccctcggccaatgaccaggagctgctagtcaagatccccctggacatggtggctggattcaacacgcccctggtcaagaccatcgtggagttccacatgacgactgaggcccaagccaccatccgcatggacaccagtgcaagtggccccacccgcctggtcctcagtgactgtgccaccagccatgggagcctgcgcatccaactgctgcataagctctccttcctggtgaacgccttagctaagcaggtcatgaacctcctagtgccatccctgcccaatctagtgaaaaaccagctgtgtcccgtgatcgaggcttccttcaatggcatgtatgcagacctcctgcagctggtgaaggtgcccatttccctcagcattgaccgtctggagtttgaccttctgtatcctgccatcaagggtgacaccattcagctctacctgggggccaagttgttggactcacagggaaaggtgaccaagtggttcaataactctgcagcttccctgacaatgcccaccctggacaacatcccgttcagcctcatcgtgagtcaggacgtggtgaaagctgcagtggctgctgtgctctctccagaagaattcatggtcctgttggactctgtgcttcctgagagtgcccatcggctgaagtcaagcatcgggctgatcaatgaaaaggctgcagataagctgggatctacccagatcgtgaagatcctaactcaggacactcccgagttttttatagaccaaggccatgccaaggtggcccaactgatcgtgctggaagtgtttccctccagtgaagccctccgccctttgttcaccctgggcatcgaagccagctcggaagctcagttttacaccaaaggtgaccaacttatactcaacttgaataacatcagctctgatcggatccagctgatgaactctgggattggctggttccaacctgatgttctgaaaaacatcatcactgagatcatccactccatcctgctgccgaaccagaatggcaaattaagatctggggtcccagtgtcattggtgaaggccttgggattcgaggcagctgagtcctcactgaccaaggatgcccttgtgcttactccagcctccttgtggaaacccacctctcctgtctcccagtgaagacttggatggcagccatcagggaaggctgggtcccagctgggagtatgggtgtgagctctatagaccatccctctctgcaatcaataaacacttgcctgtgaaataaaaaaaaaaaaaaaaaaaaaaaaaaaaaaacaaaaaaaaaaaaaaaaaaaaaaaaaaagagagaggggggggcgcgccacaaaaagatcccccgcgggggggccccaaattagcgagcgccccccacgattttgctgcgacaaagaggggcgcccccaaaaagaggagcacgcgaatatataaaacaacgaagcagcggaggcgccgcgataaagacaaagcagcgcggagtgcaggacaacaactggtcgacgcggggacactatgcggagaacagaacacaccacaacggagagggaggggggaacaacaacaagtgggcgccaacacaatccgcccacaggagagaaaatataagagcgcacccgacgaggggccaacaataacaaacgttgcgacaagggacgatacaggcgcggtgaaaacacacacgcgacgaatactattggcgcggcggcgacgaacaaaagaatgtgctcgccaacaggcgagaatcacctagagagacacaatatattacacgc

SEQ ID NO: 303957 - DNA, 1863 bp, Homo sapiens
tgcaggatataaggttggacttccagacccactgcccgggagaggagaggagcgggccgaggactccagcgtgcccaggtctggcatcctgcacttgctgccctctgacacctgggaagatggccggcccgtggaccttcacccttctctgtggtttgctggcagccaccttgatccaagccaccctcagtcccactgcagttctcatcctcggcccaaaagtcatcaaagaaaagctgacacaggagctgaaggaccacaacgccaccagcatcctgcagcagctgccgctgctcagtgccatgcgggaaaagccagccggaggcatccctgtgctgggcagcctggtgaacaccgtcctgaagcacatcatctggctgaaggtcatcacagctaacatcctccagctgcaggtgaagccctcggccaatgaccaggagctgctagtcaagatccccctggacatggtggctggattcaacacgcccctggtcaagaccatcgtggagttccacatgacgactgaggcccaagccaccatccgcatggacaccagtgcaagtggccccacccgcctggtcctcagtgactgtgccaccagccatgggagcctgcgcatccaactgctgcataagctctccttcctggtgaacgccttagctaagcaggtcatgaacctcctagtgccatccctgcccaatctagtgaaaaaccagctgtgtcccgtgatcgaggcttccttcaatggcatgtatgcagacctcctgcagctggtgaaggtgcccatttccctcagcattgaccgtctggagtttgaccttctgtatcctgccatcaagggtgacaccattcagctctacctgggggccaagttgttggactcacagggaaaggtgaccaagtggttcaataactctgcagcttccctgacaatgcccaccctggacaacatcccgttcagcctcatcgtgagtcaggacgtggtgaaagctgcagtggctgctgtgctctctccagaagaattcatggtcctgttggactctgtgcttcctgagagtgcccatcggctgaagtcaagcatcgggctgatcaatgaaaaggctgcagataagctgggatctacccagatcgtgaagatcctaactcaggacactcccgagttttttatagaccaaggccatgccaaggtggcccaactgatcgtgctggaagtgtttccctccagtgaagccctccgccctttgttcaccctgggcatcgaagccagctcggaagctcagttttacaccaaaggtgaccaacttatactcaacttgaataacatcagctctgatcggatccagctgatgaactctgggattggctggttccaacctgatgttctgaaaaacatcatcactgagatcatccactccatcctgctgccgaaccagaatggcaaattaagatctggggtcccagtgtcattggtgaaggccttgggattcgaggcagctgagtcctcactgaccaaggcaagccatgcttctgagtgcttgaggccaccgaaatgaacaaatggaaaacactcccatctttttcaagcctaccttttagcagaagaggcagatacacaagccctaaagatgtaacatcaggctgagtggaggaaggctgagaagaaaaataaagcaggctcaggaggagagagtgatgtcaggatgcccttgtgcttactccagcctccttgtggaaacccacctctcctgtctcccagtgaagacttggatggcagccatcagggaaggctgggtcccagctgggagtatgggtgtgagctctatagaccatccctctctgcaatcaataaacacttgcctgtga

SEQ ID NO: 303958 - DNA, 1430 bp, Homo sapiens
tgcaggatataaggttggacttccagacccactgcccgggagaggagaggagcgggccgaggactccagcgtgcccaggtctggcatcctgcacttgctgccctctgacacctgggaagatggccggcccgtggaccttcacccttctctgtggtttgctggcagccaccttgatccaagccaccctcagtcccactgcagttctcatcctcggcccaaaagtcatcaaagaaaagctgacacaggagctgaaggaccacaacgccaccagcatcctgcagcagctgccgctgctcagtgccatgcgggaaaagccagccggaggcatccctgtgctgggcagcctggtgaacaccgtcctgaagcacatcatctggctgaaggtcatcacagctaacatcctccagctgcaggtgaagccctcggccaatgaccaggagctgctagtcaagatccccctggacatggtggctggattcaacacgcccctggtcaagaccatcgtggagttccacatgacgactgaggcccaagccaccatccgcatggacaccagtgcaagtggccccacccgcctggtcctcagtgactgtgccaccagccatgggagcctgcgcatccaactgctgcataagctctccttcctggtgaacgccttagctaagcaggtcatgaacctcctagtgccatccctgcccaatctagtgaaaaaccagctgtgtcccgtgatcgaggcttccttcaatggcatgtatgcagacctcctgcagctggtgaaggtgcccatttccctcagcattgaccgtctggagtttgaccttctgtatcctgccatcaagggtgacaccattcagctctacctgggggccaagttgttggactcacagggaaaggtgaccaagtggttcaataactctgcagcttccctgacaatgcccaccctggacaacatcccgttcagcctcatcgtgagtcaggacgtggtgaaagctgcagtggctgctgtgctctctccagaagaattcatggtcctgttggactctgtgcttcctgagagtgcccatcggctgaagtcaagcatcgggctgatcaatgaaaaggctgcagataagctgggatctacccagatcgtgaagatcctaactcaggacactcccgagttttttatagaccaaggccatgccaaggtggcccaactgatcgtgctggaagtgtttccctccagtgaagccctccgccctttgttcaccctgggcatcgaagccagctcggaagctcagttttacaccaaaggtgaccaacttatactcaacttgaataacatcagctctgatcggatccagctgatgaactctgggattggctggttccaacctgatgttctgaaagcatcatcaaggaggctcacaaggaggctcacaagctgggcc

SEQ ID NO: 303959 - DNA, 937 bp, Homo sapiens
cctccaccctcacagaactttcttcttgtccttgagcagtgcccatttccctcagcattgaccgtctggagtttgaccttctgtatcctgccatcaagggtgacaccattcagctctacctgggggccaagttgttggactcacagggaaaggtgaccaagtggttcaataactctgcagcttccctgacaatgcccaccctggacaacatcccgttcagcctcatcgtgagtcaggacgtggtgaaagctgcagtggctgctgtgctctctccagaagaattcatggtcctgttggactctgtgcttcctgagagtgcccatcggctgaagtcaagcatcgggctgatcaatgaaaaggctgcagataagctgggatctacccagatcgtgaagatcctaactcaggacactcccgagttttttatagaccaaggccatgccaaggtggcccaactgatcgtgctggaagtgtttccctccagtgaagccctccgccctttgttcaccctgggcatcgaagccagctcggaagctcagttttacaccaaaggtgaccaacttatactcaacttgaataacatcagctctgatcggatccagctgatgaactctgggattggctggttccaacctgatgttctgaaaaacatcatcactgagatcatccactccatcctgctgccgaaccagaatggcaaattaagatctggggtcccagtgtcattggtgaaggccttgggattcgaggcagctgagtcctcactgaccaaggatgcccttgtgcttactccagcctccttgtggaaacccacctctcctgtctcccagtgaagacttggatggcagccatcagggaaggctgggtcccagctgggagtatgggtgtgagctctatagaccatccctctctgcaatcaataaacacttgcctgtga

SEQ ID NO: 303960 - DNA, 1637 bp, Homo sapiens
tgcaggatataaggttggacttccagacccactgcccgggagaggagaggagcgggccgaggactccagcgtgcccagatggccggcccgtggaccttcacccttctctgtggtttgctggcagccaccttgatccaagccaccctcagtcccactgcagttctcatcctcggcccaaaagtcatcaaagaaaagctgacacaggagctgaaggaccacaacgccaccagcatcctgcagcagctgccgctgctcagtgccatgcgggaaaagccagccggaggcatccctgtgctgggcagcctggtgaacaccgtcctgaagcacatcatctggctgaaggtcatcacagctaacatcctccagctgcaggtgaagccctcggccaatgaccaggagctgctagtcaagatccccctggacatggtggctggattcaacacgcccctggtcaagaccatcgtggagttccacatgacgactgaggcccaagccaccatccgcatggacaccagtgcaagtggccccacccgcctggtcctcagtgactgtgccaccagccatgggagcctgcgcatccaactgctgcataagctctccttcctggtgaacgccttagctaagcaggtcatgaacctcctagtgccatccctgcccaatctagtgaaaaaccagctgtgtcccgtgatcgaggcttccttcaatggcatgtatgcagacctcctgcagctggtgaaggtgcccatttccctcagcattgaccgtctggagtttgaccttctgtatcctgccatcaagggtgacaccattcagctctacctgggggccaagttgttggactcacagggaaaggtgaccaagtggttcaataactctgcagcttccctgacaatgcccaccctggacaacatcccgttcagcctcatcgtgagtcaggacgtggtgaaagctgcagtggctgctgtgctctctccagaagaattcatggtcctgttggactctgtgcttcctgagagtgcccatcggctgaagtcaagcatcgggctgatcaatgaaaaggctgcagataagctgggatctacccagatcgtgaagatcctaactcaggacactcccgagttttttatagaccaaggccatgccaaggtggcccaactgatcgtgctggaagtgtttccctccagtgaagccctccgccctttgttcaccctgggcatcgaagccagctcggaagctcagttttacaccaaaggtgaccaacttatactcaacttgaataacatcagctctgatcggatccagctgatgaactctgggattggctggttccaacctgatgttctgaaaaacatcatcactgagatcatccactccatcctgctgccgaaccagaatggcaaattaagatctggggtcccagtgtcattggtgaaggccttgggattcgaggcagctgagtcctcactgaccaaggatgcccttgtgcttactccagcctccttgtggaaacccacctctcctgtctcccagtgaagacttggatggcagccatcagggaaggctgggtcccagctgggagtatgggtgtgagctctatagaccatccctctctgcaatcaataaacacttgcctgtga

SEQ ID NO: 303961 - DNA, 1591 bp, Homo sapiens
tgcaggatataaggttggacttccagacccactgcccgggagaggagaggagcgggccgaggactccagcgtgcccaggtctggcatcctgcacttgctgccctctgacacctgggaagatggccggcccgtggaccttcacccttctctgtggtttgctggcagccaccttgatccaagccaccctcagtcccactgcagttctcatcctcggcccaaaagtcatcaaagaaaagctgacacaggagctgaaggaccacaacgccaccagcatcctgcagcagctgccgctgctcagtgccatgcgggaaaagccagccggaggcatccctgtgctgggcagcctggtgaacaccgtcctgaagcacatcatctggctgaaggtcatcacagctaacatcctccagctgcaggtgaagccctcggccaatgaccaggagctgctagtcaagatccccctggacatggtggctggattcaacacccgcctggtcctcagtgactgtgccaccagccatgggagcctgcgcatccaactgctgcataagctctccttcctggtgaacgccttagctaagcaggtcatgaacctcctagtgccatccctgcccaatctagtgaaaaaccagctgtgtcccgtgatcgaggcttccttcaatggcatgtatgcagacctcctgcagctggtgaaggtgcccatttccctcagcattgaccgtctggagtttgaccttctgtatcctgccatcaagggtgacaccattcagctctacctgggggccaagttgttggactcacagggaaaggtgaccaagtggttcaataactctgcagcttccctgacaatgcccaccctggacaacatcccgttcagcctcatcgtgagtcaggacgtggtgaaagctgcagtggctgctgtgctctctccagaagaattcatggtcctgttggactctgtgcttcctgagagtgcccatcggctgaagtcaagcatcgggctgatcaatgaaaaggctgcagataagctgggatctacccagatcgtgaagatcctaactcaggacactcccgagttttttatagaccaaggccatgccaaggtggcccaactgatcgtgctggaagtgtttccctccagtgaagccctccgccctttgttcaccctgggcatcgaagccagctcggaagctcagttttacaccaaaggtgaccaacttatactcaacttgaataacatcagctctgatcggatccagctgatgaactctgggattggctggttccaacctgatgttctgaaaaacatcatcactgagatcatccactccatcctgctgccgaaccagaatggcaaattaagatctggggtcccagtgtcattggtgaaggccttgggattcgaggcagctgagtcctcactgaccaaggatgcccttgtgcttactccagcctccttgtggaaacccacctctcctgtctcccagtgaagacttggatggcagccatcagggaaggctgggtcccagctgggagtatgggtgtgagctctatagaccatccctctctgcaatcaataaacacttgcctgtga

SEQ ID NO: 303962 - DNA, 1807 bp, Homo sapiens
cccggagataaaaccgccggcgccggcgccgccagtccctctggctgagacctcggctccggaatcactgcagcccccctcgccctgagccagagcaccccgggtcccgccagcccctcacactcccagcaaaatgggcaaggagaagacccacatcaacatcgtggtcatcggccacgtggactccggaaagtccaccaccacgggccacctcatctacaaatgcggaggtattgacaaaaggaccattgagaagttcgagaaggaggcggctgagatggggaagggatccttcaagtatgcctgggtgctggacaagctgaaggcggagcgtgagcgcggcatcaccatcgacatctccctctggaagttcgagaccaccaagtactacatcaccatcatcgatgcccccggccaccgcgacttcatcaagaacatgatcacgggtacatcccaggcggactgcgcagtgctgatcgtggcggcgggcgtgggcgagttcgaggcgggcatctccaagaatgggcagacgcgggagcatgccctgctggcctacacgctgggtgtgaagcagctcatcgtgggcgtgaacaaaatggactccacagagccggcctacagcgagaagcgctacgacgagatcgtcaaggaagtcagcgcctacatcaagaagatcggctacaacccggccaccgtgccctttgtgcccatctccggctggcacggtgacaacatgctggagccctcccccaacatgccgtggttcaagggctggaaggtggagcgtaaggagggcaacgcaagcggcgtgtccctgctggaggccctggacaccatcctgccccccacgcgccccacggacaagcccctgcgcctgccgctgcaggacgtgtacaagattggcggcattggcacggtgcccgtgggccgggtggagaccggcatcctgcggccgggcatggtggtgacctttgcgccagtgaacatcaccactgaggtgaagtcagtggagatgcaccacgaggctctgagcgaagctctgcccggcgacaacgtcggcttcaatgtgaagaacgtgtcggtgaaggacatccggcggggcaacgtgtgtggggacagcaagtctgacccgccgcaggaggctgctcagttcacctcccaggtcatcatcctgaaccacccggggcagattagcgccggctactccccggtcatcgactgccacacagcccacatcgcctgcaagtttgcggagctgaaggagaagattgaccggcgctctggcaagaagctggaggacaaccccaagtccctgaagtctggagacgcggccatcgtggagatggtgccgggaaagcccatgtgtgtggagagcttctcccagtacccgcctctcggccgcttcgccgtgcgcgacatgaggcagacggtggccgtaggcgtcatcaagaacgtggagaagaagagcggcggcgccggcaaggtcaccaagtcggcgcagaaggcgcagaaggcgggcaagtgaagcgcgggcgcccgcggcgcgaccctccccggcggcgccgcgctccgaaccccggcccggcccccgccccgcccccgccccgcgcgccgctccggcgccccgcacccccgccaggcgcatgtctgcacctccgcttgccagaggccctcggtcagcgactggatgctcgccatcaaggtccagtggaagttcttcaagaggaaaggcgcccccgccccaggcttccgcgcccagcgctcgccacgctcagtgcccgttttaccaataaactgagcgacccca

SEQ ID NO: 303963 - DNA, 239 bp, Homo sapiens
cgactggatgctcgccatcaaggtccagtggaagttcttcaagaggaaaggcgcccccgcacccccgccaggcgcatgtctgcacctccgcttgccagaggccctcggtcagcgactggatgctcgccatcaaggtccagtggaagttcttcaagaggaaaggcgcccccgccccaggcttccgcgcccagcgctcgccacgctcagtgcccgttttaccaataaactgagcgacccca

SEQ ID NO: 303964 - DNA, 519 bp, Homo sapiens
cccgttaatttacataacgggcggggtatctgaacatatcggccgtgcttctcagcggactgcgcagtgctgatcgtggcggcgggcgtgggcgagttcgaggcgggcatctccaagaatgggcagacgcgggagcatgccctgctggcctacacgctgggtgtgaagcagctcatcgtgggcgtgaacaaaatggactccacagagccggcctacagcgagaagcgctacgacgagatcgtcaaggaagtcagcgcctgctttaatgaatcggaatgaagggaaaaggaagagaaaggaacagaaatacgagaaggagaacaagacgacaaaaaatgctaggagacactccaccaagaagactagcaagagaaacaaaggagaaaaaaggggaaaacaataagaagaaggaaaaaaaagaacacaagaagaagacactagatagagagacccctgaaacaaacaatacaaagcacaaaaaaagagacacgaagaaaaaacaatagagacacgcagaaa

SEQ ID NO: 303965 - DNA, 2437 bp, Homo sapiens
ctccttcccttactctaccttgctcctacttttctctaagtcaacatgagtcgacagtttagttccaggtctgggtaccgaagtggagggggcttcagctctggctctgctgggatcatcaactaccagcgcaggaccaccagcagctccacacgccgcagtggaggaggtggtgggagattttcaagctgtggtggtggtggtggtagctttggtgctggtggtggatttggaagtcggagtcttgttaaccttggtggcagtaaaagcatctccataagtgtggctagaggaggtggacgtggtagtggctttggtggtggttatggtggtggtggctttggtggtggtggctttggtggtggtggctttggtggaggtggcattgggggtggtggctttggtggttttggcagtggtggtggtggttttggtggaggtggctttgggggtggtggatatgggggtggttatggtcctgtctgccctcctggtggcatacaagaagtcactatcaaccagagccttcttcagcccctcaatgtggagattgaccctgagatccaaaaggtgaagtctcgagaaagggagcaaatcaagtcactcaacaaccaatttgcctccttcattgacaaggtgaggttcctggagcagcagaaccaggtactgcaaacaaaatgggagctgctgcagcaggtagatacctccactagaacccataatttagagccctactttgagtcattcatcaacaatctccgaaggagagtggaccaactgaagagtgatcaatctcggttggattcggaactgaagaacatgcaggacatggtggaggattaccggaacaagtatgaggatgaaatcaacaagcggacaaatgcagagaatgaatttgtgaccatcaagaaggatgtggatggtgcttatatgaccaaggtggaccttcaggccaaacttgacaacttgcagcaggaaattgatttccttacagcactctaccaagcagagttgtctcagatgcagactcaaatcagtgaaactaatgtcatcctctctatggacaacaaccgcagtctcgacctggacagcatcattgctgaggtcaaggcccagtacgaggatatagcccagaagagcaaagctgaggccgagtccttgtaccagagcaagtatgaagagctgcagatcactgctggcagacatggggatagtgtgagaaattcaaagatagaaatttctgagctgaatcgtgtgatccagagacttagatctgaaatcgacaatgtcaagaagcagatctccaacttgcagcagtccatcagtgatgcagagcagcgtggcgagaatgccctcaaggatgccaagaacaagctgaatgacctggaggatgccctgcagcaggccaaggaagacctggcccgcctgctgcgtgactaccaggagctgatgaacaccaagctggccctggatctggagattgccacctacaggaccctcctggagggagaagaaagcaggatgtctggagaatgtgccccgaacgtgagtgtgtctgtgagcacaagccacaccaccatcagtggaggtggcagccgaggaggtggcggcggtggctacggctctggaggtagcagctatggctccggaggtggtagctatggttctggaggtggcggcggcggcggccgtggcagctatggctccggaggtagcagctacggctccggaggtggcagctatggctctggaggtggcggcggcggccatggcagctacggctccggaagcagcagtgggggctacagaggtggctctggaggcggcggcggcggcagctctggcggccggggctctggcggcgggagctctggaggctccataggaggccggggatccagctctgggggtgtcaagtcctctggtggcagttccagcgtgaagtttgtttctaccacttattccggagtaaccagataaagagatgccctctgtttcattagctctagttctcccccagcatcactaacaaatatgcttggcaagaccgaggtcgatttgtcccagccttaccggagaaaagagctatggttagttacactagctcatcctattcccccagctctttcttttctgctgtttcccaatgaagttttcagatcagtggcaatctcagtcccctggctatgaccctgctttgttctttccctgagaaacagttcagcagtgaccaccacccacatgacatttcaaagcacctccttaagccagccagagtaggaccagttagacccagggtgtggacagctccttagcatcttatctctgtgctgttttggttttgtacataaggtgtaagcaagttgtttttcttttgtggagaggtcttaaactccccatttccttgttttgctgcaataaactgcatttgaaattc

SEQ ID NO: 303966 - DNA, 2416 bp, Homo sapiens
ctccttcccttactctaccttgctcctacttttctctaagtcaacatgagtcgacagtttagttccaggtctgggtaccgaagtggagggggcttcagctctggctctgctgggatcatcaactaccagcgcaggaccaccagcagctccacacgccgcagtggaggaggtggtgggagattttcaagctgtggtggtggtggtggtagctttggtgctggtggtggatttggaagtcggagtcttgttaaccttggtggcagtaaaagcatctccataagtgtggctagaggaggtggacgtggtagtggctttggtggtggttatggtggtggtggctttggtggtggtggctttggtggtggtggctttggtggaggtggcattgggggtggtggctttggtggttttggcagtggtggtggtggttttggtggaggtggctttgggggtggtggatatgggggtggttatggtcctgtctgccctcctggtggcatacaagaagtcactatcaaccagagccttcttcagcccctcaatgtggagattgaccctgagatccaaaaggtgaagtctcgagaaagggagcaaatcaagtcactcaacaaccaatttgcctccttcattgacaaggtgaggttcctggagcagcagaaccaggtactgcaaacaaaatgggagctgctgcagcaggtagatacctccactagaacccataatttagagccctactttgagtcattcatcaacaatctccgaaggagagtggaccaactgaagagtgatcaatctcggttggattcggaactgaagaacatgcaggacatggtggaggattaccggaacaagtatgaggatgaaatcaacaagcggacaaatgcagagaatgaatttgtgaccatcaagaaggatgtggatggtgcttatatgaccaaggtggaccttcaggccaaacttgacaacttgcagcaggaaattgatttccttacagcactctaccaagcagagttgtctcagatgcagactcaaatcagtgaaactaatgtcatcctctctatggacaacaaccgcagtctcgacctggacagcatcattgctgaggtcaaggcccagtacgaggatatagcccagaagagcaaagctgaggccgagtccttgtaccagagcaagtatgaagagctgcagatcactgctggcagacatggggatagtgtgagaaattcaaagatagaaatttctgagctgaatcgtgtgatccagagacttagatctgaaatcgacaatgtcaagaagcagatctccaacttgcagcagtccatcagtgatgcagagcagcgtggcgagaatgccctcaaggatgccaagaacaagctgaatgacctggaggatgccctgcagcaggccaaggaagacctggcccgcctgctgcgtgactaccaggagctgatgaacaccaagctggccctggatctggagattgccacctacaggaccctcctggagggagaagaaagcaggatgtctggagaatgtgccccgaacgtgagtgtgtctgtgagcacaagccacaccaccatcagtggaggtggcagccgaggaggtggcggcggtggctacggctctggaggtagcagctatggctccggaggtggtagctatggttctggaggtggcggcggcggcggccgtggcagctatggctccggaggtggcagctatggctctggaggtggcggcggcggccatggcagctacggctccggaagcagcagtgggggctacagaggtggctctggaggcggcggcggcggcagctctggcggccggggctctggcggcgggagctctggaggctccataggaggccggggatccagctctgggggtgtcaagtcctctggtggcagttccagcgtgaagtttgtttctaccacttattccggagtaaccagataaagagatgccctctgtttcattagctctagttctcccccagcatcactaacaaatatgcttggcaagaccgaggtcgatttgtcccagccttaccggagaaaagagctatggttagttacactagctcatcctattcccccagctctttcttttctgctgtttcccaatgaagttttcagatcagtggcaatctcagtcccctggctatgaccctgctttgttctttccctgagaaacagttcagcagtgaccaccacccacatgacatttcaaagcacctccttaagccagccagagtaggaccagttagacccagggtgtggacagctccttagcatcttatctctgtgctgttttggttttgtacataaggtgtaagcaagttgtttttcttttgtggagaggtcttaaactccccatttccttgttttgctgcaataaactgcatttgaaattc

SEQ ID NO: 303967 - DNA, 1308 bp, Homo sapiens
ctccttcccttactctaccttgctcctacttttctctaagtcaacatgagtcgacagtttagttccaggtctgggtaccgaagtggagggggcttcagctctggctctgctgggatcatcaactaccagcgcaggaccaccagcagctccacacgccgcagtggaggaggtggtgggagattttcaagctgtggtggtggtggtggtagctttggtgctggtggtggatttggaagtcggagtcttgttaaccttggtggcagtaaaagcatctccataagtgtggctagaggaggtggacgtggtagtggctttggtggtggttatggtggtggtggctttggtggtggtggctttggtggtggtggctttggtggaggtggcattgggggtggtggctttggtggttttggcagtggtggtggtggttttggtggaggtggctttgggggtggtggatatgggggtggttatggtcctgtctgccctcctggtggcatacaagaagtcactatcaaccagagccttcttcagcccctcaatgtggagattgaccctgagatccaaaaggtgaagtctcgagaaagggagcaaatcaagtcactcaacaaccaatttgcctccttcattgacaaggtgaggttcctggagcagcagaaccaggtactgcaaacaaaatgggagctgctgcagcaggtagatacctccactagaacccataatttagagccctactttgagtcattcatcaacaatctccgaaggagagtggaccaactgaagagtgatcaatctcggttggattcggaactgaagaacatgcaggacatggtggaggattaccggaacaagtatgcacggctgaaatcacaacacacgacggacaacatgcacgcagacatgacattcgggaccatcaagacggatgtgcgatggtgcgttatatgaccaaggtgggcaccttcagagccacaactaggaccaacttagccagcagggacactcggagtaaccaataaacagacacctcatacccaaggacagcagtaggatctacaagaatggcagacctccacaatcaagtcgcacactaaacgaggtacaataccagcatacgaatagggaacgaacaaagcgccggaagagcaccgacaccagggaacacgacatgacaataggcatggaaggagtcaaaagaggacccaagaatacagacggcacaactcaggccccacgaacacaagagcacacagctgaagagacccggagagccaccaggaaccgcacagcaggcaaacgaatatgaca

SEQ ID NO: 303968 - DNA, 925 bp, Homo sapiens
tttgtactcttgctgagaaaaaatgacaggatgtctggagaatgtgccccgaacgtgagtgtgtctgtgagcacaagccacaccaccatcagtggaggtggcagccgaggaggtggcggcggtggctacggctctggaggtagcagctatggctccggaggtggtagctatggttctggaggtggcggcggcggcggccgtggcagctatggctccggaggtggcagctatggctctggaggtggcggcggcggccatggcagctacggctccggaagcagcagtgggggctacagaggtggctctggaggcggcggcggcggcagctctggcggccggggctctggcggcgggagctctggaggctccataggaggccggggatccagctctgggggtgtcaagtcctctggtggcagttccagcgtgaagtttgtttctaccacttattccggagtaaccagataaagagatgccctctgtttcattagctctagttctcccccagcatcactaacaaatatgcttggcaagaccgaggtcgatttgtcccagccttaccggagaaaagagctatggttagttacactagctcatcctattcccccagctctttcttttctgctgtttcccaatgaagttttcagatcagtggcaatctcagtcccctggctatgaccctgctttgttctttccctgagaaacagttcagcagtgaccaccacccacatgacatttcaaagcacctccttaagccagccagagtaggaccagttagacccagggtgtggacagctccttagcatcttatctctgtgctgttttggttttgtacataaggtgtaagcaagttgtttttcttttgtggagaggtcttaaactccccatttccttgttttgctgcaataaactgcatttgaaattc

SEQ ID NO: 303969 - DNA, 6371 bp, Homo sapiens
aggttgttcctgaggtgggaggcggtacccgtggctgagaagaaggaggcctgagagcgacatgtccccggcggctcaggcggagcggcccgtggcgctgtttttctgagtccggggtggcctggcagccggccgaggacgagggtcggcgggggctgcccccgtggtggtggccgccatgctgggagcctgggcggttgagggaaccgctgtggcgctcctgcgactgctgctgctgctgctgccgccggcgatccggggacccgggctcggcgtggccggcgtggccggcgcggcgggggccgggctgcccgagagcgtcatttgggcggtcaacgcgggtggagaggcgcatgtggacgtgcacgggatccacttccgcaaggaccctttggaaggccgggtgggccgagcctcagactatggcatgaaactgccaatcctgcgttccaaccctgaggaccagatcctgtatcaaactgagcggtacaatgaggagacctttggctacgaagtgcccatcaaagaggagggggactacgtgctggtcttgaaatttgcagaggtctactttgcacagtcccagcaaaaggtatttgatgtacgattgaatggccacgtcgtggtgaaggacttggatatctttgatcgtgttgggcatagcacagctcacgatgaaattatacctatgagcatcagaaaggggaagctgagtgtccagggggaggtgtccaccttcacagggaaactctacattgagtttgtcaaggggtactatgacaatcccaaggtctgtgcactctacatcatggctgggacagtggatgatgtaccaaagcttcagcctcatccgggattggagaagaaagaagaggaagaagaagaagaagaatatgatgaagggtctaatctcaaaaaacagaccaataagaaccgggtgcagtcaggcccccgcacacccaacccctatgcctcggacaacagcagcctcatgtttcccatcctggtggccttcggagtcttcattccaaccctcttctgcctctgccggttgtgagaacaaatgactatcctgaacagggtggaggggtgtgggaaagaaaccagccatattggttttggtttctgtatttttcacaatgattaatgaacaaaaacaaagagaaaaaaacacacatcaattaaaggagacaaaaagaggcagagcgagtagagagcagccctcattcaccacctggtcccagacgtgcttcagtcctcgtcctctctttgtggctggctcccagccttctctttcctcttgaggatacttagggtaaactggatccttcctgctcaaggatcctcatttgtatacctagtggaaaggactctgaactcagaggagtcactgttcctttttttaggttagaaattaacagcagggaaatgccatcttattacctgagacgaccagcactgggagttaggtacggtctgaagttatgtctagataagacttcagacgtcctgggattgaaagaatgtgtgtgaaggggtagaatttgtgcggtaaagacttaaaaaaaaaagtagggagattaaaaaaaaagaaagaaaatgcttccttatctggaagcctttctggattaatccagtgatggtcccacctttagtgtttgagctttgtcattgcttgtctccctggcatgtgccagttatagactgtccagcatccaagacgtttcggttatgtcgggtcctcagatcgcctctgacttgttaccacaacaaatcattttgatttcagtgcctgttggggacttgatttcttctcagttttgtttgtttgtttgtttccttaatctggctcatttgaaatttcttctccctctcaaccatcccactaagttatagccaagaagggaaggagacacggggatttggggttctctgcttgaatgtcttctcctttaccacctcaccttgttggtacctccctccctggatctctgagccagcagccaggaggacctgacccagcagttctttactggcccctttgtagggccttgctgccagggggcagggatgctttccagcctgcagcaacagaacacttgaccttaaaagtctcttctggtctttggattagaaaaggcttatgttagcatagcttaagagcaacctcagagacttgagccctactaagtgactgaccactgtttagagtgtctggtatctgatgttcatttattcccatgttcttgtgtgtcacagttcagccagttttggtttatgcctagagctacttcaaggaactagactaattagctatataggcccagcgatgcttcttattgatcttaatagtatgcccctccttcccctgtcctttcatttctctatccaagtagcagtcaggttcttggtgtgatgggactgaaagaattccagtcagccagagccttggcagctctgaagctaaccttagcatctaagtgtcgatcttgaattccctgaaaaaatttctataggaaatgaagcttccctggtcccctcctttctggccattgtcatccatttcccagttagggcaacaatgaaggaggacccagccaagctagaaggaattttgtggatgggagacagcaggattagcttcagcttgggctggagcagtcaatataggatctcaggccaggcccgcttttctagaatgtgtttaattttgagtttgctttattagatatgttttttaagagctctgtatatttgaactgctccttatgtgacaaaataggtagctcttgggctcatgtcctgggttttggctctttaatgattactccaggccagcatttagtcgtttgagaattgtagcctgttgttttcgctgtgacttgggtctcagtgctagggtattgagtcaggcagctggagggttgtggcccgaggctgcagtcagaggtatacttcccatagtgcttcacacagctcccctgcttctaaaggataaggtactgtagccttggtcctggggaccacctgcctggggcagtggacatcctaactaaacaggcttctggcagtagctttggttcctatcccatcgaaattccccaaagccctgggccactgccattgggttagtcaagatgaaggaggaggactggctgcctccattttgccttgtttgttagtttgcctgggtctgtctgaggaaggagggggtcccgccttccacctcaacacatcccttcagtgactcagagtctcagaaggaaaccctgactcctggggccatttcctaatggtactgtaagccaagcagctttgcttctgcctctgtttccaagcccacccttttcccctgagctcagggttagggatgggcgctttcctctctggttgtgaacgaaaggaaggaacatctttctatggctaacaaaaactaaaggggaagtgaggaaacaggaagaagtatggtgggggctggggtagactcccctggagccaagcctatccagctaacaagagctccctggggctggtcacagctggctcatgatgctgaacttgaaagtttttttgtttttgtttttgttttgtggctcctccaagatataggtacatgaagtttaggttaaaggggtgggattctttatttttatttttgtattgtatgtgtcaagaattactctgttgttcaccttttgctttttgcactgtttgttctcttatctgtattttgagcttagtgctaggactgagaggctgcaccatagggaatgtatgggagatggtgaggggtgccagtgaggggtgcgtggaggagaggcctgggctcctctactggatctacactctgtcccaggtttttagatcccactgagcccagctgactgaaaacaaggacagtcagggtgaaacttcttttgccagaagtgtggcctgagttgaatttctgggaggatgacgcagatgtctgctgcagagctgggctgagagttctgcagtctagctctgacttaggtcaggggcctgttggtctctcattggacgtttttgggtctcactcatgcttactgaaacattgtgccaagaaactctgtgggatttgtgtcccttaaaccagactcacttttctgaaaaatctccattgttgaggagaggctgctcaatcgacaccccgagttctcatgactgggaagatagttttcttcaggtgtcaatggcgttagactcccaggaagactagccctgcccacagggccacctgttggtttgagagcgtgttcgtgttctcttgccctccctgcctaagagctactgggatcacgttagcgggcatttaggctttgatgagagggcacagtttgagttaggtttacctccccctttctgtgcctgggaactgtttggtccagctttagaactgtggttttgacttccttatctcttgggagaagcttctgttttaaggaatttctcttccttcttctcctgcctctagcctctcctggaaaggcctggatatggtttctaaaatctcagctgagaacttcagaaaacagcagcagtattttccttttcctagtgctaaaatccctttccctagaaattggctcaccttgggaaacccagggaaagaatcagcaggttctctgccctccctaggggttggggaaggacccaccccggtcagcacagtgccttttcctctcctgctctgagccagggtggggcattccctctagattcaggtttgggcaggggtcctatagtccctgccatggggctgcttccctgtcccttccctcccctttgctggcctactctggcataattcaagtgtcttcttgccttggggatccttagtggcatcaaatggcaacatggaatattgtcctccatgcccctccagaaggacctaggagagtaggtgagctttccaaagtgagagacgaatctttctttctttttttttttaaagggcaggatgggtatgctttgggctttctccttctgtggccccggaggaaggagagactgaggcaaggcaaagtgatagtacactgaagcagaaccggaaacacccaggaactgttcagaaatctcagaagaaatctgcttctcttcgatggaaagatataattaacgatcaaagagctctaagaaaattgcaaagaagccttaatgttcaagctttagaaagatcagagcaatttttctctttcagtccaaactaagactctctgtatttaaatctctctggggcaagagggctagatttcctcattttgttatgagactagattggtaccagtagatcagctgcctagcgagggcaggtttcttctttgcatctgtgtggcttgcttccagtctggcctgtcctttccagctgccttttgtctagcctgctatggggggccagattatcttgataagagcaggtgatttggggactagctgggttggcaggaaaagagcaggatggatctcttgggacaggttcccccaggagtataaacacaaggagccaggattgtgctggcagccaaggaaacagtagtgcctgtttgagttggcagagagggccttggcacctcttgcatccaggcagtcttgtgagatgggggcacatagcactggggaaagcagaactccattctcacctctattttgagcttcagtgctttatttcagtatgaggaaaaacaacaacaaactgaagtgcgctttccgtcctttcaaaggacaactgtcgggaagggagagccgagttgcgaggtaggaggggagcactggcagggagagacattcttgactcctctcttccctggtgtgttgtgatccagggaatgaaaagaaatttgaccctggattggttctctccttggacttaaggaatcttaccttttccttccacaaagttctcccaggcaaggaccagctgcccattctgagcccagggcagcctcttcaaccattattggtctaacctggcttgtcaggaaaccaagcccacccttccacattgggcctggctgctctattctgtaccaagtactggagaaaaagcatcaagttcttagcccttgtagcttctaccctagtttcccatcctctctctgtggaggccaaaccaactctttgccagcagccacaacatgcattgacagcggcacagtgagatataactgatgggctttgaacctggttggccggggaagctgtaggggtggatagagctggctttccttctgggctgtctccatctgaccctaccccttccatgtcccaccccactcccaccaaaaagtacaaaatcaggatgtttttcactgtccattgctttgtgttttaataaacaatttgcagtgaca

SEQ ID NO: 303970 - DNA, 6771 bp, Homo sapiens
aggttgttcctgaggtgggaggcggtacccgtggctgagaagaaggaggcctgagagcgacatgtccccggcggctcaggcggagcggcccgtggcgctgtttttctgagtccggggtggcctggcagccggccgaggacgagggtcggcgggggctgcccccgtggtggtggccgccatgctgggagcctgggcggttgagggaaccgctgtggcgctcctgcgactgctgctgctgctgctgccgccggcgatccggggacccgggctcggcgtggccggcgtggccggcgcggcgggggccgggctgcccgagagcgtcatttgggcggtcaacgcgggtggagaggcgcatgtggacgtgcacgggatccacttccgcaaggaccctttggaaggccgggtgggccgagcctcagactatggcatgaaactgccaatcctgcgttccaaccctgaggaccagatcctgtatcaaactgagcggtacaatgaggagacctttggctacgaagtgcccatcaaagaggagggggactacgtgctggtcttgaaatttgcagaggtctactttgcacagtcccagcaaaaggtatttgatgtacgattgaatggccacgtcgtggtgaaggacttggatatctttgatcgtgttgggcatagcacagctcacgatgaaattatacctatgagcatcagaaaggggaagctgagtgtccagggggaggtgtccaccttcacagggaaactctacattgagtttgtcaaggggtactatgacaatcccaaggtctgtgcactctacatcatggctgggacagtggatgatgtaccaaagcttcagcctcatccgggattggagaagaaagaagaggaagaagaagaagaagaatatgatgaagggtctaatctcaaaaaacagaccaataagaaccgggtgcagtcaggcccccgcacacccaacccctatgcctcggacaacagcagcctcatgtttcccatcctggtggccttcggagtcttcattccaaccctcttctgcctctgccggttgtgagaacaaatgactatcctgaacagggtggaggggtgtgggaaagaaaccagccatattggttttggtttctgtatttttcacaatgattaatgaacaaaaacaaagagaaaaaaacacacatcaattaaaggagacaaaaagaggcagagcgagtagagagcagccctcattcaccacctggtcccagacgtgcttcagtcctcgtcctctctttgtggctggctcccagccttctctttcctcttgaggatacttagggtaaactggatccttcctgctcaaggatcctcatttgtatacctagtggaaaggactctgaactcagaggagtcactgttcctttttttaggttagaaattaacagcagggaaatgccatcttattacctgagacgaccagcactgggagttaggtacggtctgaagttatgtctagataagacttcagacgtcctgggattgaaagaatgtgtgtgaaggggtagaatttgtgcggtaaagacttaaaaaaaaaagtagggagattaaaaaaaaagaaagaaaatgcttccttatctggaagcctttctggattaatccagtgatggtcccacctttagtgtttgagctttgtcattgcttgtctccctggcatgtgccagttatagactgtccagcatccaagacgtttcggttatgtcgggtcctcagatcgcctctgacttgttaccacaacaaatcattttgatttcagtgcctgttggggacttgatttcttctcagttttgtttgtttgtttgtttccttaatctggctcatttgaaatttcttctccctctcaaccatcccactaagttatagccaagaagggaaggagacacggggatttggggttctctgcttgaatgtcttctcctttaccacctcaccttgttggtacctccctccctggatctctgagccagcagccaggaggacctgacccagcagttctttactggcccctttgtagggccttgctgccagggggcagggatgctttccagcctgcagcaacagaacacttgaccttaaaagtctcttctggtctttggattagaaaaggcttatgttagcatagcttaagagcaacctcagagacttgagccctactaagtgactgaccactgtttagagtgtctggtatctgatgttcatttattcccatgttcttgtgtgtcacagttcagccagttttggtttatgcctagagctacttcaaggaactagactaattagctatataggcccagcgatgcttcttattgatcttaatagtatgcccctccttcccctgtcctttcatttctctatccaagtagcagtcaggttcttggtgtgatgggactgaaagaattccagtcagccagagccttggcagctctgaagctaaccttagcatctaagtgtcgatcttgaattccctgaaaaaatttctataggaaatgaagcttccctggtcccctcctttctggccattgtcatccatttcccagttagggcaacaatgaaggaggacccagccaagctagaaggaattttgtggatgggagacagcaggattagcttcagcttgggctggagcagtcaatataggatctcaggccaggcccgcttttctagaatgtgtttaattttgagtttgctttattagatatgttttttaagagctctgtatatttgaactgctccttatgtgacaaaataggtagctcttgggctcatgtcctgggttttggctctttaatgattactccaggccagcatttagtcgtttgagaattgtagcctgttgttttcgctgtgacttgggtctcagtgctagggtattgagtcaggcagctggagggttgtggcccgaggctgcagtcagaggtatacttcccatagtgcttcacacagctcccctgcttctaaaggataaggtactgtagccttggtcctggggaccacctgcctggggcagtggacatcctaactaaacaggcttctggcagtagctttggttcctatcccatcgaaattccccaaagccctgggccactgccattgggttagtcaagatgaaggaggaggactggctgcctccattttgccttgtttgttagtttgcctgggtctgtctgaggaaggagggggtcccgccttccacctcaacacatcccttcagtgactcagagtctcagaaggaaaccctgactcctggggccatttcctaatggtactgtaagccaagcagctttgcttctgcctctgtttccaagcccacccttttcccctgagctcagggttagggatgggcgctttcctctctggttgtgaacgaaaggaaggaacatctttctatggctaacaaaaactaaaggggaagtgaggaaacaggaagaagtatggtgggggctggggtagactcccctggagccaagcctatccagctaacaagagctccctggggctggtcacagctggctcatgatgctgaacttgaaagtttttttgtttttgtttttgttttgtggctcctccaagatataggtacatgaagtttaggttaaaggggtgggattctttatttttatttttgtattgtatgtgtcaagaattactctgttgttcaccttttgctttttgcactgtttgttctcttatctgtattttgagcttagtgctaggactgagaggctgcaccatagggaatgtatgggagatggtgaggggtgccagtgaggggtgcgtggaggagaggcctgggctcctctactggatctacactctgtcccaggtttttagatcccactgagcccagctgactgaaaacaaggacagtcagggtgaaacttcttttgccagaagtgtggcctgagttgaatttctgggaggatgacgcagatgtctgctgcagagctgggctgagagttctgcagtctagctctgacttaggtcaggggcctgttggtctctcattggacgtttttgggtctcactcatgcttactgaaacattgtgccaagaaactctgtgggatttgtgtcccttaaaccagactcacttttctgaaaaatctccattgttgaggagaggctgctcaatcgacaccccgagttctcatgactgggaagatagttttcttcaggtgtcaatggcgttagactcccaggaagactagccctgcccacagggccacctgttggtttgagagcgtgttcgtgttctcttgccctccctgcctaagagctactgggatcacgttagcgggcatttaggctttgatgagagggcacagtttgagttaggtttacctccccctttctgtgcctgggaactgtttggtccagctttagaactgtggttttgacttccttatctcttgggagaagcttctgttttaaggaatttctcttccttcttctcctgcctctagcctctcctggaaaggcctggatatggtttctaaaatctcagctgagaacttcagaaaacagcagcagtattttccttttcctagtgctaaaatccctttccctagaaattggctcaccttgggaaacccagggaaagaatcagcaggttctctgccctccctaggggttggggaaggacccaccccggtcagcacagtgccttttcctctcctgctctgagccagggtggggcattccctctagattcaggtttgggcaggggtcctatagtccctgccatggggctgcttccctgtcccttccctcccctttgctggcctactctggcataattcaagtgtcttcttgccttggggatccttagtggcatcaaatggcaacatggaatattgtcctccatgcccctccagaaggacctaggagagtaggtgagctttccaaagtgagagacgaatctttctttctttttttttttaaagggcaggatgggtatgctttgggctttctccttctgtggccccggaggaaggagagactgaggcaaggcaaagtgatagtacactgaagcagaaccggaaacacccaggaactgttcagaaatctcagaagaaatctgcttctcttcgatggaaagatataattaacgatcaaagagctctaagaaaattgcaaagaagccttaatgttcaagctttagaaagatcagagcaatttttctctttcagtccaaactaagactctctgtatttaaatctctctggggcaagagggctagatttcctcattttgttatgagactagattggtaccagtagatcagctgcctagcgagggcaggtttcttctttgcatctgtgtggcttgcttccagtctggcctgtcctttccagctgccttttgtctagcctgctatggggggccagattatcttgataagagcaggtgatttggggactagctgggttggcaggaaaagagcaggatggatctcttgggacaggttcccccaggagtataaacacaaggagccaggattgtgctggcagccaaggaaacagtagtgcctgtttgagttggcagagagggccttggcacctcttgcatccaggcagtcttgtgagatgggggcacatagcactggggaaagcagaactccattctcacctctattttgagcttcagtgctttatttcagtatgaggaaaaacaacaacaaactgaagtgcgctttccgtcctttcaaaggacaactgtcgggaagggagagccgagttgcgaggtaggaggggagcactggcagggagagacattcttgactcctctcttccctggtgtgttgtgatccagggaatgaaaagaaatttgaccctggattggttctctccttggacttaaggaatcttaccttttccttccacaaagttctcccaggcaaggaccagctgcccattctgagcccagggcagcctcttcaaccattattggtctaacctggcttgtcaggaaaccaagcccacccttccacattgggcctggctgctctattctgtaccaagtactggagaaaaagcatcaagttcttagcccttgtagcttctaccctagtttcccatcctctctctgtggaggccaaaccaactctttgccagcagccacaacatgcattgacagcggcacagtgagatataactgatgggctttgaacctggttggccggggaagctgtaggggtggatagagctggctttccttctgggctgtctccatctgaccctaccccttccatgtcccaccccactcccaccaaaaagtacaaaatcaggatgtttttcactgtccattgctttgtgttttaataaacaatttgcagtgacaaaaaaaaaaaaaaaaaaaaaaaaaaaaaaaaaaaaaaaaaaaaaaaaaaaaaaaaaaaaaaaaaaaaaaaaaaaaaaaaaaaaacacgacaaaaaaacgtaggtcgggccgcggcaggcgatcaagacagaagataaacgtaaagagagggcagcgcagcagcaaaccactatgatagactgaggaggaggtcgaggacaaggtgaaacggacaagacgacggagagaagagcgagacggggggaaaacacaaaaaacagaagagcgcgagaggggaagaccggtgagagagaacaacgcacggcaggtgggaagaggcagaggagcggagcacagagagaggagaggagaggaagctaattaacagcgggcggcggggataaggacgacgagggggggc

SEQ ID NO: 303971 - DNA, 7231 bp, Homo sapiens
aggttgttcctgaggtgggaggcggtacccgtggctgagaagaaggaggcctgagagcgacatgtccccggcggctcaggcggagcggcccgtggcgctgtttttctgagtccggggtggcctggcagccggccgaggacgagggtcggcgggggctgcccccgtggtggtggccgccatgctgggagcctgggcggttgagggaaccgctgtggcgctcctgcgactgctgctgctgctgctgccgccggcgatccggggacccgggctcggcgtggccggcgtggccggcgcggcgggggccgggctgcccgagagcgtcatttgggcggtcaacgcgggtggagaggcgcatgtggacgtgcacgggatccacttccgcaaggaccctttggaaggccgggtgggccgagcctcagactatggcatgaaactgccaatcctgcgttccaaccctgaggaccagatcctgtatcaaactgagcggtacaatgaggagacctttggctacgaagtgcccatcaaagaggagggggactacgtgctggtcttgaaatttgcagaggtctactttgcacagtcccagcaaaaggtatttgatgtacgattgaatggccacgtcgtggtgaaggacttggatatctttgatcgtgttgggcatagcacagctcacgatgaaattatacctatgagcatcagaaaggggaagctgagtgtccagggggaggtgtccaccttcacagggaaactctacattgagtttgtcaaggggtactatgacaatcccaaggtctgtgcactctacatcatggctgggacagtggatgatgtaccaaagcttcagcctcatccgggattggagaagaaagaagaggaagaagaagaagaagaatatgatgaagggtctaatctcaaaaaacagaccaataagaaccgggtgcagtcaggcccccgcacacccaacccctatgcctcggacaacagcagcctcatgtttcccatcctggtggccttcggagtcttcattccaaccctcttctgcctctgccggttgtgagaacaaatgactatcctgaacagggtggaggggtgtgggaaagaaaccagccatattggttttggtttctgtatttttcacaatgattaatgaacaaaaacaaagagaaaaaaacacacatcaattaaaggagacaaaaagaggcagagcgagtagagagcagccctcattcaccacctggtcccagacgtgcttcagtcctcgtcctctctttgtggctggctcccagccttctctttcctcttgaggatacttagggtaaactggatccttcctgctcaaggatcctcatttgtatacctagtggaaaggactctgaactcagaggagtcactgttcctttttttaggttagaaattaacagcagggaaatgccatcttattacctgagacgaccagcactgggagttaggtacggtctgaagttatgtctagataagacttcagacgtcctgggattgaaagaatgtgtgtgaaggggtagaatttgtgcggtaaagacttaaaaaaaaaagtagggagattaaaaaaaaagaaagaaaatgcttccttatctggaagcctttctggattaatccagtgatggtcccacctttagtgtttgagctttgtcattgcttgtctccctggcatgtgccagttatagactgtccagcatccaagacgtttcggttatgtcgggtcctcagatcgcctctgacttgttaccacaacaaatcattttgatttcagtgcctgttggggacttgatttcttctcagttttgtttgtttgtttgtttccttaatctggctcatttgaaatttcttctccctctcaaccatcccactaagttatagccaagaagggaaggagacacggggatttggggttctctgcttgaatgtcttctcctttaccacctcaccttgttggtacctccctccctggatctctgagccagcagccaggaggacctgacccagcagttctttactggcccctttgtagggccttgctgccagggggcagggatgctttccagcctgcagcaacagaacacttgaccttaaaagtctcttctggtctttggattagaaaaggcttatgttagcatagcttaagagcaacctcagagacttgagccctactaagtgactgaccactgtttagagtgtctggtatctgatgttcatttattcccatgttcttgtgtgtcacagttcagccagttttggtttatgcctagagctacttcaaggaactagactaattagctatataggcccagcgatgcttcttattgatcttaatagtatgcccctccttcccctgtcctttcatttctctatccaagtagcagtcaggttcttggtgtgatgggactgaaagaattccagtcagccagagccttggcagctctgaagctaaccttagcatctaagtgtcgatcttgaattccctgaaaaaatttctataggaaatgaagcttccctggtcccctcctttctggccattgtcatccatttcccagttagggcaacaatgaaggaggacccagccaagctagaaggaattttgtggatgggagacagcaggattagcttcagcttgggctggagcagtcaatataggatctcaggccaggcccgcttttctagaatgtgtttaattttgagtttgctttattagatatgttttttaagagctctgtatatttgaactgctccttatgtgacaaaataggtagctcttgggctcatgtcctgggttttggctctttaatgattactccaggccagcatttagtcgtttgagaattgtagcctgttgttttcgctgtgacttgggtctcagtgctagggtattgagtcaggcagctggagggttgtggcccgaggctgcagtcagaggtatacttcccatagtgcttcacacagctcccctgcttctaaaggataaggtactgtagccttggtcctggggaccacctgcctggggcagtggacatcctaactaaacaggcttctggcagtagctttggttcctatcccatcgaaattccccaaagccctgggccactgccattgggttagtcaagatgaaggaggaggactggctgcctccattttgccttgtttgttagtttgcctgggtctgtctgaggaaggagggggtcccgccttccacctcaacacatcccttcagtgactcagagtctcagaaggaaaccctgactcctggggccatttcctaatggtactgtaagccaagcagctttgcttctgcctctgtttccaagcccacccttttcccctgagctcagggttagggatgggcgctttcctctctggttgtgaacgaaaggaaggaacatctttctatggctaacaaaaactaaaggggaagtgaggaaacaggaagaagtatggtgggggctggggtagactcccctggagccaagcctatccagctaacaagagctccctggggctggtcacagctggctcatgatgctgaacttgaaagtttttttgtttttgtttttgttttgtggctcctccaagatataggtacatgaagtttaggttaaaggggtgggattctttatttttatttttgtattgtatgtgtcaagaattactctgttgttcaccttttgctttttgcactgtttgttctcttatctgtattttgagcttagtgctaggactgagaggctgcaccatagggaatgtatgggagatggtgaggggtgccagtgaggggtgcgtggaggagaggcctgggctcctctactggatctacactctgtcccaggtttttagatcccactgagcccagctgactgaaaacaaggacagtcagggtgaaacttcttttgccagaagtgtggcctgagttgaatttctgggaggatgacgcagatgtctgctgcagagctgggctgagagttctgcagtctagctctgacttaggtcaggggcctgttggtctctcattggacgtttttgggtctcactcatgcttactgaaacattgtgccaagaaactctgtgggatttgtgtcccttaaaccagactcacttttctgaaaaatctccattgttgaggagaggctgctcaatcgacaccccgagttctcatgactgggaagatagttttcttcaggtgtcaatggcgttagactcccaggaagactagccctgcccacagggccacctgttggtttgagagcgtgttcgtgttctcttgccctccctgcctaagagctactgggatcacgttagcgggcatttaggctttgatgagagggcacagtttgagttaggtttacctccccctttctgtgcctgggaactgtttggtccagctttagaactgtggttttgacttccttatctcttgggagaagcttctgttttaaggaatttctcttccttcttctcctgcctctagcctctcctggaaaggcctggatatggtttctaaaatctcagctgagaacttcagaaaacagcagcagtattttccttttcctagtgctaaaatccctttccctagaaattggctcaccttgggaaacccagggaaagaatcagcaggttctctgccctccctaggggttggggaaggacccaccccggtcagcacagtgccttttcctctcctgctctgagccagggtggggcattccctctagattcaggtttgggcaggggtcctatagtccctgccatggggctgcttccctgtcccttccctcccctttgctggcctactctggcataattcaagtgtcttcttgccttggggatccttagtggcatcaaatggcaacatggaatattgtcctccatgcccctccagaaggacctaggagagtaggtgagctttccaaagtgagagacgaatctttctttctttttttttttaaagggcaggatgggtatgctttgggctttctccttctgtggccccggaggaaggagagactgaggcaaggcaaagtgatagtacactgaagcagaaccggaaacacccaggaactgttcagaaatctcagaagaaatctgcttctcttcgatggaaagatataattaacgatcaaagagctctaagaaaattgcaaagaagccttaatgttcaagctttagaaagatcagagcaatttttctctttcagtccaaactaagactctctgtatttaaatctctctggggcaagagggctagatttcctcattttgttatgagactagattggtaccagtagatcagctgcctagcgagggcaggtttcttctttgcatctgtgtggcttgcttccagtctggcctgtcctttccagctgccttttgtctagcctgctatggggggccagattatcttgataagagcaggtgatttggggactagctgggttggcaggaaaagagcaggatggatctcttgggacaggttcccccaggagtataaacacaaggagccaggattgtgctggcagccaaggaaacagtagtgcctgtttgagttggcagagagggccttggcacctcttgcatccaggcagtcttgtgagatgggggcacatagcactggggaaagcagaactccattctcacctctattttgagcttcagtgctttatttcagtatgaggaaaaacaacaacaaactgaagtgcgctttccgtcctttcaaaggacaactgtcgggaagggagagccgagttgcgaggtaggaggggagcactggcagggagagacattcttgactcctctcttccctggtgtgttgtgatccagggaatgaaaagaaatttgaccctggattggttctctccttggacttaaggaatcttaccttttccttccacaaagttctcccaggcaaggaccagctgcccattctgagcccagggcagcctcttcaaccattattggtctaacctggcttgtcaggaaaccaagcccacccttccacattgggcctggctgctctattctgtaccaagtactggagaaaaagcatcaagttcttagcccttgtagcttctaccctagtttcccatcctctctctgtggaggccaaaccaactctttgccagcagccacaacatgcattgacagcggcacagtgagatataactgatgggctttgaacctggttggccggggaagctgtaggggtggatagagctttttctccagtacttggtacagaatagagcagccaggcccaatgtggaagggtgggcttggtttcctgacaagccaggttagaccaataatggttgaagaggctgccctgggctcagaatgggcagctggtccttgcctgggagaactttgtggaaggaaaaggtaagattccttaagtccaaggagagaaccaatccagggtcaaatttcttttcattccctggatcacaacacaccagggaagagaggagtcaagaatgtctctccctgccagtgctcccctcctacctcgcaactcggctctcccttcccgacagttgtcctttgaaaggacggaaagcgcacttcagtttgttgttgtttttcctcatactgaaataaagcactgaagctcaaaatagaggtgagaatggagttctgctttccccagtgctatgtgcccccatctcacaagactgcctggatgcaagaggtgccaaggccctctctgccaactcaaacaggcactactgtttccttggctgccagcacaatcctggctccttgtgtttatactcctgggggaacctgtcccaagagatccatcctgctcttttcctgccaacccagctagtccccaaatcacctgctcttatcaagataatctggccccccatagcaggctagacaaaggcagctggaaaggacaggccagactggaagcaagccacacagatgcaagaagaaacctgccctcgctaggcagctgatctactggtaccaatctagtctcataacaaaatgaggaaatctagccctcttgccccagagagatttaaatacagagagtcttagtttggactgaaagagaaaaattgctctgatctttctaaagcttgaacattaaggcttctttgcaattttcttagagctctttgatcgttaattatatctttccatcgaagagaagcagatttcttctgagatttctgaacagttcctgggtgtttccg

SEQ ID NO: 303972 - DNA, 6317 bp, Homo sapiens
aggttgttcctgaggtgggaggcggtacccgtggctgagaagaaggaggcctgagagcgacatgtccccggcggctcaggcggagcggcccgtggcgctgtttttctgagtccggggtggcctggcagccggccgaggacgagggtcggcgggggctgcccccgtggtggtggccgccatgctgggagcctgggcggttgagggaaccgctgtggcgctcctgcgactgctgctgctgctgctgccgccggcgatccggggacccgggctcggcgtggccggcgtggccggcgcggcgggggccgggctgcccgagagcgtcatttgggcggtcaacgcgggtggagaggcgcatgtggacgtgcacgggatccacttccgcaaggaccctttggaaggccgggtgggccgagcctcagactatggcatgaaactgccaatcctgcgttccaaccctgaggaccagatcctgtatcaaactgagcggtacaatgaggagacctttggctacgaagtgcccatcaaagaggagggggactacgtgctggtcttgaaatttgcagaggtctactttgcacagtcccagcaaaaggtatttgatgtacgattgaatggccacgtcgtggtgaaggacttggatatctttgatcgtgttgggcatagcacagctcacgatgaaattatacctatgagcatcagaaaggggaagctgagtgtccagggggaggtgtccaccttcacagggaaactctacattgagtttgtcaaggggtactatgacaatcccaaggtctgtgcactctacatcatggctgggacagtggatgatgtaccaaagcttcagcctcatccgggattggagaagaaagaagaggaagaagaagaagaagaatatgatgaagggtctaatctcaaaaaacagaccaataagaaccgggtgcagtcaggcccccgcacacccaacccctatgcctcggacaacagcagcctcatgtttcccatcctggtggccttcggagtcttcattccaaccctcttctgcctctgccggttgtgagaacaaatgactatcctgaacagggtggaggggtgtgggaaagaaaccagccatattggttttggtttctgtatttttcacaatgattaatgaacaaaaacaaagagaaaaaaacacacatcaattaaaggagacaaaaagaggcagagcgagtagagagcagccctcattcaccacctggtcccagacgtgcttcagtcctcgtcctctctttgtggctggctcccagccttctctttcctcttgaggatacttagggtaaactggatccttcctgctcaaggatcctcatttgtatacctagtggaaaggactctgaactcagaggagtcactgttcctttttttaggttagaaattaacagcagggaaatgccatcttattacctgagacgaccagcactgggagttaggtacggtctgaagttatgtctagataagacttcagacgtcctgggattgaaagaatgtgtgtgaaggggtagaatttgtgcggtaaagacttaaaaaaaaaagtagggagattaaaaaaaaagaaagaaaatgcttccttatctggaagcctttctggattaatccagtgatggtcccacctttagtgtttgagctttgtcattgcttgtctccctggcatgtgccagttatagactgtccagcatccaagacgtttcggttatgtcgggtcctcagatcgcctctgacttgttaccacaacaaatcattttgatttcagtgcctgttggggacttgatttcttctcagttttgtttgtttgtttgtttccttaatctggctcatttgaaatttcttctccctctcaaccatcccactaagttatagccaagaagggaaggagacacggggatttggggttctctgcttgaatgtcttctcctttaccacctcaccttgttggtacctccctccctggatctctgagccagcagccaggaggacctgacccagcagttctttactggcccctttgtagggccttgctgccagggggcagggatgctttccagcctgcagcaacagaacacttgaccttaaaagtctcttctggtctttggattagaaatgactgaccactgtttagagtgtctggtatctgatgttcatttattcccatgttcttgtgtgtcacagttcagccagttttggtttatgcctagagctacttcaaggaactagactaattagctatataggcccagcgatgcttcttattgatcttaatagtatgcccctccttcccctgtcctttcatttctctatccaagtagcagtcaggttcttggtgtgatgggactgaaagaattccagtcagccagagccttggcagctctgaagctaaccttagcatctaagtgtcgatcttgaattccctgaaaaaatttctataggaaatgaagcttccctggtcccctcctttctggccattgtcatccatttcccagttagggcaacaatgaaggaggacccagccaagctagaaggaattttgtggatgggagacagcaggattagcttcagcttgggctggagcagtcaatataggatctcaggccaggcccgcttttctagaatgtgtttaattttgagtttgctttattagatatgttttttaagagctctgtatatttgaactgctccttatgtgacaaaataggtagctcttgggctcatgtcctgggttttggctctttaatgattactccaggccagcatttagtcgtttgagaattgtagcctgttgttttcgctgtgacttgggtctcagtgctagggtattgagtcaggcagctggagggttgtggcccgaggctgcagtcagaggtatacttcccatagtgcttcacacagctcccctgcttctaaaggataaggtactgtagccttggtcctggggaccacctgcctggggcagtggacatcctaactaaacaggcttctggcagtagctttggttcctatcccatcgaaattccccaaagccctgggccactgccattgggttagtcaagatgaaggaggaggactggctgcctccattttgccttgtttgttagtttgcctgggtctgtctgaggaaggagggggtcccgccttccacctcaacacatcccttcagtgactcagagtctcagaaggaaaccctgactcctggggccatttcctaatggtactgtaagccaagcagctttgcttctgcctctgtttccaagcccacccttttcccctgagctcagggttagggatgggcgctttcctctctggttgtgaacgaaaggaaggaacatctttctatggctaacaaaaactaaaggggaagtgaggaaacaggaagaagtatggtgggggctggggtagactcccctggagccaagcctatccagctaacaagagctccctggggctggtcacagctggctcatgatgctgaacttgaaagtttttttgtttttgtttttgttttgtggctcctccaagatataggtacatgaagtttaggttaaaggggtgggattctttatttttatttttgtattgtatgtgtcaagaattactctgttgttcaccttttgctttttgcactgtttgttctcttatctgtattttgagcttagtgctaggactgagaggctgcaccatagggaatgtatgggagatggtgaggggtgccagtgaggggtgcgtggaggagaggcctgggctcctctactggatctacactctgtcccaggtttttagatcccactgagcccagctgactgaaaacaaggacagtcagggtgaaacttcttttgccagaagtgtggcctgagttgaatttctgggaggatgacgcagatgtctgctgcagagctgggctgagagttctgcagtctagctctgacttaggtcaggggcctgttggtctctcattggacgtttttgggtctcactcatgcttactgaaacattgtgccaagaaactctgtgggatttgtgtcccttaaaccagactcacttttctgaaaaatctccattgttgaggagaggctgctcaatcgacaccccgagttctcatgactgggaagatagttttcttcaggtgtcaatggcgttagactcccaggaagactagccctgcccacagggccacctgttggtttgagagcgtgttcgtgttctcttgccctccctgcctaagagctactgggatcacgttagcgggcatttaggctttgatgagagggcacagtttgagttaggtttacctccccctttctgtgcctgggaactgtttggtccagctttagaactgtggttttgacttccttatctcttgggagaagcttctgttttaaggaatttctcttccttcttctcctgcctctagcctctcctggaaaggcctggatatggtttctaaaatctcagctgagaacttcagaaaacagcagcagtattttccttttcctagtgctaaaatccctttccctagaaattggctcaccttgggaaacccagggaaagaatcagcaggttctctgccctccctaggggttggggaaggacccaccccggtcagcacagtgccttttcctctcctgctctgagccagggtggggcattccctctagattcaggtttgggcaggggtcctatagtccctgccatggggctgcttccctgtcccttccctcccctttgctggcctactctggcataattcaagtgtcttcttgccttggggatccttagtggcatcaaatggcaacatggaatattgtcctccatgcccctccagaaggacctaggagagtaggtgagctttccaaagtgagagacgaatctttctttctttttttttttaaagggcaggatgggtatgctttgggctttctccttctgtggccccggaggaaggagagactgaggcaaggcaaagtgatagtacactgaagcagaaccggaaacacccaggaactgttcagaaatctcagaagaaatctgcttctcttcgatggaaagatataattaacgatcaaagagctctaagaaaattgcaaagaagccttaatgttcaagctttagaaagatcagagcaatttttctctttcagtccaaactaagactctctgtatttaaatctctctggggcaagagggctagatttcctcattttgttatgagactagattggtaccagtagatcagctgcctagcgagggcaggtttcttctttgcatctgtgtggcttgcttccagtctggcctgtcctttccagctgccttttgtctagcctgctatggggggccagattatcttgataagagcaggtgatttggggactagctgggttggcaggaaaagagcaggatggatctcttgggacaggttcccccaggagtataaacacaaggagccaggattgtgctggcagccaaggaaacagtagtgcctgtttgagttggcagagagggccttggcacctcttgcatccaggcagtcttgtgagatgggggcacatagcactggggaaagcagaactccattctcacctctattttgagcttcagtgctttatttcagtatgaggaaaaacaacaacaaactgaagtgcgctttccgtcctttcaaaggacaactgtcgggaagggagagccgagttgcgaggtaggaggggagcactggcagggagagacattcttgactcctctcttccctggtgtgttgtgatccagggaatgaaaagaaatttgaccctggattggttctctccttggacttaaggaatcttaccttttccttccacaaagttctcccaggcaaggaccagctgcccattctgagcccagggcagcctcttcaaccattattggtctaacctggcttgtcaggaaaccaagcccacccttccacattgggcctggctgctctattctgtaccaagtactggagaaaaagcatcaagttcttagcccttgtagcttctaccctagtttcccatcctctctctgtggaggccaaaccaactctttgccagcagccacaacatgcattgacagcggcacagtgagatataactgatgggctttgaacctggttggccggggaagctgtaggggtggatagagctggctttccttctgggctgtctccatctgaccctaccccttccatgtcccaccccactcccaccaaaaagtacaaaatcaggatgtttttcactgtccattgctttgtgttttaataaacaatttgcagtgaca

SEQ ID NO: 303973 - DNA, 7176 bp, Homo sapiens
aggttgttcctgaggtgggaggcggtacccgtggctgagaagaaggaggcctgagagcgacatgtccccggcggctcaggcggagcggcccgtggcgctgtttttctgagtccggggtggcctggcagccggccgaggacgagggtcggcgggggctgcccccgtggtggtggccgccatgctgggagcctgggcggttgagggaaccgctgtggcgctcctgcgactgctgctgctgctgctgccgccggcgatccggggacccgggctcggcgtggccggcgtggccggcgcggcgggggccgggctgcccgagagcgtcatttgggcggtcaacgcgggtggagaggcgcatgtggacgtgcacgggatccacttccgcaaggaccctttggaaggccgggtgggccgagcctcagactatggcatgaaactgccaatcctgcgttccaaccctgaggaccagatcctgtatcaaactgagcggtacaatgaggagacctttggctacgaagtgcccatcaaagaggagggggactacgtgctggtcttgaaatttgcagaggtctactttgcacagtcccagcaaaaggtatttgatgtacgattgaatggccacgtcgtggtgaaggacttggatatctttgatcgtgttgggcatagcacagctcacgatgaaattatacctatgagcatcagaaaggggaagctgagtgtccagggggaggtgtccaccttcacagggaaactctacattgagtttgtcaaggggtactatgacaatcccaaggtctgtgcactctacatcatggctgggacagtggatgatgtaccaaagcttcagcctcatccgggattggagaagaaagaagaggaagaagaagaagaagaatatgatgaagggtctaatctcaaaaaacagaccaataagaaccgggtgcagtcaggcccccgcacacccaacccctatgcctcggacaacagcagcctcatgtttcccatcctggtggccttcggagtcttcattccaaccctcttctgcctctgccggttgtgagaacaaatgactatcctgaacagggtggaggggtgtgggaaagaaaccagccatattggttttggtttctgtatttttcacaatgattaatgaacaaaaacaaagagaaaaaaacacacatcaattaaaggagacaaaaagaggcagagcgagtagagagcagccctcattcaccacctggtcccagacgtgcttcagtcctcgtcctctctttgtggctggctcccagccttctctttcctcttgaggatacttagggtaaactggatccttcctgctcaaggatcctcatttgtatacctagtggaaaggactctgaactcagaggagtcactgttcctttttttaggttagaaattaacagcagggaaatgccatcttattacctgagacgaccagcactgggagttaggtacggtctgaagttatgtctagataagacttcagacgtcctgggattgaaagaatgtgtgtgaaggggtagaatttgtgcggtaaagacttaaaaaaaaaagtagggagattaaaaaaaaagaaagaaaatgcttccttatctggaagcctttctggattaatccagtgatggtcccacctttagtgtttgagctttgtcattgcttgtctccctggcatgtgccagttatagactgtccagcatccaagacgtttcggttatgtcgggtcctcagatcgcctctgacttgttaccacaacaaatcattttgatttcagtgcctgttggggacttgatttcttctcagttttgtttgtttgtttgtttccttaatctggctcatttgaaatttcttctccctctcaaccatcccactaagttatagccaagaagggaaggagacacggggatttggggttctctgcttgaatgtcttctcctttaccacctcaccttgttggtacctccctccctggatctctgagccagcagccaggaggacctgacccagcagttctttactggcccctttgtagggccttgctgccagggggcagggatgctttccagcctgcagcaacagaacacttgaccttaaaagtctcttctggtctttggattagaaaaggcttatgttagcatagcttaagagcaacctcagagacttgagccctactaagtgactgaccactgtttagagtgtctggtatctgatgttcatttattcccatgttcttgtgtgtcacagttcagccagttttggtttatgcctagagctacttcaaggaactagactaattagctatataggcccagcgatgcttcttattgatcttaatagtatgcccctccttcccctgtcctttcatttctctatccaagtagcagtcaggttcttggtgtgatgggactgaaagaattccagtcagccagagccttggcagctctgaagctaaccttagcatctaagtgtcgatcttgaattccctgaaaaaatttctataggaaatgaagcttccctggtcccctcctttctggccattgtcatccatttcccagttagggcaacaatgaaggaggacccagccaagctagaaggaattttgtggatgggagacagcaggattagcttcagcttgggctggagcagtcaatataggatctcaggccaggcccgcttttctagaatgtgtttaattttgagtttgctttattagatatgttttttaagagctctgtatatttgaactgctccttatgtgacaaaataggtagctcttgggctcatgtcctgggttttggctctttaatgattactccaggccagcatttagtcgtttgagaattgtagcctgttgttttcgctgtgacttgggtctcagtgctagggtattgagtcaggcagctggagggttgtggcccgaggctgcagtcagaggtatacttcccatagtgcttcacacagctcccctgcttctaaaggataaggtactgtagccttggtcctggggaccacctgcctggggcagtggacatcctaactaaacaggcttctggcagtagctttggttcctatcccatcgaaattccccaaagccctgggccactgccattgggttagtcaagatgaaggaggaggactggctgcctccattttgccttgtttgttagtttgcctgggtctgtctgaggaaggagggggtcccgccttccacctcaacacatcccttcagtgactcagagtctcagaaggaaaccctgactcctggggccatttcctaatggtactgtaagccaagcagctttgcttctgcctctgtttccaagcccacccttttcccctgagctcagggttagggatgggcgctttcctctctggttgtgaacgaaaggaaggaacatctttctatggctaacaaaaactaaaggggaagtgaggaaacaggaagaagtatggtgggggctggggtagactcccctggagccaagcctatccagctaacaagagctccctggggctggtcacagctggctcatgatgctgaacttgaaagtttttttgtttttgtttttgttttgtggctcctccaagatataggtacatgaagtttaggttaaaggggtgggattctttatttttatttttgtattgtatgtgtcaagaattactctgttgttcaccttttgctttttgcactgtttgttctcttatctgtattttgagcttagtgctaggactgagaggctgcaccatagggaatgtatgggagatggtgaggggtgccagtgaggggtgcgtggaggagaggcctgggctcctctactggatctacactctgtcccaggtttttagatcccactgagcccagctgactgaaaacaaggacagtcagggtgaaacttcttttgccagaagtgtggcctgagttgaatttctgggaggatgacgcagatgtctgctgcagagctgggctgagagttctgcagtctagctctgacttaggtcaggggcctgttggtctctcattggacgtttttgggtctcactcatgcttactgaaacattgtgccaagaaactctgtgggatttgtgtcccttaaaccagactcacttttctgaaaaatctccattgttgaggagaggctgctcaatcgacaccccgagttctcatgactgggaagatagttttcttcaggtgtcaatggcgttagactcccaggaagactagccctgcccacagggccacctgttggtttgagagcgtgttcgtgttctcttgccctccctgcctaagagctactgggatcacgttagcgggcatttaggctttgatgagagggcacagtttgagttaggtttacctccccctttctgtgcctgggaactgtttggtccagctttagaactgtggttttgacttccttatctcttgggagaagcttctgttttaaggaatttctcttccttcttctcctgcctctagcctctcctggaaaggcctggatatggtttctaaaatctcagctgagaacttcagaaaacagcagcagtattttccttttcctagtgctaaaatccctttccctagaaattggctcaccttgggaaacccagggaaagaatcagcaggttctctgccctccctaggggttggggaaggacccaccccggtcagcacagtgccttttcctctcctgctctgagccagggtggggcattccctctagattcaggtttgggcaggggtcctatagtccctgccatggggctgcttccctgtcccttccctcccctttgctggcctactctggcataattcaagtgtcttcttgccttggggatccttagtggcatcaaatggcaacatggaatattgtcctccatgcccctccagaaggacctaggagagtaggtgagctttccaaagtgagagacgaatctttctttctttttttttttaaagggcaggatgggtatgctttgggctttctccttctgtggccccggaggaaggagagactgaggcaaggcaaagtgatagtacactgaagcagaaccggaaacacccaggaactgttcagaaatctcagaagaaatctgcttctcttcgatggaaagatataattaacgatcaaagagctctaagaaaattgcaaagaagccttaatgttcaagctttagaaagatcagagcaatttttctctttcagtccaaactaagactctctgtatttaaatctctctggggcaagagggctagatttcctcattttgttatgagactagattggtaccagtagatcagctgcctagcgagggcaggtttcttctttgcatctgtgtggcttgcttccagtctggcctgtcctttccagctgccttttgtctagcctgctatggggggccagattatcttgataagagcaggtgatttggggactagctgggttggcaggaaaagagcaggatggatctcttgggacaggttcccccaggagtataaacacaaggagccaggattgtgctggcagccaaggaaacagtagtgcctgtttgagttggcagagagggccttggcacctcttgcatccaggcagtcttgtgagatgggggcacatagcactggggaaagcagaactccattctcacctctattttgagcttcagtgctttatttcagtatgaggaaaaacaacaacaaactgaagtgcgctttccgtcctttcaaaggacaactgtcgggaagggagagccgagttgcgaggtaggaggggagcactggcagggagagacattcttgactcctctcttccctggtgtgttgtgatccagggaatgaaaagaaatttgaccctggattggttctctccttggacttaaggaatcttaccttttccttccacaaagttctcccaggcaaggaccagctgcccattctgagcccagggcagcctcttcaaccattattggtctaacctggcttgtcaggaaaccaagcccacccttccacattgggcctggctgctctattctgtaccaagtactggagtctgtggaggccaaaccaactctttgccagcagccacaacatgcattgacagcggcacagtgagatataactgatgggctttgaacctggttggccggggaagctgtaggggtggatagagctttttctccagtacttggtacagaatagagcagccaggcccaatgtggaagggtgggcttggtttcctgacaagccaggttagaccaataatggttgaagaggctgccctgggctcagaatgggcagctggtccttgcctgggagaactttgtggaaggaaaaggtaagattccttaagtccaaggagagaaccaatccagggtcaaatttcttttcattccctggatcacaacacaccagggaagagaggagtcaagaatgtctctccctgccagtgctcccctcctacctcgcaactcggctctcccttcccgacagttgtcctttgaaaggacggaaagcgcacttcagtttgttgttgtttttcctcatactgaaataaagcactgaagctcaaaatagaggtgagaatggagttctgctttccccagtgctatgtgcccccatctcacaagactgcctggatgcaagaggtgccaaggccctctctgccaactcaaacaggcactactgtttccttggctgccagcacaatcctggctccttgtgtttatactcctgggggaacctgtcccaagagatccatcctgctcttttcctgccaacccagctagtccccaaatcacctgctcttatcaagataatctggccccccatagcaggctagacaaaggcagctggaaaggacaggccagactggaagcaagccacacagatgcaagaagaaacctgccctcgctaggcagctgatctactggtaccaatctagtctcataacaaaatgaggaaatctagccctcttgccccagagagatttaaatacagagagtcttagtttggactgaaagagaaaaattgctctgatctttctaaagcttgaacattaaggcttctttgcaattttcttagagctctttgatcgttaattatatctttccatcgaagagaagcagatttcttctgagatttctgaacagttcctgggtgtttccg

SEQ ID NO: 303974 - DNA, 6152 bp, Homo sapiens
aggttgttcctgaggtgggaggcggtacccgtggctgagaagaaggaggcctgagagcgacatgtccccggcggctcaggcggagcggcccgtggcgctgtttttctgagtccggggtggcctggcagccggccgaggacgagggtcggcgggggctgcccccgtggtggtggccgccatgctgggagcctgggcggttgagggaaccgctgtggcgctcctgcgactgctgctgctgctgctgccgccggcgatccggggacccgggctcggcgtggccggcgtggccggcgcggcgggggccgggctgcccgagagcgtcatttgggcggtcaacgcgggtggagaggcgcatgtggacgtgcacgggatccacttccgcaaggaccctttggaaggccgggtgggccgagcctcagactatggcatgaaactgccaatcctgcgttccaaccctgaggaccagatcctgtatcaaactgagcggtacaatgaggagacctttggctacgaagtgcccatcaaagaggagggggactacgtgctggtcttgaaatttgcagaggtctactttgcacagtcccagcaaaaggtatttgatgtacgattgaatggccacgtcgtggtgaaggacttggatatctttgatcgtgttgggcatagcacagctcacgatgaaattatacctatgagcatcagaaaggggaagctgagtgtccagggggaggtgtccaccttcacagggaaactctacattgagtttgtcaaggggtactatgacaatcccaaggtctgtgcactctacatcatggctgggacagtggatgatgtaccaaagcttcagcctcatccgggattggagaagaaagaagaggaagaagaagaagaagaatatgatgaagggtctaatctcaaaaaacagaccaataagaaccgggtgcagtcaggcccccgcacacccaacccctatgcctcggacaacagcagcctcatgtttcccatcctggtggccttcggagtcttcattccaaccctcttctgcctctgccggttgtgagaacaaatgactatcctgaacagggtggaggggtgtgggaaagaaaccagccatattggttttggtttctgtatttttcacaatgattaatgaacaaaaacaaagagaaaaaaacacacatcaattaaaggagacaaaaagaggcagagcgagtagagagcagccctcattcaccacctggtcccagacgtgcttcagtcctcgtcctctctttgtggctggctcccagccttctctttcctcttgaggatacttagggtaaactggatccttcctgctcaaggatcctcatttgtatacctagtggaaaggactctgaactcagaggagtcactgttcctttttttaggttagaaattaacagcagggaaatgccatcttattacctgagacgaccagcactgggagttaggtacggtctgaagttatgtctagataagacttcagacgtcctgggattgaaagaatgtgtgtgaaggggtagaatttgtgcggtaaagacttaaaaaaaaaagtagggagattaaaaaaaaagaaagaaaatgcttccttatctggaagcctttctggattaatccagtgatggtcccacctttagtgtttgagctttgtcattgcttgtctccctggcatgtgccagttatagactgtccagcatccaagacgtttcggttatgtcgggtcctcagatcgcctctgacttgttaccacaacaaatcattttgatttcagtgcctgttggggacttgatttcttctcagttttgtttgtttgtttgtttccttaatctggctcatttgaaatttcttctccctctcaaccatcccactaagttatagccaagaagggaaggagacacggggatttggggttctctgcttgaatgtcttctcctttaccacctcaccttgttggtacctccctccctggatctctgagccagcagccaggaggacctgacccagcagttctttactggcccctttgtagggccttgctgccagggggcagggatgctttccagcctgcagcaacagaacacttgaccttaaaagtctcttctggtctttggattagaaaaggcttatgttagcatagcttaagagcaacctcagagacttgagccctactaagtgactgaccactgtttagagtgtctggtatctgatgttcatttattcccatgttcttgtgtgtcacagttcagccagttttggtttatgcctagagctacttcaaggaactagactaattagctatataggcccagcgatgcttcttattgatcttaatagtatgcccctccttcccctgtcctttcatttctctatccaagtagcagtcaggttcttggtgtgatgggactgaaagaattccagtcagccagagccttggcagctctgaagctaaccttagcatctaagtgtcgatcttgaattccctgaaaaaatttctataggaaatgaagcttccctggtcccctcctttctggccattgtcatccatttcccagttagggcaacaatgaaggaggacccagccaagctagaaggaattttgtggatgggagacagcaggattagcttcagcttgggctggagcagtcaatataggatctcaggccaggcccgcttttctagaatgtgtttaattttgagtttgctttattagatatgttttttaagagctctgtatatttgaactgctccttatgtgacaaaataggtagctcttgggctcatgtcctgggttttggctctttaatgattactccaggccagcatttagtcgtttgagaattgtagcctgttgttttcgctgtgacttgggtctcagtgctagggtattgagtcaggcagctggagggttgtggcccgaggctgcagtcagaggtatacttcccatagtgcttcacacagctcccctgcttctaaaggataaggtactgtagccttggtcctggggaccacctgcctggggcagtggacatcctaactaaacaggcttctggcagtagctttggttcctatcccatcgaaattccccaaagccctgggccactgccattgggttagtcaagatgaaggaggaggactggctgcctccattttgccttgtttgttagtttgcctgggtctgtctgaggaaggagggggtcccgccttccacctcaacacatcccttcagtgactcagagtctcagaaggaaaccctgactcctggggccatttcctaatggtactgtaagccaagcagctttgcttctgcctctgtttccaagcccacccttttcccctgagctcagggttagggatgggcgctttcctctctggttgtgaacgaaaggaaggaacatctttctatggctaacaaaaactaaaggggaagtgaggaaacaggaagaagtatggtgggggctggggtagactcccctggagccaagcctatccagctaacaagagctccctggggctggtcacagctggctcatgatgctgaacttgaaagtttttttgtttttgtttttgttttgtggctcctccaagatataggtacatgaagtttaggttaaaggggtgggattctttatttttatttttgtattgtatgtgtcaagaattactctgttgttcaccttttgctttttgcactgtttgttctcttatctgtattttgagcttagtgctaggactgagaggctgcaccatagggaatgtatgggagatggtgaggggtgccagtgaggggtgcgtggaggagaggcctgggctcctctactggatctacactctgtcccaggtttttagatcccactgagcccagctgactgaaaacaaggacagtcagggtgaaacttcttttgccagaagtgtggcctgagttgaatttctgggaggatgacgcagatgtctgctgcagagctgggctgagagttctgcagtctagctctgacttaggtcaggggcctgttggtctctcattggacgtttttgggtctcactcatgcttactgaaacattgtgccaagaaactctgtgggatttgtgtcccttaaaccagactcacttttctgaaaaatctccattgttgaggagaggctgctcaatcgacaccccgagttctcatgactgggaagatagttttcttcaggtgtcaatggcgttagactcccaggaagactagccctgcccacagggccacctgttggtttgagagcgtgttcgtgttctcttgccctccctgcctaagagctactgggatcacgttagcgggcatttaggctttgatgagagggcacagtttgagttaggtttacctccccctttctgtgcctgggaactgtttggtccagctttagaactgtggttttgacttccttatctcttgggagaagcttctgttttaaggaatttctcttccttcttctcctgcctctagcctctcctggaaaggcctggatatggtttctaaaatctcagctgagaacttcagaaaacagcagcagtattttccttttcctagtgctaaaatccctttccctagaaattggctcaccttgggaaacccagggaaagaatcagcaggttctctgccctccctaggggttggggaaggacccaccccggtcagcacagtgccttttcctctcctgctctgagccagggtggggcattccctctagattcaggtttgggcaggggtcctatagtccctgccatggggctgcttccctgtcccttccctcccctttgctggcctactctggcataattcaagtgtcttcttgccttggggatccttagtggcatcaaatggcaacatggaatattgtcctccatgcccctccagaaggacctaggagagtaggtgagctttccaaagtgagagacgaatctttctttctttttttttttaaagggcaggatgggtatgctttgggctttctccttctgtggccccggaggaaggagagactgaggcaaggcaaagtgatagtacactgaagcagaaccggaaacacccaggaactgttcagaaatctcagaagaaatctgcttctcttcgatggaaagatataattaacgatcaaagagctctaagaaaattgcaaagaagccttaatgttcaagctttagaaagatcagagcaatttttctctttcagtccaaactaagactctctgtatttaaatctctctggggcaagagggctagatttcctcattttgttatgagactagattggtaccagtagatcagctgcctagcgagggcaggtttcttctttgcatctgtgtggcttgcttccagtctggcctgtcctttccagctgccttttgtctagcctgctatggggggccagattatcttgataagagcaggtgatttggggactagctgggttggcaggaaaagagcaggatggatctcttgggacaggttcccccaggagtataaacacaaggagccaggattgtgctggcagccaaggaaacagtagtgcctgtttgagttggcagagagggccttggcacctcttgcatccaggcagtcttgtgagatgggggcacatagcactggggaaagcagaactccattctcacctctattttgagcttcagtgctttatttcagtatgaggaaaaacaacaacaaactgaagtgcgctttccgtcctttcaaaggacaactgtcgggaagggagagccgagttgcgaggtaggaggggagcactggcagggagagacattcttgactcctctcttccctggtgtgttgtgatccagggaatgaaaagaaatttgaccctggattggttctctccttggacttaaggaatcttaccttttccttccacaaagttctcccaggcaaggaccagctgcccattctgagccaggagctctcaacatatgtctaactggtgtggaacagccaccctcacatggccggtgctatctgtcagctggaaagtagtctacctgtgtttactatccccctttgtggggacccctgcggccaatgtgggggcgatatagggcagggcgacagggaagctggggaactccccaaaaatgttgttgaaaggcgcctag

SEQ ID NO: 303975 - DNA, 6869 bp, Homo sapiens
aggttgttcctgaggtgggaggcggtacccgtggctgagaagaaggaggcctgagagcgacatgtccccggcggctcaggcggagcggcccgtggcgctgtttttctgagtccggggtggcctggcagccggccgaggacgagggtcggcgggggctgcccccgtggtggtggccgccatgctgggagcctgggcggttgagggaaccgctgtggcgctcctgcgactgctgctgctgctgctgccgccggcgatccggggacccgggctcggcgtggccggcgtggccggcgcggcgggggccgggctgcccgagagcgtcatttgggcggtcaacgcgggtggagaggcgcatgtggacgtgcacgggatccacttccgcaaggaccctttggaaggccgggtgggccgagcctcagactatggcatgaaactgccaatcctgcgttccaaccctgaggaccagatcctgtatcaaactgagcggtacaatgaggagacctttggctacgaagtgcccatcaaagaggagggggactacgtgctggtcttgaaatttgcagaggtctactttgcacagtcccagcaaaaggtatttgatgtacgattgaatggccacgtcgtggtgaaggacttggatatctttgatcgtgttgggcatagcacagctcacgatgaaattatacctatgagcatcagaaaggggaagctgagtgtccagggggaggtgtccaccttcacagggaaactctacattgagtttgtcaaggggtactatgacaatcccaaggtctgtgcactctacatcatggctgggacagtggatgatgtaccaaagcttcagcctcatccgggattggagaagaaagaagaggaagaagaagaagaagaatatgatgaagggtctaatctcaaaaaacagaccaataagaaccgggtgcagtcaggcccccgcacacccaacccctatgcctcggacaacagcagcctcatgtttcccatcctggtggccttcggagtcttcattccaaccctcttctgcctctgccggttgtgagaacaaatgactatcctgaacagggtggaggggtgtgggaaagaaaccagccatattggttttggtttctgtatttttcacaatgattaatgaacaaaaacaaagagaaaaaaacacacatcaattaaaggagacaaaaagaggcagagcgagtagagagcagccctcattcaccacctggtcccagacgtgcttcagtcctcgtcctctctttgtggctggctcccagccttctctttcctcttgaggatacttagggtaaactggatccttcctgctcaaggatcctcatttgtatacctagtggaaaggactctgaactcagaggagtcactgttcctttttttaggttagaaattaacagcagggaaatgccatcttattacctgagacgaccagcactgggagttaggtacggtctgaagttatgtctagataagacttcagacgtcctgggattgaaagaatgtgtgtgaaggggtagaatttgtgcggtaaagacttaaaaaaaaaagtagggagattaaaaaaaaagaaagaaaatgcttccttatctggaagcctttctggattaatccagtgatggtcccacctttagtgtttgagctttgtcattgcttgtctccctggcatgtgccagttatagactgtccagcatccaagacgtttcggttatgtcgggtcctcagatcgcctctgacttgttaccacaacaaatcattttgatttcagtgcctgttggggacttgatttcttctcagttttgtttgtttgtttgtttccttaatctggctcatttgaaatttcttctccctctcaaccatcccactaagttatagccaagaagggaaggagacacggggatttggggttctctgcttgaatgtcttctcctttaccacctcaccttgttggtacctccctccctggatctctgagccagcagccaggaggacctgacccagcagttctttactggcccctttgtagggccttgctgccagggggcagggatgctttccagcctgcagcaacagaacacttgaccttaaaagtctcttctggtctttggattagaaaaggcttatgttagcatagcttaagagcaacctcagagacttgagccctactaagtgactgaccactgtttagagtgtctggtatctgatgttcatttattcccatgttcttgtgtgtcacagttcagccagttttggtttatgcctagagctacttcaaggaactagactaattagctatataggcccagcgatgcttcttattgatcttaatagtatgcccctccttcccctgtcctttcatttctctatccaagtagcagtcaggttcttggtgtgatgggactgaaagaattccagtcagccagagccttggcagctctgaagctaaccttagcatctaagtgtcgatcttgaattccctgaaaaaatttctataggaaatgaagcttccctggtcccctcctttctggccattgtcatccatttcccagttagggcaacaatgaaggaggacccagccaagctagaaggaattttgtggatgggagacagcaggattagcttcagcttgggctggagcagtcaatataggatctcaggccaggcccgcttttctagaatgtgtttaattttgagtttgctttattagatatgttttttaagagctctgtatatttgaactgctccttatgtgacaaaataggtagctcttgggctcatgtcctgggttttggctctttaatgattactccaggccagcatttagtcgtttgagaattgtagcctgttgttttcgctgtgacttgggtctcagtgctagggtattgagtcaggcagctggagggttgtggcccgaggctgcagtcagaggtatacttcccatagtgcttcacacagctcccctgcttctaaaggataaggtactgtagccttggtcctggggaccacctgcctggggcagtggacatcctaactaaacaggcttctggcagtagctttggttcctatcccatcgaaattccccaaagccctgggccactgccattgggttagtcaagatgaaggaggaggactggctgcctccattttgccttgtttgttagtttgcctgggtctgtctgaggaaggagggggtcccgccttccacctcaacacatcccttcagtgactcagagtctcagaaggaaaccctgactcctggggccatttcctaatggtactgtaagccaagcagctttgcttctgcctctgtttccaagcccacccttttcccctgagctcagggttagggatgggcgctttcctctctggttgtgaacgaaaggaaggaacatctttctatggctaacaaaaactaaaggggaagtgaggaaacaggaagaagtatggtgggggctggggtagactcccctggagccaagcctatccagctaacaagagctccctggggctggtcacagctggctcatgatgctgaacttgaaagtttttttgtttttgtttttgttttgtggctcctccaagatataggtacatgaagtttaggttaaaggggtgggattctttatttttatttttgtattgtatgtgtcaagaattactctgttgttcaccttttgctttttgcactgtttgttctcttatctgtattttgagcttagtgctaggactgagaggctgcaccatagggaatgtatgggagatggtgaggggtgccagtgaggggtgcgtggaggagaggcctgggctcctctactggatctacactctgtcccaggtttttagatcccactgagcccagctgactgaaaacaaggacagtcagggtgaaacttcttttgccagaagtgtggcctgagttgaatttctgggaggatgacgcagatgtctgctgcagagctgggctgagagttctgcagtctagctctgacttaggtcaggggcctgttggtctctcattggacgtttttgggtctcactcatgcttactgaaacattgtgccaagaaactctgtgggatttgtgtcccttaaaccagactcacttttctgaaaaatctccattgttgaggagaggctgctcaatcgacaccccgagttctcatgactgggaagatagttttcttcaggtgtcaatggcgttagactcccaggaagactagccctgcccacagggccacctgttggtttgagagcgtgttcgtgttctcttgccctccctgcctaagagctactgggatcacgttagcgggcatttaggctttgatgagagggcacagtttgagttaggtttacctccccctttctgtgcctgggaactgtttggtccagctttagaactgtggttttgacttccttatctcttgggagaagcttctgttttaaggaatttctcttccttcttctcctgcctctagcctctcctggaaaggcctggatatggtttctaaaatctcagctgagaacttcagaaaacagcagcagtattttccttttcctagtgctaaaatccctttccctagaaattggctcaccttgggaaacccagggaaagaatcagcaggttctctgccctccctaggggttggggaaggacccaccccggtcagcacagtgccttttcctctcctgctctgagccagggtggggcattccctctagattcaggtttgggcaggggtcctatagtccctgccatggggctgcttccctgtcccttccctcccctttgctggcctactctggcataattcaagtgtcttcttgccttggggatccttagtggcatcaaatggcaacatggaatattgtcctccatgcccctccagaaggacctaggagagtaggtgagctttccaaagtgagagacgaatctttctttctttttttttttaaagggcaggatgggtatgctttgggctttctccttctgtggccccggaggaaggagagactgaggcaaggcaaagtgatagtacactgaagcagaaccggaaacacccaggaactgttcagaaatctcagaagaaatctgcttctcttcgatggaaagatataattaacgatcaaagagctctaagaaaattgcaaagaagccttaatgttcaagctttagaaagatcagagcaatttttctctttcagtccaaactaagactctctgtatttaaatctctctggggcaagagggctagatttcctcattttgttatgagactagattggtaccagtagatcagctgcctagcgagggcaggtttcttctttgcatctgtgtggcttgcttccagtctggcctgtcctttccagctgccttttgtctagcctgctatggggggccagattatcttgataagagcaggtgatttggggactagctgggttggcaggaaaagagcaggatggatctcttgggacaggttcccccaggagtataaacacaaggagccaggattgtgctggcagccaaggaaacagtagtgcctgtttgagttggcagagagggccttggcacctcttgcatccaggcagtcttgtgagatgggggcacatagcactggggaaagcagaactccattctcacctctattttgagcttcagtgctttatttcagtatgaggaaaaagcatcaagttcttagcccttgtagcttctaccctagtttcccatcctctctctgtggaggccaaaccaactctttgccagcagccacaacatgcattgacagcggcacagtgagatataactgatgggctttgaacctggttggccggggaagctgtaggggtggatagagctttttctccagtacttggtacagaatagagcagccaggcccaatgtggaagggtgggcttggtttcctgacaagccaggttagaccaataatggttgaagaggctgccctgggctcagaatgggcagctggtccttgcctgggagaactttgtggaaggaaaaggtaagattccttaagtccaaggagagaaccaatccagggtcaaatttcttttcattccctggatcacaacacaccagggaagagaggagtcaagaatgtctctccctgccagtgctcccctcctacctcgcaactcggctctcccttcccgacagttgtcctttgaaaggacggaaagcgcacttcagtttgttgttgtttttcctcatactgaaataaagcactgaagctcaaaatagaggtgagaatggagttctgctttccccagtgctatgtgcccccatctcacaagactgcctggatgcaagaggtgccaaggccctctctgccaactcaaacaggcactactgtttccttggctgccagcacaatcctggctccttgtgtttatactcctgggggaacctgtcccaagagatccatcctgctcttttcctgccaacccagctagtccccaaatcacctgctcttatcaagataatctggccccccatagcaggctagacaaaggcagctggaaaggacaggccagactggaagcaagccacacagatgcaagaagaaacctgccctcgctaggcagctgatctactggtaccaatctagtctcataacaaaatgaggaaatctagccctcttgccccagagagatttaaatacagagagtcttagtttggactgaaagagaaaaattgctctgatctttctaaagcttgaacattaaggcttctttgcaattttcttagagctctttgatcgttaattatatctttccatcgaagagaagcagatttcttctgagatttctgaacagttcctgggtgtttccg

SEQ ID NO: 303976 - DNA, 5788 bp, Homo sapiens
aggttgttcctgaggtgggaggcggtacccgtggctgagaagaaggaggcctgagagcgacatgtccccggcggctcaggcggagcggcccgtggcgctgtttttctgagtccggggtggcctggcagccggccgaggacgagggtcggcgggggctgcccccgtggtggtggccgccatgctgggagcctgggcggttgagggaaccgctgtggcgctcctgcgactgctgctgctgctgctgccgccggcgatccggggacccgggctcggcgtggccggcgtggccggcgcggcgggggccgggctgcccgagagcgtcatttgggcggtcaacgcgggtggagaggcgcatgtggacgtgcacgggatccacttccgcaaggaccctttggaaggccgggtgggccgagcctcagactatggcatgaaactgccaatcctgcgttccaaccctgaggaccagatcctgtatcaaactgagcggtacaatgaggagacctttggctacgaagtgcccatcaaagaggagggggactacgtgctggtcttgaaatttgcagaggtctactttgcacagtcccagcaaaaggtatttgatgtacgattgaatggccacgtcgtggtgaaggacttggatatctttgatcgtgttgggcatagcacagctcacgatgaaattatacctatgagcatcagaaaggggaagctgagtgtccagggggaggtgtccaccttcacagggaaactctacattgagtttgtcaaggggtactatgacaatcccaaggtctgtgcactctacatcatggctgggacagtggatgatgtaccaaagcttcagcctcatccgggattggagaagaaagaagaggaagaagaagaagaagaatatgatgaagggtctaatctcaaaaaacagaccaataagaaccgggtgcagtcaggcccccgcacacccaacccctatgcctcggacaacagcagcctcatgtttcccatcctggtggccttcggagtcttcattccaaccctcttctgcctctgccggttgtgagaacaaatgactatcctgaacagggtggaggggtgtgggaaagaaaccagccatattggttttggtttctgtatttttcacaatgattaatgaacaaaaacaaagagaaaaaaacacacatcaattaaaggagacaaaaagaggcagagcgagtagagagcagccctcattcaccacctggtcccagacgtgcttcagtcctcgtcctctctttgtggctggctcccagccttctctttcctcttgaggatacttagggtaaactggatccttcctgctcaaggatcctcatttgtatacctagtggaaaggactctgaactcagaggagtcactgttcctttttttaggttagaaattaacagcagggaaatgccatcttattacctgagacgaccagcactgggagttaggtacggtctgaagttatgtctagataagacttcagacgtcctgggattgaaagaatgtgtgtgaaggggtagaatttgtgcggtaaagacttaaaaaaaaaagtagggagattaaaaaaaaagaaagaaaatgcttccttatctggaagcctttctggattaatccagtgatggtcccacctttagtgtttgagctttgtcattgcttgtctccctggcatgtgccagttatagactgtccagcatccaagacgtttcggttatgtcgggtcctcagatcgcctctgacttgttaccacaacaaatcattttgatttcagtgcctgttggggacttgatttcttctcagttttgtttgtttgtttgtttccttaatctggctcatttgaaatttcttctccctctcaaccatcccactaagttatagccaagaagggaaggagacacggggatttggggttctctgcttgaatgtcttctcctttaccacctcaccttgttggtacctccctccctggatctctgagccagcagccaggaggacctgacccagcagttctttactggcccctttgtagggccttgctgccagggggcagggatgctttccagcctgcagcaacagaacacttgaccttaaaagtctcttctggtctttggattagaaaaggcttatgttagcatagcttaagagcaacctcagagacttgagccctactaagtgactgaccactgtttagagtgtctggtatctgatgttcatttattcccatgttcttgtgtgtcacagttcagccagttttggtttatgcctagagctacttcaaggaactagactaattagctatataggcccagcgatgcttcttattgatcttaatagtatgcccctccttcccctgtcctttcatttctctatccaagtagcagtcaggttcttggtgtgatgggactgaaagaattccagtcagccagagccttggcagctctgaagctaaccttagcatctaagtgtcgatcttgaattccctgaaaaaatttctataggaaatgaagcttccctggtcccctcctttctggccattgtcatccatttcccagttagggcaacaatgaaggaggacccagccaagctagaaggaattttgtggatgggagacagcaggattagcttcagcttgggctggagcagtcaatataggatctcaggccaggcccgcttttctagaatgtgtttaattttgagtttgctttattagatatgttttttaagagctctgtatatttgaactgctccttatgtgacaaaataggtagctcttgggctcatgtcctgggttttggctctttaatgattactccaggccagcatttagtcgtttgagaattgtagcctgttgttttcgctgtgacttgggtctcagtgctagggtattgagtcaggcagctggagggttgtggcccgaggctgcagtcagaggtatacttcccatagtgcttcacacagctcccctgcttctaaaggataaggtactgtagccttggtcctggggaccacctgcctggggcagtggacatcctaactaaacaggcttctggcagtagctttggttcctatcccatcgaaattccccaaagccctgggccactgccattgggttagtcaagatgaaggaggaggactggctgcctccattttgccttgtttgttagtttgcctgggtctgtctgaggaaggagggggtcccgccttccacctcaacacatcccttcagtgactcagagtctcagaaggaaaccctgactcctggggccatttcctaatggtactgtaagccaagcagctttgcttctgcctctgtttccaagcccacccttttcccctgagctcagggttagggatgggcgctttcctctctggttgtgaacgaaaggaaggaacatctttctatggctaacaaaaactaaaggggaagtgaggaaacaggaagaagtatggtgggggctggggtagactcccctggagccaagcctatccagctaacaagagctccctggggctggtcacagctggctcatgatgctgaacttgaaagtttttttgtttttgtttttgttttgtggctcctccaagatataggtacatgaagtttaggttaaaggggtgggattctttatttttatttttgtattgtatgtgtcaagaattactctgttgttcaccttttgctttttgcactgtttgttctcttatctgtattttgagcttagtgctaggactgagaggctgcaccatagggaatgtatgggagatggtgaggggtgccagtgaggggtgcgtggaggagaggcctgggctcctctactggatctacactctgtcccaggtttttagatcccactgagcccagctgactgaaaacaaggacagtcagggtgaaacttcttttgccagaagtgtggcctgagttgaatttctgggaggatgacgcagatgtctgctgcagagctgggctgagagttctgcagtctagctctgacttaggtcaggggcctgttggtctctcattggacgtttttgggtctcactcatgcttactgaaacattgtgccaagaaactctgtgggatttgtgtcccttaaaccagactcacttttctgaaaaatctccattgttgaggagaggctgctcaatcgacaccccgagttctcatgactgggaagatagttttcttcaggtgtcaatggcgttagactcccaggaagactagccctgcccacagggccacctgttggtttgagagcgtgttcgtgttctcttgccctccctgcctaagagctactgggatcacgttagcgggcatttaggctttgatgagagggcacagtttgagttaggtttacctccccctttctgtgcctgggaactgtttggtccagctttagaactgtggttttgacttccttatctcttgggagaagcttctgttttaaggaatttctcttccttcttctcctgcctctagcctctcctggaaaggcctggatatggtttctaaaatctcagctgagaacttcagaaaacagcagcagtattttccttttcctagtgctaaaatccctttccctagaaattggctcaccttgggaaacccagggaaagaatcagcaggttctctgccctccctaggggttggggaaggacccaccccggtcagcacagtgccttttcctctcctgctctgagccagggtggggcattccctctagattcaggtttgggcaggggtcctatagtccctgccatggggctgcttccctgtcccttccctcccctttgctggcctactctggcataattcaagtgtcttcttgccttggggatccttagtggcatcaaatggcaacatggaatattgtcctccatgcccctccagaaggacctaggagagtaggtgagctttccaaagtgagagacgaatctttctttctttttttttttaaagggcaggatgggtatgctttgggctttctccttctgtggccccggaggaaggagagactgaggcaaggcaaagtgatagtacactgaagcagaaccggaaacacccaggaactgttcagaaatctcagaagaaatctgcttctcttcgatggaaagatataattaacgatcaaagagctctaagaaaattgcaaagaagccttaatgttcaagctttagaaagatcagagcaatttttctctttcagtccaaactaagactctctgtatttaaatctctctggggcaagagggctagatttcctcattttgttatgagactagattggtaccagtagatcagctgcctagcgagggcaggtttcttctttgcatctgtgtggcttgcttccagtctggcctgtcctttccagctgccttttgtctagcctgctatggggggccagattatcttgataagagcaggtgatttggggactagctgggttggcaggaaaagagcaggatggatctcttgggacaggttcccccaggagtataaacacaaggagccaggattgtgctggcagccaaggaaacagtagtgcctgtttgagttggcagagagggccttggcacctcttgcatccagagagatttaaatacagagagtcttagtttggactgaaagagaaaaattgctctgatctttctaaagcttgaacattaaggcttctttgcaattttcttagagctctttgatcgttaattatatctttccatcgaagagaagcagatttcttctgagatttctgaacagttcctgggtgtttccg

SEQ ID NO: 303977 - DNA, 6087 bp, Homo sapiens
agttagtgtgtgtcagaattgccagggcagctggttaaaaatgcagattcctagtccccactcgaaattgattatagtagattgagcttttttgctgggatccaggtttctgcaccaggggcttgtgatcctcagactatggcatgaaactgccaatcctgcgttccaaccctgaggaccagatcctgtatcaaactgagcggtacaatgaggagacctttggctacgaagtgcccatcaaagaggagggggactacgtgctggtcttgaaatttgcagaggtctactttgcacagtcccagcaaaaggtatttgatgtacgattgaatggccacgtcgtggtgaaggacttggatatctttgatcgtgttgggcatagcacagctcacgatgaaattatacctatgagcatcagaaaggggaagctgagtgtccagggggaggtgtccaccttcacagggaaactctacattgagtttgtcaaggggtactatgacaatcccaaggtctgtgcactctacatcatggctgggacagtggatgatgtaccaaagcttcagcctcatccgggattggagaagaaagaagaggaagaagaagaagaagaatatgatgaagggtctaatctcaaaaaacagaccaataagaaccgggtgcagtcaggcccccgcacacccaacccctatgcctcggacaacagcagcctcatgtttcccatcctggtggccttcggagtcttcattccaaccctcttctgcctctgccggttgtgagaacaaatgactatcctgaacagggtggaggggtgtgggaaagaaaccagccatattggttttggtttctgtatttttcacaatgattaatgaacaaaaacaaagagaaaaaaacacacatcaattaaaggagacaaaaagaggcagagcgagtagagagcagccctcattcaccacctggtcccagacgtgcttcagtcctcgtcctctctttgtggctggctcccagccttctctttcctcttgaggatacttagggtaaactggatccttcctgctcaaggatcctcatttgtatacctagtggaaaggactctgaactcagaggagtcactgttcctttttttaggttagaaattaacagcagggaaatgccatcttattacctgagacgaccagcactgggagttaggtacggtctgaagttatgtctagataagacttcagacgtcctgggattgaaagaatgtgtgtgaaggggtagaatttgtgcggtaaagacttaaaaaaaaaagtagggagattaaaaaaaaagaaagaaaatgcttccttatctggaagcctttctggattaatccagtgatggtcccacctttagtgtttgagctttgtcattgcttgtctccctggcatgtgccagttatagactgtccagcatccaagacgtttcggttatgtcgggtcctcagatcgcctctgacttgttaccacaacaaatcattttgatttcagtgcctgttggggacttgatttcttctcagttttgtttgtttgtttgtttccttaatctggctcatttgaaatttcttctccctctcaaccatcccactaagttatagccaagaagggaaggagacacggggatttggggttctctgcttgaatgtcttctcctttaccacctcaccttgttggtacctccctccctggatctctgagccagcagccaggaggacctgacccagcagttctttactggcccctttgtagggccttgctgccagggggcagggatgctttccagcctgcagcaacagaacacttgaccttaaaagtctcttctggtctttggattagaaaaggcttatgttagcatagcttaagagcaacctcagagacttgagccctactaagtgactgaccactgtttagagtgtctggtatctgatgttcatttattcccatgttcttgtgtgtcacagttcagccagttttggtttatgcctagagctacttcaaggaactagactaattagctatataggcccagcgatgcttcttattgatcttaatagtatgcccctccttcccctgtcctttcatttctctatccaagtagcagtcaggttcttggtgtgatgggactgaaagaattccagtcagccagagccttggcagctctgaagctaaccttagcatctaagtgtcgatcttgaattccctgaaaaaatttctataggaaatgaagcttccctggtcccctcctttctggccattgtcatccatttcccagttagggcaacaatgaaggaggacccagccaagctagaaggaattttgtggatgggagacagcaggattagcttcagcttgggctggagcagtcaatataggatctcaggccaggcccgcttttctagaatgtgtttaattttgagtttgctttattagatatgttttttaagagctctgtatatttgaactgctccttatgtgacaaaataggtagctcttgggctcatgtcctgggttttggctctttaatgattactccaggccagcatttagtcgtttgagaattgtagcctgttgttttcgctgtgacttgggtctcagtgctagggtattgagtcaggcagctggagggttgtggcccgaggctgcagtcagaggtatacttcccatagtgcttcacacagctcccctgcttctaaaggataaggtactgtagccttggtcctggggaccacctgcctggggcagtggacatcctaactaaacaggcttctggcagtagctttggttcctatcccatcgaaattccccaaagccctgggccactgccattgggttagtcaagatgaaggaggaggactggctgcctccattttgccttgtttgttagtttgcctgggtctgtctgaggaaggagggggtcccgccttccacctcaacacatcccttcagtgactcagagtctcagaaggaaaccctgactcctggggccatttcctaatggtactgtaagccaagcagctttgcttctgcctctgtttccaagcccacccttttcccctgagctcagggttagggatgggcgctttcctctctggttgtgaacgaaaggaaggaacatctttctatggctaacaaaaactaaaggggaagtgaggaaacaggaagaagtatggtgggggctggggtagactcccctggagccaagcctatccagctaacaagagctccctggggctggtcacagctggctcatgatgctgaacttgaaagtttttttgtttttgtttttgttttgtggctcctccaagatataggtacatgaagtttaggttaaaggggtgggattctttatttttatttttgtattgtatgtgtcaagaattactctgttgttcaccttttgctttttgcactgtttgttctcttatctgtattttgagcttagtgctaggactgagaggctgcaccatagggaatgtatgggagatggtgaggggtgccagtgaggggtgcgtggaggagaggcctgggctcctctactggatctacactctgtcccaggtttttagatcccactgagcccagctgactgaaaacaaggacagtcagggtgaaacttcttttgccagaagtgtggcctgagttgaatttctgggaggatgacgcagatgtctgctgcagagctgggctgagagttctgcagtctagctctgacttaggtcaggggcctgttggtctctcattggacgtttttgggtctcactcatgcttactgaaacattgtgccaagaaactctgtgggatttgtgtcccttaaaccagactcacttttctgaaaaatctccattgttgaggagaggctgctcaatcgacaccccgagttctcatgactgggaagatagttttcttcaggtgtcaatggcgttagactcccaggaagactagccctgcccacagggccacctgttggtttgagagcgtgttcgtgttctcttgccctccctgcctaagagctactgggatcacgttagcgggcatttaggctttgatgagagggcacagtttgagttaggtttacctccccctttctgtgcctgggaactgtttggtccagctttagaactgtggttttgacttccttatctcttgggagaagcttctgttttaaggaatttctcttccttcttctcctgcctctagcctctcctggaaaggcctggatatggtttctaaaatctcagctgagaacttcagaaaacagcagcagtattttccttttcctagtgctaaaatccctttccctagaaattggctcaccttgggaaacccagggaaagaatcagcaggttctctgccctccctaggggttggggaaggacccaccccggtcagcacagtgccttttcctctcctgctctgagccagggtggggcattccctctagattcaggtttgggcaggggtcctatagtccctgccatggggctgcttccctgtcccttccctcccctttgctggcctactctggcataattcaagtgtcttcttgccttggggatccttagtggcatcaaatggcaacatggaatattgtcctccatgcccctccagaaggacctaggagagtaggtgagctttccaaagtgagagacgaatctttctttctttttttttttaaagggcaggatgggtatgctttgggctttctccttctgtggccccggaggaaggagagactgaggcaaggcaaagtgatagtacactgaagcagaaccggaaacacccaggaactgttcagaaatctcagaagaaatctgcttctcttcgatggaaagatataattaacgatcaaagagctctaagaaaattgcaaagaagccttaatgttcaagctttagaaagatcagagcaatttttctctttcagtccaaactaagactctctgtatttaaatctctctggggcaagagggctagatttcctcattttgttatgagactagattggtaccagtagatcagctgcctagcgagggcaggtttcttctttgcatctgtgtggcttgcttccagtctggcctgtcctttccagctgccttttgtctagcctgctatggggggccagattatcttgataagagcaggtgatttggggactagctgggttggcaggaaaagagcaggatggatctcttgggacaggttcccccaggagtataaacacaaggagccaggattgtgctggcagccaaggaaacagtagtgcctgtttgagttggcagagagggccttggcacctcttgcatccaggcagtcttgtgagatgggggcacatagcactggggaaagcagaactccattctcacctctattttgagcttcagtgctttatttcagtatgaggaaaaacaacaacaaactgaagtgcgctttccgtcctttcaaaggacaactgtcgggaagggagagccgagttgcgaggtaggaggggagcactggcagggagagacattcttgactcctctcttccctggtgtgttgtgatccagggaatgaaaagaaatttgaccctggattggttctctccttggacttaaggaatcttaccttttccttccacaaagttctcccaggcaaggaccagctgcccattctgagcccagggcagcctcttcaaccattattggtctaacctggcttgtcaggaaaccaagcccacccttccacattgggcctggctgctctattctgtaccaagtactggagaaaaagcatcaagttcttagcccttgtagcttctaccctagtttcccatcctctctctgtggaggccaaaccaactctttgccagcagccacaacatgcattgacagcggcacagtgagatataactgatgggctttgaacctggttggccggggaagctgtaggggtggatagagctggctttccttctgggctgtctccatctgaccctaccccttccatgtcccaccccactcccaccaaaaagtacaaaatcaggatgtttttcactgtccattgctttgtgttttaataaacaatttgcagtgaca

SEQ ID NO: 303978 - DNA, 6317 bp, Homo sapiens
aggttgttcctgaggtgggaggcggtacccgtggctgagaagaaggaggcctgagagcgacatgtccccggcggctcaggcggagcggcccgtggcgctgtttttctgagtccggggtggcctggcagccggccgaggacgagggtcggcgggggctgcccccgtggtggtggccgccatgctgggagcctgggcggttgagggaaccgctgtggcgctcctgcgactgctgctgctgctgctgccgccggcgatccggggacccgggctcggcgtggccggcgtggccggcgcggcgggggccgggctgcccgagagcgtcatttgggcggtcaacgcgggtggagaggcgcatgtggacgtgcacgggatccacttccgcaaggaccctttggaaggccgggtgggccgagcctcagactatggcatgaaactgccaatcctgcgttccaaccctgaggaccagatcctgtatcaaactgagcggtacaatgaggagacctttggctacgaagtgcccatcaaagaggagggggactacgtgctggtcttgaaatttgcagaggtctactttgcacagtcccagcaaaaggtatttgatgtacgattgaatggccacgtcgtggtgaaggacttggatatctttgatcgtgttgggcatagcacagctcacgatgaaattatacctatgagcatcagaaaggggaagctgagtgtccagggggaggtgtccaccttcacagggaaactctacattgagtttgtcaaggggtactatgacaatcccaaggtctgtgcactctacatcatggctgggacagtggatgatgtaccaaagcttcagcctcatccgggattggagaagaaagaagaggaagaagaagaagaagaatatgatgaagggtctaatctcaaaaaacagaccaataagaaccgggtgcagtcaggcccccgcacacccaacccctatgcctcggacaacagcagcctcatgtttcccatcctggtggccttcggagtcttcattccaaccctcttctgcctctgccggttgtgagaacaaatgactatcctgaacagggtggaggggtgtgggaaagaaaccagccatattggttttggtttctgtatttttcacaatgattaatgaacaaaaacaaagagaaaaaaacacacatcaattaaaggagacaaaaagaggcagagcgagtagagagcagccctcattcaccacctggtcccagacgtgcttcagtcctcgtcctctctttgtggctggctcccagccttctctttcctcttgaggatacttagggtaaactggatccttcctgctcaaggatcctcatttgtatacctagtggaaaggactctgaactcagaggagtcactgttcctttttttaggttagaaattaacagcagggaaatgccatcttattacctgagacgaccagcactgggagttaggtacggtctgaagttatgtctagataagacttcagacgtcctgggattgaaagaatgtgtgtgaaggggtagaatttgtgcggtaaagacttaaaaaaaaaagtagggagattaaaaaaaaagaaagaaaatgcttccttatctggaagcctttctggattaatccagtgatggtcccacctttagtgtttgagctttgtcattgcttgtctccctggcatgtgccagttatagactgtccagcatccaagacgtttcggttatgtcgggtcctcagatcgcctctgacttgttaccacaacaaatcattttgatttcagtgcctgttggggacttgatttcttctcagttttgtttgtttgtttgtttccttaatctggctcatttgaaatttcttctccctctcaaccatcccactaagttatagccaagaagggaaggagacacggggatttggggttctctgcttgaatgtcttctcctttaccacctcaccttgttggtacctccctccctggatctctgagccagcagccaggaggacctgacccagcagttctttactggcccctttgtagggccttgctgccagggggcagggatgctttccagcctgcagcaacagaacacttgaccttaaaagtctcttctggtctttggattagaaaaggcttatgttagcatagcttaagagcaacctcagagacttgagccctactaagtgactgaccactgtttagagtgtctggtatctgatgttcatttattcccatgttcttgtgtgtcacagttcagccagttttggtttatgcctagagctacttcaaggaactagactaattagctatataggcccagcgatgcttcttattgatcttaatagtatgcccctccttcccctgtcctttcatttctctatccaagtagcagtcaggttcttggtgtgatgggactgaaagaattccagtcagccagagccttggcagctctgaagctaaccttagcatctaagtgtcgatcttgaattccctgaaaaaatttctataggaaatgaagcttccctggtcccctcctttctggccattgtcatccatttcccagttagggcaacaatgaaggaggacccagccaagctagaaggaattttgtggatgggagacagcaggattagcttcagcttgggctggagcagtcaatataggatctcaggccaggcccgcttttctagaatgtgtttaattttgagtttgctttattagatatgttttttaagagctctgtatatttgaactgctccttatgtgacaaaataggtagctcttgggctcatgtcctgggttttggctctttaatgattactccaggccagcatttagtcgtttgagaattgtagcctgttgttttcgctgtgacttgggtctcagtgctagggtattgagtcaggcagctggagggttgtggcccgaggctgcagtcagaggtatacttcccatagtgcttcacacagctcccctgcttctaaaggataaggtactgtagccttggtcctggggaccacctgcctggggcagtggacatcctaactaaacaggcttctggcagtagctttggttcctatcccatcgaaattccccaaagccctgggccactgccattgggttagtcaagatgaaggaggaggactggctgcctccattttgccttgtttgttagtttgcctgggtctgtctgaggaaggagggggtcccgccttccacctcaacacatcccttcagtgactcagagtctcagaaggaaaccctgactcctggggccatttcctaatggtactgtaagccaagcagctttgcttctgcctctgtttccaagcccacccttttcccctgagctcagggttagggatgggcgctttcctctctggttgtgaacgaaaggaaggaacatctttctatggctaacaaaaactaaaggggaagtgaggaaacaggaagaagtatggtgggggctggggtagactcccctggagccaagcctatccagctaacaagagctccctggggctggtcacagctggctcatgatgctgaacttgaaagtttttttgtttttgtttttgttttgtggctcctccaagatataggtacatgaagtttaggttaaaggggtgggattctttatttttatttttgtattgtatgtgtcaagaattactctgttgttcaccttttgctttttgcactgtttgttctcttatctgtattttgagcttagtgctaggactgagaggctgcaccatagggaatgtatgggagatggtgaggggtgccagtgaggggtgcgtggaggagaggcctgggctcctctactggatctacactctgtcccaggtttttagatcccactgagcccagctgactgaaaacaaggacagtcagggtgaaacttcttttgccagaagtgtggcctgagttgaatttctgggaggatgacgcagatgtctgctgcagagctgggctgagagttctgcagtctagctctgacttaggtcaggggcctgttggtctctcattggacgtttttgggtctcactcatgcttactgaaacattgtgccaagaaactctgtgggatttgtgtcccttaaaccagactcacttttctgaaaaatctccattgttgaggagaggctgctcaatcgacaccccgagttctcatgactgggaagatagttttcttcaggtgtcaatggcgttagactcccaggaagactagccctgcccacagggccacctgttggtttgagagcgtgttcgtgttctcttgccctccctgcctaagagctactgggatcacgttagcgggcatttaggctttgatgagagggcacagtttgagttaggtttacctccccctttctgtgcctgggaactgtttggtccagctttagaactgtggttttgacttccttatctcttgggagaagcttctgttttaaggaatttctcttccttcttctcctgcctctagcctctcctggaaaggcctggatatggtttctaaaatctcagctgagaacttcagaaaacagcagcagtattttccttttcctagtgctaaaatccctttccctagaaattggctcaccttgggaaacccagggaaagaatcagcaggttctctgccctccctaggggttggggaaggacccaccccggtcagcacagtgccttttcctctcctgctctgagccagggtggggcattccctctagattcaggtttgggcaggggtcctatagtccctgccatggggctgcttccctgtcccttccctcccctttgctggcctactctggcataattcaagtgtcttcttgccttggggatccttagtggcatcaaatggcaacatggaatattgtcctccatgcccctccagaaggacctaggagagtaggtgagctttccaaagtgagagacgaatctttctttctttttttttttaaagggcaggatgggtatgctttgggctttctccttctgtggccccggaggaaggagagactgaggcaaggcaaagtgatagtacactgaagcagaaccggaaacacccaggaactgttcagaaatctcagaagaaatctgcttctcttcgatggaaagatataattaacgatcaaagagctctaagctctttcagtccaaactaagactctctgtatttaaatctctctggggcaagagggctagatttcctcattttgttatgagactagattggtaccagtagatcagctgcctagcgagggcaggtttcttctttgcatctgtgtggcttgcttccagtctggcctgtcctttccagctgccttttgtctagcctgctatggggggccagattatcttgataagagcaggtgatttggggactagctgggttggcaggaaaagagcaggatggatctcttgggacaggttcccccaggagtataaacacaaggagccaggattgtgctggcagccaaggaaacagtagtgcctgtttgagttggcagagagggccttggcacctcttgcatccaggcagtcttgtgagatgggggcacatagcactggggaaagcagaactccattctcacctctattttgagcttcagtgctttatttcagtatgaggaaaaacaacaacaaactgaagtgcgctttccgtcctttcaaaggacaactgtcgggaagggagagccgagttgcgaggtaggaggggagcactggcagggagagacattcttgactcctctcttccctggtgtgttgtgatccagggaatgaaaagaaatttgaccctggattggttctctccttggacttaaggaatcttaccttttccttccacaaagttctcccaggcaaggaccagctgcccattctgagcccagggcagcctcttcaaccattattggtctaacctggcttgtcaggaaaccaagcccacccttccacattgggcctggctgctctattctgtaccaagtactggagaaaaagcatcaagttcttagcccttgtagcttctaccctagtttcccatcctctctctgtggaggccaaaccaactctttgccagcagccacaacatgcattgacagcggcacagtgagatataactgatgggctttgaacctggttggccggggaagctgtaggggtggatagagctggctttccttctgggctgtctccatctgaccctaccccttccatgtcccaccccactcccaccaaaaagtacaaaatcaggatgtttttcactgtccattgctttgtgttttaataaacaatttgcagtgaca

SEQ ID NO: 303979 - DNA, 2295 bp, Homo sapiens
tcggctagtagaggccggggtgaatcggccgaggctttcagactcacttttctgaaaaatctccattgttgaggagaggctgctcaatcgacaccccgagttctcatgactgggaagatagttttcttcaggtgtcaatggcgttagactcccaggaagactagccctgcccacagggccacctgttggtttgagagcgtgttcgtgttctcttgccctccctgcctaagagctactgggatcacgttagcgggcatttaggctttgatgagagggcacagtttgagttaggtttacctccccctttctgtgcctgggaactgtttggtccagctttagaactgtggttttgacttccttatctcttgggagaagcttctgttttaaggaatttctcttccttcttctcctgcctctagcctctcctggaaaggcctggatatggtttctaaaatctcagctgagaacttcagaaaacagcagcagtattttccttttcctagtgctaaaatccctttccctagaaattggctcaccttgggaaacccagggaaagaatcagcaggttctctgccctccctaggggttggggaaggacccaccccggtcagcacagtgccttttcctctcctgctctgagccagggtggggcattccctctagattcaggtttgggcaggggtcctatagtccctgccatggggctgcttccctgtcccttccctcccctttgctggcctactctggcataattcaagtgtcttcttgccttggggatccttagtggcatcaaatggcaacatggaatattgtcctccatgcccctccagaaggacctaggagagtaggtgagctttccaaagtgagagacgaatctttctttctttttttttttaaagggcaggatgggtatgctttgggctttctccttctgtggccccggaggaaggagagactgaggcaaggcaaagtgatagtacactgaagcagaaccggaaacacccaggaactgttcagaaatctcagaagaaatctgcttctcttcgatggaaagatataattaacgatcaaagagctctaagaaaattgcaaagaagccttaatgttcaagctttagaaagatcagagcaatttttctctttcagtccaaactaagactctctgtatttaaatctctctggggcaagagggctagatttcctcattttgttatgagactagattggtaccagtagatcagctgcctagcgagggcaggtttcttctttgcatctgtgtggcttgcttccagtctggcctgtcctttccagctgccttttgtctagcctgctatggggggccagattatcttgataagagcaggtgatttggggactagctgggttggcaggaaaagagcaggatggatctcttgggacaggttcccccaggagtataaacacaaggagccaggattgtgctggcagccaaggaaacagtagtgcctgtttgagttggcagagagggccttggcacctcttgcatccaggcagtcttgtgagatgggggcacatagcactggggaaagcagaactccattctcacctctattttgagcttcagtgctttatttcagtatgaggaaaaacaacaacaaactgaagtgcgctttccgtcctttcaaaggacaactgtcgggaagggagagccgagttgcgaggtaggaggggagcactggcagggagagacattcttgactcctctcttccctggtgtgttgtgatccagggaatgaaaagaaatttgaccctggattggttctctccttggacttaaggaatcttaccttttccttccacaaagttctcccaggcaaggaccagctgcccattctgagcccagggcagcctcttcaaccattattggtctaacctggcttgtcaggaaaccaagcccacccttccacattgggcctggctgctctattctgtaccaagtactggagaaaaagcatcaagttcttagcccttgtagcttctaccctagtttcccatcctctctctgtggaggccaaaccaactctttgccagcagccacaacatgcattgacagcggcacagtgagatataactgatgggctttgaacctggttggccggggaagctgtaggggtggatagagctggctttccttctgggctgtctccatctgaccctaccccttccatgtcccaccccactcccaccaaaaagtacaaaatcaggatgtttttcactgtccattgctttgtgttttaataaacaatttgcagtgaca

SEQ ID NO: 303980 - DNA, 1300 bp, Homo sapiens
tgtcactgcaaattgtttattaaaacacaaagcaatggacagtgaaaaacatcctgattttgtactttttggtgggagtggggtgggacatggaaggggtagggtcagatggagacagcccagaaggaaagccagctctatccacccctacagcttccccggccaaccaggttcaaagcccatcagttatatctcactgtgccgctgtcaatgcatgttgtggctgctggcaaagagttggtttggcctccacagagagaggatgggaaactagggtagaagctacaagggctaagaacttgatgctttttctccagtacttggtacagaatagagcagccaggcccaatgtggaagggtgggcttggtttcctgacaagccaggttagaccaataatggttgaagaggctgccctgggctcagaatgggcagctggtccttgcctgggagaactttgtggaaggaaaaggtaagattccttaagtccaaggagagaaccaatccagggtcaaatttcttttcattccctggatcacaacacaccagggaagagaggagtcaagaatgtctctccctgccagtgctcccctcctacctcgcaactcggctctcccttcccgacagttgtcctttgaaaggacggaaagcgcacttcagtttgttgttgtttttcctcatactgaaataaagcactgaagctcaaaatagaggtgagaatggagttctgctttccccagtgctatgtgcccccatctcacaagactgcctggatgcaagaggtgccaaggccctctctgccaactcaaacaggcactactgtttccttggctgccagcacaatcctggctccttgtgtttatactcctgggggaacctgtcccaagagatccatcctgctcttttcctgccaacccagctagtccccaaatcacctgctcttatcaagataatctggccccccatagcaggctagacaaaggcagctggaaaggacaggccagactggaagcaagccacacagatgcaagaagaaacctgccctcgctaggcagctgatctactggtaccaatctagtctcataacaaaatgaggaaatctagccctcttgccccagagagatttaaatacagagagtcttagtttggactgaaagagaaaaattgctctgatctttctaaagcttgaacattaaggcttctttgcaattttcttagagctctttgatcgttaattatatctttccatcgaagagaagcagatttcttctgagatttctgaacagttcctgggtgtttccg

SEQ ID NO: 303981 - DNA, 4722 bp, Homo sapiens
aggttgttcctgaggtgggaggcggtacccgtggctgagaagaaggaggcctgagagcgacatgtccccggcggctcaggcggagcggcccgtggcgctgtttttctgagtccggggtggcctggcagccggccgaggacgagggtcggcgggggctgcccccgtggtggtggccgccatgctgggagcctgggcggttgagggaaccgctgtggcgctcctgcgactgctgctgctgctgctgccgccggcgatccggggacccgggctcggcgtggccggcgtggccggcgcggcgggggccgggctgcccgagagcgtcatttgggcggtcaacgcgggtggagaggcgcatgtggacgtgcacgggatccacttccgcaaggaccctttggaaggccgggtgggccgagcctcagactatggcatgaaactgccaatcctgcgttccaaccctgaggaccagatcctgtatcaaactgagcggtacaatgaggagacctttggctacgaagtgcccatcaaagaggagggggactacgtgctggtcttgaaatttgcagaggtctactttgcacagtcccagcaaaaggtatttgatgtacgattgaatggccacgtcgtggtgaaggacttggatatctttgatcgtgttgggcatagcacagctcacgatgaaattatacctatgagcatcagaaaggggaagctgagtgtccagggggaggtgtccaccttcacagggaaactctacattgagtttgtcaaggggtactatgacaatcccaaggtctgtgcactctacatcatggctgggacagtggatgatgtaccaaagcttcagcctcatccgggattggagaagaaagaagaggaagaagaagaagaagaatatgatgaagggtctaatctcaaaaaacagaccaataagaaccgggtgcagtcaggcccccgcacacccaacccctatgcctcggacaacagcagcctcatgtttcccatcctggtggccttcggagtcttcattccaaccctcttctgcctctgccggttgtgagaacaaatgactatcctgaacagggtggaggggtgtgggaaagaaaccagccatattggttttggtttctgtatttttcacaatgattaatgaacaaaaacaaagagaaaaaaacacacatcaattaaaggagacaaaaagaggcagagcgagtagagagcagccctcattcaccacctggtcccagacgtgcttcagtcctcgtcctctctttgtggctggctcccagccttctctttcctcttgaggatacttagggtaaactggatccttcctgctcaaggatcctcatttgtatacctagtggaaaggactctgaactcagaggagtcactgttcctttttttaggttagaaattaacagcagggaaatgccatcttattacctgagacgaccagcactgggagttaggtacggtctgaagttatgtctagataagacttcagacgtcctgggattgaaagaatgtgtgtgaaggggtagaatttgtgcggtaaagacttaaaaaaaaaagtagggagattaaaaaaaaagaaagaaaatgcttccttatctggaagcctttctggattaatccagtgatggtcccacctttagtgtttgagctttgtcattgcttgtctccctggcatgtgccagttatagactgtccagcatccaagacgtttcggttatgtcgggtcctcagatcgcctctgacttgttaccacaacaaatcattttgatttcagtgcctgttggggacttgatttcttctcagttttgtttgtttgtttgtttccttaatctggctcatttgaaatttcttctccctctcaaccatcccactaagttatagccaagaagggaaggagacacggggatttggggttctctgcttgaatgtcttctcctttaccacctcaccttgttggtacctccctccctggatctctgagccagcagccaggaggacctgacccagcagttctttactggcccctttgtagggccttgctgccagggggcagggatgctttccagcctgcagcaacagaacacttgaccttaaaagtctcttctggtctttggattagaaaaggcttatgttagcatagcttaagagcaacctcagagacttgagccctactaagtgactgaccactgtttagagtgtctggtatctgatgttcatttattcccatgttcttgtgtgtcacagttcagccagttttggtttatgcctagagctacttcaaggaactagactaattagctatataggcccagcgatgcttcttattgatcttaatagtatgcccctccttcccctgtcctttcatttctctatccaagtagcagtcaggttcttggtgtgatgggactgaaagaattccagtcagccagagccttggcagctctgaagctaaccttagcatctaagtgtcgatcttgaattccctgaaaaaatttctataggaaatgaagcttccctggtcccctcctttctggccattgtcatccatttcccagttagggcaacaatgaaggaggacccagccaagctagaaggaattttgtggatgggagacagcaggattagcttcagcttgggctggagcagtcaatataggatctcaggccaggcccgcttttctagaatgtgtttaattttgagtttgctttattagatatgttttttaagagctctgtatatttgaactgctccttatgtgacaaaataggtagctcttgggctcatgtcctgggttttggctctttaatgattactccaggccagcatttagtcgtttgagaattgtagcctgttgttttcgctgtgacttgggtctcagtgctagggtattgagtcaggcagctggagggttgtggcccgaggctgcagtcagaggtatacttcccatagtgcttcacacagctcccctgcttctaaaggataaggtactgtagccttggtcctggggaccacctgcctggggcagtggacatcctaactaaacaggcttctggcagtagctttggttcctatcccatcgaaattccccaaagccctgggccactgccattgggttagtcaagatgaaggaggaggactggctgcctccattttgccttgtttgttagtttgcctgggtctgtctgaggaaggagggggtcccgccttccacctcaacacatcccttcagtgactcagagtctcagaaggaaaccctgactcctggggccatttcctaatggtactgtaagccaagcagctttgcttctgcctctgtttccaagcccacccttttcccctgagctcagggttagggatgggcgctttcctctctggttgtgaacgaaaggaaggaacatctttctatggctaacaaaaactaaaggggaagtgaggaaacaggaagaagtatggtgggggctggggtagactcccctggagccaagcctatccagctaacaagagctccctggggctggtcacagctggctcatgatgctgaacttgaaagtttttttgtttttgtttttgttttgtggctcctccaagatataggtacatgaagtttaggttaaaggggtgggattctttatttttatttttgtattgtatgtgtcaagaattactctgttgttcaccttttgctttttgcactgtttgttctcttatctgtattttgagcttagtgctaggactgagaggctgcaccatagggaatgtatgggagatggtgaggggtgccagtgaggggtgcgtggaggagaggcctgggctcctctactggatctacaaggttcccccaggagtataaacacaaggagccaggattgtgctggcagccaaggaaacagtagtgcctgtttgagttggcagagagggccttggcacctcttgcatccaggcagtcttgtgagatgggggcacatagcactggggaaagcagaactccattctcacctctattttgagcttcagtgctttatttcagtatgaggaaaaacaacaacaaactgaagtgcgctttccgtcctttcaaaggacaactgtcgggaagggagagccgagttgcgaggtaggaggggagcactggcagggagagacattcttgactcctctcttccctggtgtgttgtgatccagggaatgaaaagaaatttgaccctggattggttctctccttggacttaaggaatcttaccttttccttccacaaagttctcccaggcaaggaccagctgcccattctgagcccagggcagcctcttcaaccattattggtctaacctggcttgtcaggaaaccaagcccacccttccacattgggcctggctgctctattctgtaccaagtactggagaaaaagcatcaagttcttagcccttgtagcttctaccctagtttcccatcctctctctgtggaggccaaaccaactctttgccagcagccacaacatgcattgacagcggcacagtgagatataactgatgggctttgaacctggttggccggggaagctgtaggggtggatagagctggctttccttctgggctgtctccatctgaccctaccccttccatgtcccaccccactcccaccaaaaagtacaaaatcaggatgtttttcactgtccattgctttgtgttttaataaacaatttgcagtgaca

SEQ ID NO: 303982 - DNA, 2395 bp, Homo sapiens
aggttgttcctgaggtgggaggcggtacccgtggctgagaagaaggaggcctgagagcgacatgtccccggcggctcaggcggagcggcccgtggcgctgtttttctgagtccggggtggcctggcagccggccgaggacgagggtcggcgggggctgcccccgtggtggtggccgccatgctgggagcctgggcggttgagggaaccgctgtggcgctcctgcgactgctgctgctgctgctgccgccggcgatccggggacccgggctcggcgtggccggcgtggccggcgcggcgggggccgggctgcccgagagcgtcatttgggcggtcaacgcgggtggagaggcgcatgtggacgtgcacgggatccacttccgcaaggaccctttggaaggccgggtgggccgagcctcagactatggcatgaaactgccaatcctgcgttccaaccctgaggaccagatcctgtatcaaactgagcggtacaatgaggagacctttggctacgaagtgcccatcaaagaggagggggactacgtgctggtcttgaaatttgcagaggtctactttgcacagtcccagcaaaaggtatttgatgtacgattgaatggccacgtcgtggtgaaggacttggatatctttgatcgtgttgggcatagcacagctcacgatgaaattatacctatgagcatcagaaaggggaagctgagtgtccagggggaggtgtccaccttcacagggaaactctacattgagtttgtcaaggggtactatgacaatcccaaggtctgtgcactctacatcatggctgggacagtggatgatgtaccaaagcttcagcctcatccgggattggagaagaaagaagaggaagaagaagaagaagaatatgatgaagggtctaatctcaaaaaacagaccaataagaaccgggtgcagtcaggcccccgcacacccaacccctatgcctcggacaacagcagcctcatgtttcccatcctggtggccttcggagtcttcattccaaccctcttctgcctctgccggttggcaggatgggtatgctttgggctttctccttctgtggccccggaggaaggagagactgaggcaaggcaaagtgatagtacactgaagcagaaccggaaacacccaggaactgttcagaaatctcagaagaaatctgcttctcttcgatggaaagatataattaacgatcaaagagctctaagctctttcagtccaaactaagactctctgtatttaaatctctctggggcaagagggctagatttcctcattttgttatgagactagattggtaccagtagatcagctgcctagcgagggcaggtttcttctttgcatctgtgtggcttgcttccagtctggcctgtcctttccagctgccttttgtctagcctgctatggggggccagattatcttgataagagcaggtgatttggggactagctgggttggcaggaaaagagcaggatggatctcttgggacaggttcccccaggagtataaacacaaggagccaggattgtgctggcagccaaggaaacagtagtgcctgtttgagttggcagagagggccttggcacctcttgcatccaggcagtcttgtgagatgggggcacatagcactggggaaagcagaactccattctcacctctattttgagcttcagtgctttatttcagtatgaggaaaaacaacaacaaactgaagtgcgctttccgtcctttcaaaggacaactgtcgggaagggagagccgagttgcgaggtaggaggggagcactggcagggagagacattcttgactcctctcttccctggtgtgttgtgatccagggaatgaaaagaaatttgaccctggattggttctctccttggacttaaggaatcttaccttttccttccacaaagttctcccaggcaaggaccagctgcccattctgagcccagggcagcctcttcaaccattattggtctaacctggcttgtcaggaaaccaagcccacccttccacattgggcctggctgctctattctgtaccaagtactggagaaaaagcatcaagttcttagcccttgtagcttctaccctagtttcccatcctctctctgtggaggccaaaccaactctttgccagcagccacaacatgcattgacagcggcacagtgagatataactgatgggctttgaacctggttggccggggaagctgtaggggtggatagagctggctttccttctgggctgtctccatctgaccctaccccttccatgtcccaccccactcccaccaaaaagtacaaaatcaggatgtttttcactgtccattgctttgtgttttaataaacaatttgcagtgaca

SEQ ID NO: 303983 - DNA, 1616 bp, Homo sapiens
tcggctagtagaggccggggtgaatcggccgaggctttccttccctcccctttgctggcctactctggcataattcaagtgtcttcttgccttggggatccttagtggcatcaaatggcaacatggaatattgtcctccatgcccctccagaaggacctaggagagtaggtgagctttccaaagtgagagacgaatctttctttctttttttttttaaagggcaggatgggtatgctttgggctttctccttctgtggccccggaggaaggagagactgaggcaaggcaaagtgatagtacactgaagcagaaccggaaacacccaggaactgttcagaaatctcagaagaaatctgcttctcttcgatggaaagatataattaacgatcaaagagctctaagaaaattgcaaagaagccttaatgttcaagctttagaaagatcagagcaatttttctctttcagtccaaactaagactctctgtatttaaatctctctggggcaagagggctagatttcctcattttgttatgagactagattggtaccagtagatcagctgcctagcgagggcaggtttcttctttgcatctgtgtggcttgcttccagtctggcctgtcctttccagctgccttttgtctagcctgctatggggggccagattatcttgataagagcaggtgatttggggactagctgggttggcaggaaaagagcaggatggatctcttgggacaggttcccccaggagtataaacacaaggagccaggattgtgctggcagccaaggaaacagtagtgcctgtttgagttggcagagagggccttggcacctcttgcatccaggcagtcttgtgagatgggggcacatagcactggggaaagcagaactccattctcacctctattttgagcttcagtgctttatttcagtatgaggaaaaacaacaacaaactgaagtgcgctttccgtcctttcaaaggacaactgtcgggaagggagagccgagttgcgaggtaggaggggagcactggcagggagagacattcttgactcctctcttccctggtgtgttgtgatccagggaatgaaaagaaatttgaccctggattggttctctccttggacttaaggaatcttaccttttccttccacaaagttctcccaggcaaggaccagctgcccattctgagcccagggcagcctcttcaaccattattggtctaacctggcttgtcaggaaaccaagcccacccttccacattgggcctggctgctctattctgtaccaagtactggagaaaaagcatcaagttcttagcccttgtagcttctaccctagtttcccatcctctctctgtggaggccaaaccaactctttgccagcagccacaacatgcattgacagcggcacagtgagatataactgatgggctttgaacctggttggccggggaagctgtaggggtggatagagctggctttccttctgggctgtctccatctgaccctaccccttccatgtcccaccccactcccaccaaaaagtacaaaatcaggatgtttttcactgtccattgctttgtgttttaataaacaatttgcagtgaca

SEQ ID NO: 303984 - DNA, 1566 bp, Homo sapiens
ctggctgactagaggacccttagaatcgtggtgctgctccaacatgtggtgtgtactggatttctggcttagatggaatattgtcctccatgcccctccagaaggacctaggagagtaggtgagctttccaaagtgagagacgaatctttctttctttttttttttaaagggcaggatgggtatgctttgggctttctccttctgtggccccggaggaaggagagactgaggcaaggcaaagtgatagtacactgaagcagaaccggaaacacccaggaactgttcagaaatctcagaagaaatctgcttctcttcgatggaaagatataattaacgatcaaagagctctaagaaaattgcaaagaagccttaatgttcaagctttagaaagatcagagcaatttttctctttcagtccaaactaagactctctgtatttaaatctctctggggcaagagggctagatttcctcattttgttatgagactagattggtaccagtagatcagctgcctagcgagggcaggtttcttctttgcatctgtgtggcttgcttccagtctggcctgtcctttccagctgccttttgtctagcctgctatggggggccagattatcttgataagagcaggtgatttggggactagctgggttggcaggaaaagagcaggatggatctcttgggacaggttcccccaggagtataaacacaaggagccaggattgtgctggcagccaaggaaacagtagtgcctgtttgagttggcagagagggccttggcacctcttgcatccaggcagtcttgtgagatgggggcacatagcactggggaaagcagaactccattctcacctctattttgagcttcagtgctttatttcagtatgaggaaaaacaacaacaaactgaagtgcgctttccgtcctttcaaaggacaactgtcgggaagggagagccgagttgcgaggtaggaggggagcactggcagggagagacattcttgactcctctcttccctggtgtgttgtgatccagggaatgaaaagaaatttgaccctggattggttctctccttggacttaaggaatcttaccttttccttccacaaagttctcccaggcaaggaccagctgcccattctgagcccagggcagcctcttcaaccattattggtctaacctggcttgtcaggaaaccaagcccacccttccacattgggcctggctgctctattctgtaccaagtactggagaaaaagcatcaagttcttagcccttgtagcttctaccctagtttcccatcctctctctgtggaggccaaaccaactctttgccagcagccacaacatgcattgacagcggcacagtgagatataactgatgggctttgaacctggttggccggggaagctgtaggggtggatagagctggctttccttctgggctgtctccatctgaccctaccccttccatgtcccaccccactcccaccaaaaagtacaaaatcaggatgtttttcactgtccattgctttgtgttttaataaacaatttgcagtgaca

SEQ ID NO: 303985 - DNA, 1102 bp, Homo sapiens
tgatctcctagaggatcccccagctgcatggtgtttgcagctgcattgtgtgtttgcagctgcattgtgtgtttgcagctgcattgtgtgtttgcagctggcattgtgtgtttccagctgccttttgtctagcctgctatggggggccagattatcttgataagagcaggtgatttggggactagctgggttggcaggaaaagagcaggatggatctcttgggacaggttcccccaggagtataaacacaaggagccaggattgtgctggcagccaaggaaacagtagtgcctgtttgagttggcagagagggccttggcacctcttgcatccaggcagtcttgtgagatgggggcacatagcactggggaaagcagaactccattctcacctctattttgagcttcagtgctttatttcagtatgaggaaaaacaacaacaaactgaagtgcgctttccgtcctttcaaaggacaactgtcgggaagggagagccgagttgcgaggtaggaggggagcactggcagggagagacattcttgactcctctcttccctggtgtgttgtgatccagggaatgaaaagaaatttgaccctggattggttctctccttggacttaaggaatcttaccttttccttccacaaagttctcccaggcaaggaccagctgcccattctgagcccagggcagcctcttcaaccattattggtctaacctggcttgtcaggaaaccaagcccacccttccacattgggcctggctgctctattctgtaccaagtactggagaaaaagcatcaagttcttagcccttgtagcttctaccctagtttcccatcctctctctgtggaggccaaaccaactctttgccagcagccacaacatgcattgacagcggcacagtgagatataactgatgggctttgaacctggttggccggggaagctgtaggggtggatagagctggctttccttctgggctgtctccatctgaccctaccccttccatgtcccaccccactcccaccaaaaagtacaaaatcaggatgtttttcactgtccattgctttgtgttttaataaacaatttgcagtgaca

SEQ ID NO: 303986 - DNA, 1360 bp, Homo sapiens
  misc_feature (52)..(52): n is a, c, g, or t
atgaaattcagaaggactgtgctcttaggctttccacgactttgttccccanggcagcaacagcttccaacgttggcagaatcttgagtatcaccaccaggtcagccacattgtgtcctgtagtcattgtcccctttttataggatcccacctgtcgaacttcttcaatttgcacttcaaatgtccctggagccacaatcagattatcaatcacattgtttatttttgtcaccagagaaaggatagatgcctgttcagcagaattgggagccaggtcctgattcctcttcagcaaggcctcactgaaggaagtttcatcaggtgctggcttgacccggggaaaggccatttcacacaaatagaagtcaaatgggatatgtggtacaaagggcctgaaccctcctcctgggcctcctctggaaccaagcaacccctaggggttgctgggttggcaggaaaagagcaggatggatctcttgggacaggttcccccaggagtataaacacaaggagccaggattgtgctggcagccaaggaaacagtagtgcctgtttgagttggcagagagggccttggcacctcttgcatccaggcagtcttgtgagatgggggcacatagcactggggaaagcagaactccattctcacctctattttgagcttcagtgctttatttcagtatgaggaaaaacaacaacaaactgaagtgcgctttccgtcctttcaaaggacaactgtcgggaagggagagccgagttgcgaggtaggaggggagcactggcagggagagacattcttgactcctctcttccctggtgtgttgtgatccagggaatgaaaagaaatttgaccctggattggttctctccttggacttaaggaatcttaccttttccttccacaaagttctcccaggcaaggaccagctgcccattctgagcccagggcagcctcttcaaccattattggtctaacctggcttgtcaggaaaccaagcccacccttccacattgggcctggctgctctattctgtaccaagtactggagaaaaagcatcaagttcttagcccttgtagcttctaccctagtttcccatcctctctctgtggaggccaaaccaactctttgccagcagccacaacatgcattgacagcggcacagtgagatataactgatgggctttgaacctggttggccggggaagctgtaggggtggatagagctggctttccttctgggctgtctccatctgaccctaccccttccatgtcccaccccactcccaccaaaaagtacaaaatcaggatgtttttcactgtccattgctttgtgttttaataaacaatttgcagtgaca

SEQ ID NO: 303987 - DNA, 932 bp, Homo sapiens
tgtcactgcaaattgtttattaaaacacaaagcaatggacagtgaaaaacatcctgattttgtactttttggtgggagtggggtgggacatggaaggggtagggtcagatggagacagcccagaaggaaagccagctctatccacccctacagcttccccggccaaccaggttcaaagcccatcagttatatctcactgtgccgctgtcaatgcatgttgtggctgctggcaaagagttggtttggcctccacagagagaggatgggaaactagggtagaagctacaagggctaagaacttgatgcctcatactgaaataaagcactgaagctcaaaatagaggtgagaatggagttctgctttccccagtgctatgtgcccccatctcacaagactgcctggatgcaagaggtgccaaggccctctctgccaactcaaacaggcactactgtttccttggctgccagcacaatcctggctccttgtgtttatactcctgggggaacctgtcccaagagatccatcctgctcttttcctgccaacccagctagtccccaaatcacctgctcttatcaagataatctggccccccatagcaggctagacaaaggcagctggaaaggacaggccagactggaagcaagccacacagatgcaagaagaaacctgccctcgctaggcagctgatctactggtaccaatctagtctcataacaaaatgaggaaatctagccctcttgccccagagagatttaaatacagagagtcttagtttggactgaaagagaaaaattgctctgatctttctaaagcttgaacattaaggcttctttgcaattttcttagagctctttgatcgttaattatatctttccatcgaagagaagcagatttcttctgagatttctgaacagttcctgggtgtttccg

SEQ ID NO: 303988 - DNA, 1169 bp, Homo sapiens
tgtcactgcaaattgtttattaaaacacaaagcaatggacagtgaaaaacatcctgattttgtactttttggtgggagtggggtgggacatggaaggggtagggtcagatggagacagcccagaaggaaagccagctctatccacccctacagcttccccggccaaccaggttcaaagcccatcagttatatctcactgtgccgctgtcaatgcatgttgtggaagggtgggcttggtttcctgacaagccaggttagaccaataatggttgaagaggctgccctgggctcagaatgggcagctggtccttgcctgggagaactttgtggaaggaaaaggtaagattccttaagtccaaggagagaaccaatccagggtcaaatttcttttcattccctggatcacaacacaccagggaagagaggagtcaagaatgtctctccctgccagtgctcccctcctacctcgcaactcggctctcccttcccgacagttgtcctttgaaaggacggaaagcgcacttcagtttgttgttgtttttcctcatactgaaataaagcactgaagctcaaaatagaggtgagaatggagttctgctttccccagtgctatgtgcccccatctcacaagactgcctggatgcaagaggtgccaaggccctctctgccaactcaaacaggcactactgtttccttggctgccagcacaatcctggctccttgtgtttatactcctgggggaacctgtcccaagagatccatcctgctcttttcctgccaacccagctagtccccaaatcacctgctcttatcaagataatctggccccccatagcaggctagacaaaggcagctggaaaggacaggccagactggaagcaagccacacagatgcaagaagaaacctgccctcgctaggcagctgatctactggtaccaatctagtctcataacaaaatgaggaaatctagccctcttgccccagagagatttaaatacagagagtcttagtttggactgaaagagaaaaattgctctgatctttctaaagcttgaacattaaggcttctttgcaattttcttagagctctttgatcgttaattatatctttccatcgaagagaagcagatttcttctgagatttctgaacagttcctgggtgtttccg

SEQ ID NO: 303989 - DNA, 3213 bp, Homo sapiens
  misc_feature (506)..(506): n is a, c, g, or t
  misc_feature (1249)..(1249): n is a, c, g, or t
  misc_feature (1346)..(1346): n is a, c, g, or t
  misc_feature (1376)..(1376): n is a, c, g, or t
agctctcactcctttcgtgagaaatgtattctcttccagatatatcccttcctcagcttttctgctctggcctatctttgaaccaccatgtaagctggtgagccagttcttcatggaaactgcatggtacccatcagtcttggctaaaaatgtctgttgacaaagatgaaagtcctgccatcccctcaagacttagccttatccgcaggtagaaggcctagagaggctatgtcccaaatcctacctcaatgctgaattagactgggctcttgcttgtgctagtctgtattgaagagattagtcaagttaagaaccaaagggttcttaaactgctaggagaagaatagtggtcaaaagaatggcttctttctatcttgaactgaagccctggacttcacgggcctctgatgaggattccgcttgcagccctaagagggtctacctatggagatgacccttagctgtgtgatgcatgcacctgaccttctcctctcccctgtcatccntccccattcctgccctgttccctgttggtatgtgtctgagtttatttcactgttaaatcgtgcgtttgcctgtctttcgcagatatctccatgtctcctcaacaaactggagctaagtagtggggagcagaccaaagccctgaaccagttagagagggtactactctttaagaacctcaaggtctctctccctctctttcccttcccctttttatttctttcaatgtttattttttatatataacacctgggtcccatttccattgtgtagagcacaacttactcctccctagtaacacagcacggctttggaagagttgcacgtgattgtagctttgcagtgttggaattctcctggggcatctggttgcctggatacaggagaaggaagacttgaacatcacatagttagcctagaaagcctggggtctgctgttaccttgtggggaggcttaagatctaccatttctagggaaaccgtgagggaccttcaagcaagacccttccccttctaccttatccttgtctcagagctggcatagagagcttaagcacagtcctcagctctatctggattacctggactgggtttggagggaaagggtagtccatctagttgggatcttttttttttttttttttcttggttaccattaaagaggtcattccaaggattagaactctagattgatggaaagaagccaggtgccaggatagcccaggacactgggaatactttgggntctgtgaagatgccctctgtcctctaaaagtcaaggtataggggagcttaggggagggatccaagctaaagattaccctaatctgcatatacctgcnttaggaagaaaggggagagaaggaggtgtnggctgtctgggctgtccatcacaagagtgtgcatgctgaaggtgtggttgtggacatacaggtcactgaaagtaaaaaactctgtgtatgtacacctagctagatagtccattggcccgtgttctctttgaatgcattgtgtcatttcatttgtgtgcttgcacagtctcaagctgcagctctcattagtggctatccagcatgttgccatgattattaacctgggacctgctccttttttgtaaagcttacactgtcctttggagtacagagtcatacagataaggtggcgtagaattccatgaatacctactgcccaccccacaccttcagaccttaggagagggagaatagctataccttttaagggctgaggcattcgtgagaactggcagcctcttggcccctactccagccagcaggctgagaacactaattgaaatgatcaggttggagcaagctttgcagaagatagagaaggaaacgtgaaaaactgatcctcgtatgggaaggaatctcaatgactgactggcttctcagtggaagtaggactgcctggagtccctgaaatgggggagcctcctggagagaaaggctacctcataaaagtagatccagttcttagtacttttgggagctcaatgataactgccagtagagccaggaggtctctcattgatctcttggcctcttgcccttttgcatgtttggcggactcttctcccataacattttttactatgaacttgatccagttgagctccagtggttcctggggagagaatccttttgcttcctccttagctatagcggtcagtacgcctgaagctcagttctaagcatatgactgcaggcattttggagatggatcatctagaagtataaatccagtatgaggctgttgctatgttactaagagctgggggaaggaagggctcagctgttcagcctcatctttattggaaggagctatgggtaggaatggaagaattgtgtggtttctaagcaaggaatcaaagattacccaggttctgagagcttgggggagcttgaggaagggagtcaatccctcactatcaaaaggaattgaacaggccatggacaataggatatattcagcctttaggaagaggcagagagaaaaagtgcttctgctctctttagagtcattctaatggtttctggaagagtgttgccattgcccaatccaggaatggtccaatccaagaatggtctatcagtctaggaatagtttagaatgactttgtagagggactgagttcaaacccaactgagaaaacatcagggcttaaaaaacaaattgggccgggcacagtggctcacacctgtaatcccagtactttgggaggccaaggcgggcggatcacgaggtcaggagatcgagaccatcctggctagcacggtgaaaccccgtctctactaaaaatacaaaaagaattagccaggcttggtggcgggcgcctgtagtcccagctactcaggagactgaggcaggagaatggcgtgaacccaggaggcggagcttgcagtgagccaagatcacgccactgcactccagcctgggtggcacagtgagactctgtctcaaaaaaaaaaaaaaaaaaaatggggcctaaacaaagtaactttgaacttagaatggaggaaatacataaaaacacagatcctagggaatagttaacaaacaggtgatagagattgtcccttgccactaaaagtaagctataggaagaacagaaatactgtacaggggaataaaagagatcttatttttttttttatacttggcgttttttgaataaaaaccttttgtctt

SEQ ID NO: 303990 - DNA, 433 bp, Homo sapiens
cagcagagagcacagcagcagcgtgacatgaccttctatcctgaactccacaaagaaactgggaggccactccttccttaactccaaggaatgagcttttgaccaatctgatacagaaattccagagagtaagagatatgttagctgggtgcagtggctcacacctgtaatcccagcactttgggaggctggggcaggcagatcacctaaggtcaggagttagagactagcctggccaacatagtgaaaccctgtctctactaaaaatacaaaaattatccaggcgtggtggtccacacctgtaatcccatttactcaggaggctgaggcaggagaatcacttgaacccaggaggcagaggttgcagtgagctgagatcgtgccactgcactccagcctgggtggcaaagctagactccatctcaaaaaaaaa

SEQ ID NO: 303991 - DNA, 281 bp, Homo sapiens
agcaagaggggagtgcaacagagcaaggagtcaaggaatcagtggccttaccatctgacaacataaaactgcatctggaaagaccaatagtgagagggccagagggacaggtagtctcattgatataacaaattgggagcagcagagagcacagcagcagcgtgacatgaccttctatcctgaactccacaaagaaactgggaggccactccttccttaactccaaggaatgagcttttgaccaatctgatacagaaattccagagagtaagagatatgtt

SEQ ID NO: 303992 - DNA, 387 bp, Homo sapiens
catctttctacagtatttcctacagctaaagcctcaggccattgcctaattaacaatgaagatttcatggacatcctacacttcaggattacttgactatctcaaacacataaatcaaaatgggccaagtagcaaatcttgatgaatttccactcttaccatccattcttactaccaacagtataactgaacatgtgattagaatgatctatattaatgtttagttatttttggttgagtgctaaatatttcagaaggctacttaacatgtaagataccaacttcaacactgtaataacatatactgtgaaaacattcctaaaaagtaaccaaagggtttgctaactctgcttcaacatccaacaacacaaaactatatgattttta

SEQ ID NO: 303993 - DNA, 2040 bp, Homo sapiens
agcctggctctcagcacacccagctgcctgagaccctccttcaacctccctagaggacagccccactctgcctcctgctcccccagggcagcaccatgtggcccctgtggctctgctgggcactctgggtgctgcccctggctggccccggggcggccctgaccgaggagcagctcctgggcagcctgctgcggcagctgcagctcagcgaggtgcccgtactggacagggccgacatggagaagctggtcatccccgcccacgtgagggcccagtatgtagtcctgctgcggcgcaccacggggaccgctcccgcggaaagaggttcagccagagcttccgagaggtggccggcaggttcctggcgtcggaggccagcacacacctgctggtgttcggcatggagcagcggctgccgcccaacagcgagctggtgcaggccgtgctgcggctcttccaggagccggtccccaaggccgcgctgcacaggcacgggcggctgtccccgcgcagcgcccaggcccgggtgaccgtcgagtggctgcgcgtccgcgacgacggctccaaccgcacctccctcatcgactccaggctggtgtccgtccacgagagcggctggaaggccttcgacgtgaccgaggccgtgaacttctggcagcagctgagccggccccggcagccgctgctgctacaggtgtcggtgcagagggagcatctgggcccgctggcgtccggcgcccacaagctggtccgctttgcctcgcagggggcgccagccgggcttggggagccccagctggagctgcacaccctggacctcagggactatggagctcagggcgactgtgaccctgaagcaccaatgaccgagggcacccgctgctgccgccaggagatgtacattgacctgcaggggatgaagtgggccaagaactgggtgctggagcccccgggcttcctggcttacgagtgtgtgggcacctgccagcagcccccggaggccctggccttcaattggccatttctggggccgcgacagtgtatcgcctcggagactgcctcgctgcccatgatcgtcagcatcaaggagggaggcaggaccaggccccaggtggtcagcctgcccaacatgagggtgcagaagtgcagctgtgcctcggatggggcgctcgtgccaaggaggctccagccataggcgcctggtgtatccattgagccctctaactgaacgtgtgcatagaggtggtcttaatgtaggtcttaactttatacttagcaagttactccatcccaatttagtgctcctgtgtgaccttcgccctgtgtccttccatttcctgtctttcccgtccatcacccatcctaagcacttacgtgagtaaataatgcagctcagatgctgagctctagtaggaaatgctggcatgctgattacaagatacagctgagcaatgcacacattttcagctgggagtttctgttctctggcaaattcttcactgagtctggaacaataataccctatgattagaactggggaaacagaactgaattgctgtgttatatgaggaattaaaaccttcaaatctctatttcccccaaatactgacccattctggacttttgtaaacatacctaggcccctgttcccctgagagggtgctaagaggaaggatgaagggcttcaggctgggggcagtggacagggaattgggatacctggattctggttctgacagggccacaagctaggatctctaacaaacgcagaaggctttggctcgtcatttcctcttaaaaaggaggagctgggcttcagctctaagaacttcattgccctggggatcagacagcccctacctacccctgcccactcctctggagactgagccttgcccgtgcatatttaggtcatttcccacactgtcttagagaacttgtcaccagaaaccacatgtatttgcatgttttttgttaatttagctaaagcaattgaatgtagatactcagaagaaataaaaaatgatgtttcaaaaaaaa

SEQ ID NO: 303994 - DNA, 1420 bp, Homo sapiens
agcctggctctcagcacacccagctgcctgagaccctccttcaacctccctagaggacagccccactctgcctcctgctcccccagggcagcaccatgtggcccctgtggctctgctgggcactctgggtgctgcccctggctggccccggggcggccctgaccgaggagcagctcctgggcagcctgctgcggcagctgcagctcagcgaggtgcccgtactggacagggccgacatggagaagctggtcatccccgcccacgtgagggcccagtatgtagtcctgctgcggcgcaccacggggaccgctcccgcggaaagaggttcagccagagcttccgagaggtggccggcaggttcctggcgtcggaggccagcacacacctgctggtgttcggcatggagcagcggctgccgcccaacagcgagctggtgcaggccgtgctgcggctcttccaggagccggtccccaaggccgcgctgcacaggcacgggcggctgtccccgcgcagcgcccaggcccgggtgaccgtcgagtggctgcgcgtccgcgacgacggctccaaccgcacctccctcatcgactccaggctggtgtccgtccacgagagcggctggaaggccttcgacgtgaccgaggccgtgaacttctggcagcagctgagccggccccggcagccgctgctgctacaggtgtcggtgcagagggagcatctgggcccgctggcgtccggcgcccacaagctggtccgctttgcctcgcagggggcgccagccgggcttggggagccccagctggagctgcacaccctggacctcagggactatggagctcagggcgactgtgaccctgaagcaccaatgaccgagggcacccgctgctgccgccaggagatgtacattgacctgcaggggatgaagtgggccaagaactgggtgctggagcccccgggcttcctggcttacgagtgtgtgggcacctgccagcagcccccggaggccctggccttcaattggccatttctggggccgcgacagtgtatcgcctcggagactgcctcgctgcccatgatcgtcagcatcaaggagggaggcaggaccaggccccaggtggtcagcctgcccaacatgagggtgcagaagtgcagctgtgcctcggatggggcgctcgtgccaaggaggctccagccataggcgcctggtgtatccattgagccctctaactgaacgtgtgcatagaggtggtcttaatgagcaataatggggaatgagagcaacacaatgatctgaagaaaggacccccaacctctagggcgcaagactataatagttaaatttatatagatgaggctttcatttatgatatttctattttctcacacaactctcattccaaaaatattaaacaatcactcacgg

SEQ ID NO: 303995 - DNA, 1278 bp, Homo sapiens
  misc_feature (5)..(5): n is a, c, g, or t
aactntaggctaggtacgaggctggttggaattcggccgaggcagatggccacaccggcggtaccagtaagtgctcctccggccacgccaaccccagtcccggcggcggccccagcctcagttccagcgccaacgccagcaccggctgcggctccggttcccgctgcggctccagcctcatcctcagaccctgcggcagcagcggctgcaactgcggctcctggccagaccccggcctcagcgcaagctccagcgcagaccccagcgcccgctctgcctggtcctgctcttccagggcccttccccggcggccgcgtggtcaggctgcacccagtcattttggcctccattgtggacagctacgagagacgcaacgagggtgctgcccgagttatcgggaccctgttgggaactgtcgacaaacactcagtggaggtcaccaattgcttttcagtgccgcacaatgagtcagaagatgaagtggctgttgacatggaatttgctaagaatatgtatgaactgcataaaaaagtttctccaaatgagctcatcctgggctggtacgctacgggccatgacatcacagagcactctgtgctgatccatgagtactacagccgagaggcccccaaccccatccacctcactgtggacacaagtctccagaacggccgcatgagcatcaaagcctacgtcagcactttaatgggagtccctgggaggaccatgggagtgatgttcacgcctctgacagtgaaatacgcgtactacgacactgaacgcatcggagttgacctgatcatgaagacctgctttagccccaacagagtgattggactctcaagtgacttgcagcaagtaggaggggcatcagctcgcatccaggatgccctgagtacagtgttgcaatatgcagaggatgtactgtctggaaaggtgtcagctgacaatactgtgggccgcttcctgatgagcctggttaaccaagtaccgaaaatagttcccgatgactttgagaccatgctcaacagcaacatcaatgaccttttgatggtgacctacctggccaacctcacacagtcacagattgcactcaatgaaaaacttgtaaacctgtgaatggaccccaagcagtacacttgctggtctaggtattaaccccaggactcagaagtgaaggagaaatgggttttttgtggtcttgagtcacactgagatagtcagttgtgtgtgactctaataaacggagcctaccttttgtaaatttaaaaaaaaaaa

SEQ ID NO: 303996 - DNA, 444 bp, Homo sapiens
tataagtgtatcagtagagataagaaagccttctcaagcatttcctttctgtcttctacctttttgacttttattcagtctctcctagctgtcatttatccacagctgtcctcatacccagtgtctaccatagagctggccaaagccagcctttttgctccctttccacccaaccccccactcattgtgtattctttgtcttccaggacccttttgatggtgacctacctggccaacctcacacagtcacagattgcactcaatgaaaaacttgtaaacctgtgaatggaccccaagcagtacacttgctggtctaggtattaaccccaggactcagaagtgaaggagaaatgggttttttgtggtcttgagtcacactgagatagtcagttgtgtgtgactctaataaacggagcctaccttttgtaaatttaaaaaaaaaaa

SEQ ID NO: 303997 - DNA, 376 bp, Homo sapiens
tggaccagttggtgcccaggaagtctcggtaggaagtaaggcccaggcgcaggagcagctgtggcccccgagagccaataggcgccagggtggctgagtgcaggcggaacttgggggcgtcgaagagccagggttgggcctttagccgggtctcccaggcgccgtcgcgtgcgtaggcgacggcgcagaccccagcgcccgctctgcctggtcctgctcttccagggcccttccccggcggccgcgtggtcaggctgcacccagtcattttggcctccattgtggacagctacgagagacgcctgcagacccaggtcttcaagctgggcttggcacaagtccatccaccacgctcgcgtgctgatcctccagcgcc

SEQ ID NO: 303998 - DNA, 1278 bp, Homo sapiens
agattccatttgaacgtttgaaagtatagcttctttctcgacaagatggccacaccggcggtaccagtaagtgctcctccggccacgccaaccccagtcccggcggcggccccagcctcagttccagcgccaacgccagcaccggctgcggctccggttcccgctgcggctccagcctcatcctcagaccctgcggcagcagcggctgcaactgcggctcctggccagaccccggcctcagcgcaagctccagcgcagaccccagcgcccgctctgcctggtcctgctcttccagggcccttccccggcggccgcgtggtcaggctgcacccagtcattttggcctccattgtggacagctacgagagacgcaacgagggtgctgcccgagttatcgggaccctgttgggaactgtcgacaaacactcagtggaggtcaccaattgcttttcagtgccgcacaatgagtcagaagatgaagtggctgttgacatggaatttgctaagaatatgtatgaactgcataaaaaagtttctccaaatgagctcatcctgggctggtacgctacgggccatgacatcacagagcactctgtgctgatccatgagtactacagccgagaggcccccaaccccatccacctcactgtggacacaagtctccagaacggccgcatgagcatcaaagcctacgtcagcactttaatgggagtccctgggaggaccatgggagtgatgttcacgcctctgacagtgaaatacgcgtactacgacactgaacgcatcggagttgacctgatcatgaagacctgctttagccccaacagagtgattggactctcaagtgacttgcagcaagtaggaggggcatcagctcgcatccaggatgccctgagtacagtgttgcaatatgcagaggatgtactgtctggaaaggtgtcagctgacaatactgtgggccgcttcctgatgagcctggttaaccaagtaccgaaaatagttcccgatgactttgagaccatgctcaacagcaacatcaatgaccttttgatggtgacctacctggccaacctcacacagtcacagattgcactcaatgaaaaacttgtaaacctgtgaatggaccccaagcagtacacttgctggtctaggtattaaccccaggactcagaagtgaaggagaaatgggttttttgtggtcttgagtcacactgagatagtcagttgtgtgtgactctaataaacggagcctaccttttgtaaatttaaaaaaaaaaa

SEQ ID NO: 303999 - DNA, 1450 bp, Homo sapiens
aaagacagaatctcactctgtcgcccaggctggagtgcagtggcaaatctcagctcgctaaaacttccgcctctcaggctcaagcaattctcatgcctcggcatccctagtaactgggattacaagtgggcgccaccatgcccagataattttttctatttttagtagagacagagtttcactgtgatagtcaggttggtcccgaactcttgtcctcatggccacaccggcggtaccagtaagtgctcctccggccacgccaaccccagtcccggcggcggccccagcctcagttccagcgccaacgccagcaccggctgcggctccggttcccgctgcggctccagcctcatcctcagaccctgcggcagcagcggctgcaactgcggctcctggccagaccccggcctcagcgcaagctccagcgcagaccccagcgcccgctctgcctggtcctgctcttccagggcccttccccggcggccgcgtggtcaggctgcacccagtcattttggcctccattgtggacagctacgagagacgcaacgagggtgctgcccgagttatcgggaccctgttgggaactgtcgacaaacactcagtggaggtcaccaattgcttttcagtgccgcacaatgagtcagaagatgaagtggctgttgacatggaatttgctaagaatatgtatgaactgcataaaaaagtttctccaaatgagctcatcctgggctggtacgctacgggccatgacatcacagagcactctgtgctgatccatgagtactacagccgagaggcccccaaccccatccacctcactgtggacacaagtctccagaacggccgcatgagcatcaaagcctacgtcagcactttaatgggagtccctgggaggaccatgggagtgatgttcacgcctctgacagtgaaatacgcgtactacgacactgaacgcatcggagttgacctgatcatgaagacctgctttagccccaacagagtgattggactctcaagtgacttgcagcaagtaggaggggcatcagctcgcatccaggatgccctgagtacagtgttgcaatatgcagaggatgtactgtctggaaaggtgtcagctgacaatactgtgggccgcttcctgatgagcctggttaaccaagtaccgaaaatagttcccgatgactttgagaccatgctcaacagcaacatcaatgaccttttgatggtgacctacctggccaacctcacacagtcacagattgcactcaatgaaaaacttgtaaacctgtgaatggaccccaagcagtacacttgctggtctaggtattaaccccaggactcagaagtgaaggagaaatgggttttttgtggtcttgagtcacactgagatagtcagttgtgtgtgactctaataaacggagcctaccttttgtaaatttaaaaaaaaaaa

SEQ ID NO: 304000 - DNA, 1261 bp, Homo sapiens
  misc_feature (5)..(5): n is a, c, g, or t
aactntaggctaggtacgaggctggttggaattcggccgaggcagatggccacaccggcggtaccagtaagtgctcctccggccacgccaaccccagtccccagttccagcgccaacgccagcaccggctgcggctccggttcccgctgcggctccagcctcatcctcagaccctgcggcagcagcggctgcaactgcggctcctggccagaccccggcctcagcgcaagctccagcgcagaccccagcgcccgctctgcctggtcctgctcttccagggcccttccccggcggccgcgtggtcaggctgcacccagtcattttggcctccattgtggacagctacgagagacgcaacgagggtgctgcccgagttatcgggaccctgttgggaactgtcgacaaacactcagtggaggtcaccaattgcttttcagtgccgcacaatgagtcagaagatgaagtggctgttgacatggaatttgctaagaatatgtatgaactgcataaaaaagtttctccaaatgagctcatcctgggctggtacgctacgggccatgacatcacagagcactctgtgctgatccatgagtactacagccgagaggcccccaaccccatccacctcactgtggacacaagtctccagaacggccgcatgagcatcaaagcctacgtcagcactttaatgggagtccctgggaggaccatgggagtgatgttcacgcctctgacagtgaaatacgcgtactacgacactgaacgcatcggagttgacctgatcatgaagacctgctttagccccaacagagtgattggactctcaagtgacttgcagcaagtaggaggggcatcagctcgcatccaggatgccctgagtacagtgttgcaatatgcagaggatgtactgtctggaaaggtgtcagctgacaatactgtgggccgcttcctgatgagcctggttaaccaagtaccgaaaatagttcccgatgactttgagaccatgctcaacagcaacatcaatgaccttttgatggtgacctacctggccaacctcacacagtcacagattgcactcaatgaaaaacttgtaaacctgtgaatggaccccaagcagtacacttgctggtctaggtattaaccccaggactcagaagtgaaggagaaatgggttttttgtggtcttgagtcacactgagatagtcagttgtgtgtgactctaataaacggagcctaccttttgtaaatttaaaaaaaaaaa

SEQ ID NO: 304001 - DNA, 1252 bp, Homo sapiens
acacaaaacaaactaggcagtagagcggtgttaatggagaggcacggggacagtaagtctcctccggcacgccaacccagtcccggcggcggcagttccagcgccaacgccagcaccggctgcggctccggttcccgctgcggctccagcctcatcctcagaccctgcggcagcagcggctgcaactgcggctcctggccagaccccggcctcagcgcaagctccagcgcagaccccagcgcccgctctgcctggtcctgctcttccagggcccttccccggcggccgcgtggtcaggctgcacccagtcattttggcctccattgtggacagctacgagagacgcaacgagggtgctgcccgagttatcgggaccctgttgggaactgtcgacaaacactcagtggaggtcaccaattgcttttcagtgccgcacaatgagtcagaagatgaagtggctgttgacatggaatttgctaagaatatgtatgaactgcataaaaaagtttctccaaatgagctcatcctgggctggtacgctacgggccatgacatcacagagcactctgtgctgatccatgagtactacagccgagaggcccccaaccccatccacctcactgtggacacaagtctccagaacggccgcatgagcatcaaagcctacgtcagcactttaatgggagtccctgggaggaccatgggagtgatgttcacgcctctgacagtgaaatacgcgtactacgacactgaacgcatcggagttgacctgatcatgaagacctgctttagccccaacagagtgattggactctcaagtgacttgcagcaagtaggaggggcatcagctcgcatccaggatgccctgagtacagtgttgcaatatgcagaggatgtactgtctggaaaggtgtcagctgacaatactgtgggccgcttcctgatgagcctggttaaccaagtaccgaaaatagttcccgatgactttgagaccatgctcaacagcaacatcaatgaccttttgatggtgacctacctggccaacctcacacagtcacagattgcactcaatgaaaaacttgtaaacctgtgaatggaccccaagcagtacacttgctggtctaggtattaaccccaggactcagaagtgaaggagaaatgggttttttgtggtcttgagtcacactgagatagtcagttgtgtgtgactctaataaacggagcctaccttttgtaaatttaaaaaaaaaaa

SEQ ID NO: 304002 - DNA, 1609 bp, Homo sapiens
  misc_feature (5)..(5): n is a, c, g, or t
  misc_feature (1374)..(1374): n is a, c, g, or t
  misc_feature (1376)..(1376): n is a, c, g, or t
  misc_feature (1421)..(1421): n is a, c, g, or t
  misc_feature (1425)..(1425): n is a, c, g, or t
aactntaggctaggtacgaggctggttggaattcggccgaggcagatggccacaccggcggtaccagtaagtgctcctccggccacgccaaccccagtcccggcggcggccccagcctcagttccagcgccaacgccagcaccggctgcggctccggttcccgctgcggctccagcctcatcctcagaccctgcggcagcagcggctgcaactgcggctcctggccagaccccggcctcagcgcaagctccagcgcagaccccagcgcccgctctgcctggtcctgctcttccagggcccttccccggcggccgcgtggtcaggctgcacccagtcattttggcctccattgtggacagctacgagagacgcaacgagggtgctgcccgagttatcgggaccctgttgggaactgtcgacaaacactcagtggaggtcaccaattgcttttcagtgccgcacaatgagtcagaagatgaagtggctgttgacatggaatttgctaagaatatgtatgaactgcataaaaaagtttctccaaatgagctcatcctgggctggtacgctacgggccatgacatcacagagcactctgtgctgatccatgagtactacagccgagaggcccccaaccccatccacctcactgtggacacaagtctccagaacggccgcatgagcatcaaagcctacgtcagcactttaatgggagtccctgggaggaccatgggagtgatgttcacgcctctgacagtgaaatacgcgtactacgacactgaacgcatcggagttgacctgatcatgaagacctgctttagccccaacagagtgattggactctcaagtgacttgcagcaagtaggaggggcatcagctcgcatccaggatgccctgagtacagtgttgcaatatgcagaggatgtactgtctggaaaggtgtcagctgacaatactgtgggccgcttcctgatgagcctggttaaccaagtaccgaaaatagttcccgatgactttgagaccatgctcaacagcaacatcaatgaccttttgatggtgacctacctggccaacctcacacagtcacagattgcactcaatgaaaaacttgtaaacctgtgaatggaccccaagcagtacacttgctggtctaggtattaaccccaggactcagaagtgaaggagaaatgggttttttgtggtcttgagtcacactgagatagtcagttgtgtgtgactctaataaacggagcctaccttttgtaaatttaaaaaaaaaaatttcatcttatgtgagtttattgccgggtggaagggaggaaaatgttttagatcacacagaaactaggaagtgaatattgtaggtagagaagttgntnatgtgtttggcatgttactgttttaccaaactgttctttggtttncaanatggaaaggtgtccattggcaaaacaagcttttcttgaggattcatgtgatttctacaggaaatgaaattagaatccatggggaaaaactagctaagaaattggatgcttaatctgaactaaagagtataggtgtatcatatcttaaataacttatattagatgggccttgccctggtcgggac

SEQ ID NO: 304003 - DNA, 1365 bp, Homo sapiens
  misc_feature (5)..(5): n is a, c, g, or t
  misc_feature (1291)..(1291): n is a, c, g, or t
  misc_feature (1293)..(1293): n is a, c, g, or t
  misc_feature (1295)..(1295): n is a, c, g, or t
  misc_feature (1308)..(1308): n is a, c, g, or t
  misc_feature (1311)..(1312): n is a, c, g, or t
  misc_feature (1317)..(1317): n is a, c, g, or t
  misc_feature (1328)..(1328): n is a, c, g, or t
  misc_feature (1330)..(1330): n is a, c, g, or t
  misc_feature (1334)..(1334): n is a, c, g, or t
  misc_feature (1342)..(1342): n is a, c, g, or t
  misc_feature (1355)..(1355): n is a, c, g, or t
  misc_feature (1361)..(1361): n is a, c, g, or t
aactntaggctaggtacgaggctggttggaattcggccgaggcagatggccacaccggcggtaccagtaagtgctcctccggccacgccaaccccagtcccggcggcggccccagcctcagttccagcgccaacgccagcaccggctgcggctccggttcccgctgcggctccagcctcatcctcagaccctgcggcagcagcggctgcaactgcggctcctggccagaccccggcctcagcgcaagctccagcgcagaccccagcgcccgctctgcctggtcctgctcttccagggcccttccccggcggccgcgtggtcaggctgcacccagtcattttggcctccattgtggacagctacgagagacgcaacgagggtgctgcccgagttatcgggaccctgttgggaactgtcgacaaacactcagtggaggtcaccaattgcttttcagtgccgcacaatgagtcagaagatgaagtggctgttgacatggaatttgctaagaatatgtatgaactgcataaaaaagtttctccaaatgagctcatcctgggctggtacgctacgggccatgacatcacagagcactctgtgctgatccatgagtactacagccgagaggcccccaaccccatccacctcactgtggacacaagtctccagaacggccgcatgagcatcaaagcctacgtcagcactttaatgggagtccctgggaggaccatgggagtgatgttcacgcctctgacagtgaaatacgcgtactacgacactgaacgcatcggagttgacctgatcatgaagacctgctttagccccaacagagtgattggactctcaagtgacttgcagcaagtaggaggggcatcagctcgcatccaggatgccctgagtacagtgttgcaatatgcagaggatgtactgtctggaaaggtgtcagctgacaatactgtgggccgcttcctgatgagcctggttaaccaagtaccgaaaatagttcccgatgactttgagaccatgctcaacagcaacatcaatgaccttttgatggtgacctacctggccaacctcacacagtcacagattgcactcaatgaaaaacttgtaaacctgtgaatggaccccaagcagtacacttgctggtctaggtattaaccccaggactcagaagtgaaggagaaatgggttttttgtggtcttgagtcacactgagatagtcagttgtgtgtgactctaataaacggagcctaccttttgtaaatttaaaaaaaaaaaaaaaaaaaaaaantntntgtggggcggttnggnnctganaaaagtttttnanaacnaattttgntggggggcggggncccagntagg

SEQ ID NO: 304004 - DNA, 1358 bp, Homo sapiens
  misc_feature (5)..(5): n is a, c, g, or t
  misc_feature (1357)..(1357): n is a, c, g, or t
aactntaggctaggtacgaggctggttggaattcggccgaggcagatggccacaccggcggtaccagtaagtgctcctccggccacgccaaccccagtcccggcggcggccccagcctcagttccagcgccaacgccagcaccggctgcggctccggttcccgctgcggctccagcctcatcctcagaccctgcggcagcagcggctgcaactgcggctcctggccagaccccggcctcagcgcaagctccagcgcagaccccagcgcccgctctgcctggtcctgctcttccagggcccttccccggcggccgcgtggtcaggctgcacccagtcattttggcctccattgtggacagctacgagagacgcaacgagggtgctgcccgagttatcgggaccctgttgggaactgtcgacaaacactcagtggaggtcaccaattgcttttcagtgccgcacaatgagtcagaagatgaagtggctgttgacatggaatttgctaagaatatgtatgaactgcataaaaaagtttctccaaatgagctcatcctgggctggtacgctacgggccatgacatcacagagcactctgtgctgatccatgagtactacagccgagaggcccccaaccccatccacctcactgtggacacaagtctccagaacggccgcatgagcatcaaagcctacgtcagcactttaatgggagtccctgggaggaccatgggagtgatgttcacgcctctgacagtgaaatacgcgtactacgacactgaacgcatcggagttgacctgatcatgaagacctgctttagccccaacagagtgattggactctcaagtgacttgcagcaagtaggaggggcatcagctcgcatccaggatgccctgagtacagtgttgcaatatgcagaggatgtactgtctggaaaggtgtcagctgacaatactgtgggccgcttcctgatgagcctggttaaccaagtaccgaaaatagttcccgatgactttgagaccatgctcaacagcaacatcaatgaccttttgatggtgacctacctggccaacctcacacagtcacagattgcactcaatgaaaaacttgtaaacctgtgaatggaccccaagcagtacacttgctggtctaggtattaaccccaggactcagaagttggctgttgacatggaatttgctaagaatatgtatgaactgcataaaaaagtttctccaaatgagctcatcctgggctggtacgctacgggccatgacatcacagagcactctgtgctgatccatgagtactacagccgagaggcccccaaccccatccacctcactgtggacacgatgttna

SEQ ID NO: 304005 - DNA, 1192 bp, Homo sapiens
  misc_feature (5)..(5): n is a, c, g, or t
aactntaggctaggtacgaggctggttggaattcggccgaggcagatggccacaccggcggtaccagtaagtgctcctccggccacgccaaccccagtcccggcggcggccccagcctcagttccagcgccaacgccagcaccggctgcggctccggttcccgctgcggctccagcctcatcctcagaccctgcggcagcagcggctgcaactgcggctcctggccagaccccggcctcagcgcaagctccagcgcagaccccagcgcccgctctgcctggtcctgctcttccagggcccttccccggcggccgcgtggtcaggctgcacccagtcattttggcctccattgtggacagctacgagagacgcaacgagggtgctgcccgagttatcgggaccctgttgggaactgtcgacaaacactcagtggaggtcaccaattgcttttcagtgccgcacaatgagtcagaagatgaagtggctgttgacatggaatttgctaagaatatgtatgaactgcataaaaaagtttctccaaatgagctcatcctgggctggtacgctacgggccatgacatcacagagcactctgtgctgatccatgagtactacagccgagaggcccccaaccccatccacctcactgtggacacaagtctccagaacggccgcatgagcatcaaagcctacgtcagcactttaatgggagtccctgggaggaccatgggagtgatgttcacgcctctgacagtgaaatacgcgtactacgacactgaacgcatcggagttgacctgatcatgaagacctgctttagccccaacagagtgattggactctcaagtgacttgcagcaagtaggaggggcatcagctcgcatccaggatgccctgagtacagtgttgcaatatgcagaggatgtactgtctggaaaggtgtcagctgacaatactgtgggccgcttcctgatgagcctggttaaccaagtaccgaaaatagttcccgatgactttgagaccatgctcaacagcaacatcaatgaccttttgatggtgacctacctggccaacctcacacagtcacagattgcactcaatgaaaaacttgtaaacctgtgaatggaccccaagcagtacattgtgtgtgactctaataaacggagcctaccttttgtaaatttaaaaaaaaaaa

SEQ ID NO: 304006 - DNA, 1311 bp, Homo sapiens
  misc_feature (5)..(5): n is a, c, g, or t
  misc_feature (1235)..(1235): n is a, c, g, or t
aactntaggctaggtacgaggctggttggaattcggccgaggcagatggccacaccggcggtaccagtaagtgctcctccggccacgccaaccccagtcccggcggcggccccagcctcagttccagcgccaacgccagcaccggctgcggctccggttcccgctgcggctccagcctcatcctcagaccctgcggcagcagcggctgcaactgcggctcctggccagaccccggcctcagcgcaagctccagcgcagaccccagcgcccgctctgcctggtcctgctcttccagggcccttccccggcggccgcgtggtcaggctgcacccagtcattttggcctccattgtggacagctacgagagacgcaacgagggtgctgcccgagttatcgggaccctgttgggaactgtcgacaaacactcagtggaggtcaccaattgcttttcagtgccgcacaatgagtcagaagatgaagtggctgttgacatggaatttgctaagaatatgtatgaactgcataaaaaagtttctccaaatgagctcatcctgggctggtacgctacgggccatgacatcacagagcactctgtgctgatccatgagtactacagccgagaggcccccaaccccatccacctcactgtggacacaagtctccagaacggccgcatgagcatcaaagcctacgtcagcactttaatgggagtccctgggaggaccatgggagtgatgttcacgcctctgacagtgaaatacgcgtactacgacactgaacgcatcggagttgacctgatcatgaagacctgctttagccccaacagagtgattggactctcaagtgacttgcagcaagtaggaggggcatcagctcgcatccaggatgccctgagtacagtgttgcaatatgcagaggatgtactgtctggaaaggtgtcagctgacaatactgtgggccgcttcctgatgagcctggttaaccaagtaccgaaaatagttcccgatgactttgagaccatgctcaacagcaacatcaatgatgagtgccccttcctgagccccttcttgcctggtttcttcccccacctcagcacatacactcaaatgtgaaaagagttgggtgaggtgacctggggagtaggatagagacagggcttcacctatagccccactgaagtccaggttgggaggaaggaagaggtgtgttatgcgtggttggagacttccttccntctcccatgattccattgtctcatttactgctgatactactgtgacttactgtctaaattcgtgatggaaagaaac

SEQ ID NO: 304007 - DNA, 1146 bp, Homo sapiens
  misc_feature (5)..(5): n is a, c, g, or t
  misc_feature (912)..(912): n is a, c, g, or t
aactntaggctaggtacgaggctggttggaattcggccgaggcagatggccacaccggcggtaccagtaagtgctcctccggccacgccaaccccagtcccggcggcggccccagcctcagttccagcgccaacgccagcaccggctgcggctccggttcccgctgcggctccagcctcatcctcagaccctgcggcagcagcggctgcaactgcggctcctggccagaccccggcctcagcgcaagctccagcgcagaccccagcgcccgctctgcctggtcctgctcttccagggcccttccccggcggccgcgtggtcaggctgcacccagtcattttggcctccattgtggacagctacgagagacgcaacgagggtgctgcccgagttatcgggaccctgttgggaactgtcgacaaacactcagtggaggtcaccaattgcttttcagtgccgcacaatgagtcagaagatgaagtggctgttgacatggaatttgctaagaatatgtatgaactgcataaaaaagtttctccaaatgagctcatcctgggctggtacgctacgggccatgacatcacagagcactctgtgctgatccatgagtactacagccgagaggcccccaaccccatccacctcactgtggacacaagtctccagaacggccgcatgagcatcaaagcctacgtcagcactttaatgggagtccctgggaggaccatgggagtgatgttcacgcctctgacagtgaaatacgcgtactacgacactgaacgcatcggagttgacctgatcatgaagacctgctttagccccaacagagtgattggactctcaagtgacttgcagcaagtaggaggggcatcagctcgcatccaggatgccctgagtacagtgttgcaattncgacgcatgacatgtgccggaacagtcggcaagtgaccactacaggtaggccccgcccgaatcaacggagtaaaccaatgacggaacaaaagccccgaaagattggaaccagtccaacaggaaagaagagctaagcaataggcaacaccgggcaccgtccaagcacacttgccacacgcaaaaatcaacagacatggcgaacacgaacgccgcgacgacacacagagcaacgcg

SEQ ID NO: 304008 - DNA, 1072 bp, Homo sapiens
tgatacaattcagctcggtacccacaccacctgagtcagaagatgaagtgagtgggaatccaagctgtccctctgcagtttttagctgttcatttgctcggctcccctcacggtccctcccacactcataactagagctcctgtagccaaggagcttcttcccgtttgtacgtacttcctgggcctcttctgtttattgggggcggcctcttgtcctttttaaccaatttttctttggacttctggcttcttagcttgctttcctgccttccctcttagggttgacatggaatttgctaagaatatgtatgaactgcataaaaaagtttctccaaatgagctcatcctgggctggtacgctacgggccatgacatcacagagcactctgtgctgatccatgagtactacagccgagaggcccccaaccccatccacctcactgtggacacaagtctccagaacggccgcatgagcatcaaagcctacgtcagcactttaatgggagtccctgggaggaccatgggagtgatgttcacgcctctgacagtgaaatacgcgtactacgacactgaacgcatcggagttgacctgatcatgaagacctgctttagccccaacagagtgattggactctcaagtgacttgcagcaagtaggaggggcatcagctcgcatccaggatgccctgagtacagtgttgcaatatgcagaggatgtactgtctggaaaggtgtcagctgacaatactgtgggccgcttcctgatgagcctggttaaccaagtaccgaaaatagttcccgatgactttgagaccatgctcaacagcaacatcaatgaccttttgatggtgacctacctggccaacctcacacagtcacagattgcactcaatgaaaaacttgtaaacctgtgaatggaccccaagcagtacacttgctggtctaggtattaaccccaggactcagaagtgaaggagaaatgggttttttgtggtcttgagtcacactgagatagtcagttgtgtgtgactctaataaacggagcctaccttttgtaaatttaaaaaaaaaaa

SEQ ID NO: 304009 - DNA, 1150 bp, Homo sapiens
  misc_feature (5)..(5): n is a, c, g, or t
aactntaggctaggtacgaggctggttggaattcggccgaggcagatggccacaccggcggtaccagtaagtgctcctccggccacgccaaccccagtcccggcggcggccccagcctcagttccagcgccaacgccagcaccggctgcggctccggttcccgctgcggctccagcctcatcctcagaccctgcggcagcagcggctgcaactgcggctcctggccagaccccggcctcagcgcaagctccagcgcagaccccagcgcccgctctgcctggtcctgctcttccagggcccttccccggcggccgcgtggtcaggctgcacccagtcattttggcctccattgtggacagctacgagagacgcaacgagggtgctgcccgagttatcgggaccctgttgggaactgtcgacaaacactcagtggaggtcaccaattgcttttcagtgccgcacaatgagtcagaagatgaagtggctgttgacatggaatttgctaagaatatgtatgaactgcataaaaaagtttctccaaatgagctcatcctgggctggtacgctacgggccatgacatcacagagcactctgtgctgatccatgagtactacagccgagaggcccccaaccccatccacctcactgtggacacaagtctccagaacggccgcatgagcatcaaagcctacgtcagcactttaatgggagtccctgggaggaccatgggagtgatgttcacgcctctgacagtgaaatacgcgtactacgacactgaacgcatcggagttgacctgatcatgaagacctgctttagccccaacagagtgattggactctcaagtgacttgcagcaagttaccgaaaatagttcccgatgactttgagaccatgctcaacagcaacatcaatgaccttttgatggtgacctacctggccaacctcacacagtcacagattgcactcaatgaaaaacttgtaaacctgtgaatggaccccaagcagtacacttgctggtctaggtattaaccccaggactcagaagtgaaggagaaatgggttttttgtggtcttgagtcacactgagatagtcagttgtgtgtgactctaataaacggagcctaccttttgtaaatttaaaaaaaaaaa

SEQ ID NO: 304010 - DNA, 1244 bp, Homo sapiens
  misc_feature (5)..(5): n is a, c, g, or t
aactntaggctaggtacgaggctggttggaattcggccgaggcagatggccacaccggcggtaccagtaagtgctcctccggccacgccaaccccagtcccggcggcggccccagcctcagttccagcgccaacgccagcaccggctgcggctccggttcccgctgcggctccagcctcatcctcagaccctgcggcagcagcggctgcaactgcggctcctggccagaccccggcctcagcgcaagctccagcgcagaccccagcgcccgctctgcctggtcctgctcttccagggcccttccccggcggccgcgtggtcaggctgcacccagtcattttggcctccattgtggacagctacgagagacgcaacgagggtgctgcccgagttatcgggaccctgttgggaactgtcgacaaacactcagtggaggtcaccaattgcttttcagtgccgcacaatgagtcagaagatgaagtggctgttgacatggaatttgctaagaatatctcatcctgggctggtacgctacgggccatgacatcacagagcactctgtgctgatccatgagtactacagccgagaggcccccaaccccatccacctcactgtggacacaagtctccagaacggccgcatgagcatcaaagcctacgtcagcactttaatgggagtccctgggaggaccatgggagtgatgttcacgcctctgacagtgaaatacgcgtactacgacactgaacgcatcggagttgacctgatcatgaagacctgctttagccccaacagagtgattggactctcaagtgacttgcagcaagtaggaggggcatcagctcgcatccaggatgccctgagtacagtgttgcaatatgcagaggatgtactgtctggaaaggtgtcagctgacaatactgtgggccgcttcctgatgagcctggttaaccaagtaccgaaaatagttcccgatgactttgagaccatgctcaacagcaacatcaatgaccttttgatggtgacctacctggccaacctcacacagtcacagattgcactcaatgaaaaacttgtaaacctgtgaatggaccccaagcagtacacttgctggtctaggtattaaccccaggactcagaagtgaaggagaaatgggttttttgtggtcttgagtcacactgagatagtcagttgtgtgtgactctaataaacggagcctaccttttgtaaatttaaaaaaaaaaa

SEQ ID NO: 304011 - DNA, 1183 bp, Homo sapiens
  misc_feature (5)..(5): n is a, c, g, or t
aactntaggctaggtacgaggctggttggaattcggccgaggcagatggccacaccggcggtaccagtaagtgctcctccggccacgccaaccccagtcccggcggcggccccagcctcagttccagcgccaacgccagcaccggctgcggctccggttcccgctgcggctccagcctcatcctcagaccctgcggcagcagcggctgcaactgcggctcctggccagaccccggcctcagcgcaagctccagcgcagaccccagcgcccgctctgcctggtcctgctcttccagggcccttccccggcggccgcgtggtcaggctgcacccagtcattttggcctccattgtggacagctacgagagacgcaacgagggtgctgcccgagttatcgggaccctgttgggaactgtcgacaaacactcagtggaggtcaccaattgcttttcagtgccgcacaatgagtcagaagatgaagtggctcacagagcactctgtgctgatccatgagtactacagccgagaggcccccaaccccatccacctcactgtggacacaagtctccagaacggccgcatgagcatcaaagcctacgtcagcactttaatgggagtccctgggaggaccatgggagtgatgttcacgcctctgacagtgaaatacgcgtactacgacactgaacgcatcggagttgacctgatcatgaagacctgctttagccccaacagagtgattggactctcaagtgacttgcagcaagtaggaggggcatcagctcgcatccaggatgccctgagtacagtgttgcaatatgcagaggatgtactgtctggaaaggtgtcagctgacaatactgtgggccgcttcctgatgagcctggttaaccaagtaccgaaaatagttcccgatgactttgagaccatgctcaacagcaacatcaatgaccttttgatggtgacctacctggccaacctcacacagtcacagattgcactcaatgaaaaacttgtaaacctgtgaatggaccccaagcagtacacttgctggtctaggtattaaccccaggactcagaagtgaaggagaaatgggttttttgtggtcttgagtcacactgagatagtcagttgtgtgtgactctaataaacggagcctaccttttgtaaatttaaaaaaaaaaa

SEQ ID NO: 304012 - DNA, 1203 bp, Homo sapiens
  misc_feature (5)..(5): n is a, c, g, or t
aactntaggctaggtacgaggctggttggaattcggccgaggcagatggccacaccggcggtaccagtaagtgctcctccggccacgccaaccccagtcccggcggcggccccagcctcagttccagcgccaacgccagcaccggctgcggctccggttcccgctgcggctccagcctcatcctcagaccctgcggcagcagcggctgcaactgcggctcctggccagaccccggcctcagcgcaagctccagcgcagaccccagcgcccgctctgcctggtcctgctcttccagggcccttccccggcggccgcgtggtcaggctgcacccagtcattttggcctccattgtggacagctacgagagacgcaacgagggtgctgcccgagttatcgggaccctgttgggaactgtcgacaaacactcagtggaggtcaccaattgcttttcagtgccgcacaatgagtcagaagatgaagtggctgttgacatggaatttgctaagaatatgtatgaactgcataaaaaagtttctccaaatgagctcatcctgggctggtacgctacgggccatgacataagtctccagaacggccgcatgagcatcaaagcctacgtcagcactttaatgggagtccctgggaggaccatgggagtgatgttcacgcctctgacagtgaaatacgcgtactacgacactgaacgcatcggagttgacctgatcatgaagacctgctttagccccaacagagtgattggactctcaagtgacttgcagcaagtaggaggggcatcagctcgcatccaggatgccctgagtacagtgttgcaatatgcagaggatgtactgtctggaaaggtgtcagctgacaatactgtgggccgcttcctgatgagcctggttaaccaagtaccgaaaatagttcccgatgactttgagaccatgctcaacagcaacatcaatgaccttttgatggtgacctacctggccaacctcacacagtcacagattgcactcaatgaaaaacttgtaaacctgtgaatggaccccaagcagtacacttgctggtctaggtattaaccccaggactcagaagtgaaggagaaatgggttttttgtggtcttgagtcacactgagatagtcagttgtgtgtgactctaataaacggagcctaccttttgtaaatttaaaaaaaaaaa

SEQ ID NO: 304013 - DNA, 512 bp, Homo sapiens
actagttctctctctcctcgtgccgaattcggcacgagaagacctgctttagccccaacagagtgattggactctcaagtgacttgcagcaagtaggaggggcatcagctcgcatccaggatgccctgagtacagtgttgcaatatgcagaggatgtactgtctggaaaggtgtcagctgacaatactgtgggccgcttcctgatgagcctggttaaccaagtaccgaaaatagttcccgatgactttgagaccatgctcaacagcaacatcaatgaccttttgatggtgacctacctggccaacctcacacagtcacagattgcactcaatgaaaaacttgtaaacctgtgaatggaccccaagcagtacacttgctggtctaggtattaaccccaggactcagaagtgaaggagaaatgggttttttgtggtcttgagtcacactgagatagtcagttgtgtgtgactctaataaacggagcctaccttttgtaaatttaaaaaaaaaaa

SEQ ID NO: 304014 - DNA, 779 bp, Homo sapiens
  misc_feature (5)..(5): n is a, c, g, or t
aactntaggctaggtacgaggctggttggaattcggccgaggcagatggccacaccggcggtaccagtaagtgctcctccggccacgccaaccccagtcccggcggcggccccagcctcagttccagcgccaacgccagcaccggctgcggctccggttcccgctgcggctccagcctcatcctcagaccctgcggcagcagcggctgcaactgcggctcctggccagaccccggcctcagcgcaagctccagcgcagaccccagcgcccgctctgcctggtcctgctcttccagggcccttccccggcggccgcgtggtcaggctgcacccagtcattttggcctccattgtggacagctacgagagacgcaacgagggtgctgcccgagttatcgggaccctgttgggaactgtcgacaaacactcagtggaggtcaccaattgcttttcagtgccgcacaatgagtcagaagatgaagtggctgttgacatggaatttgctaagaatatgtatgaactgcataaaaaagtttctccaaatgagctcatcctgggctggtacgctacgggccatgacattcacagattgcactcaatgaaaaacttgtaaacctgtgaatggaccccaagcagtacacttgctggtctaggtattaaccccaggactcagaagtgaaggagaaatgggttttttgtggtcttgagtcacactgagatagtcagttgtgtgtgactctaataaacggagcctaccttttgtaaatttaaaaaaaaaaa

SEQ ID NO: 304015 - DNA, 740 bp, Homo sapiens
tacgggccatgacatcacagagcactctgtgctgatccatgagtactacagccgagaggcccccaaccccatccacctcactgtggacacaagtctccagaacggccgcatgagcatcaaagcctacgtcagcactttaatgggagtccctgggaggaccatgggagtgatgttcacgcctctgacagtgaaatacgcgtactacgacactgaacgcatcggagttgacctgatcatgaagacctgctttagccccaacagagtgattggactctcaagtgacttgcagcaagtaggaggggcatcagctcgcatccaggatgccctgagtacagtgttgcaatatgcagaggatgtactgtctggaaaggtgtcagctgacaatactgtgggccgcttcctgatgagcctggttaaccaagtaccgaaaatagttcccgatgactttgagaccatgctcaacagcaacatcaatgaccttttgatggtgacctacctggccaacctcacacagtcacagattgcactcaatgaaaaacttgtaaacctgtgaatggaccccaagcagtacacttgctggtctaggtattaaccccaggactcagaagtgaaggagaaatgggttttttgtggtcttgagtcacactgagatagtcagttgtgtgtgactctaataaacggagcctaccttttgtaaatttaaaaaaaaaaaaaaaaaaaaagtaaagcttattgtaaaa

SEQ ID NO: 304016 - DNA, 1566 bp, Homo sapiens
cagtctcacttcagttccttttgcatgaagagctcagaatcaaaagaggaaaccaacccctaagatgagctttccatgtaaatttgtagccagcttccttctgattttcaatgtttcttccaaaggtgcagtctccaaagagattacgaatgccttggaaacctggggtgccttgggtcaggacatcaacttggacattcctagttttcaaatgagtgatgatattgacgatataaaatgggaaaaaacttcagacaagaaaaagattgcacaattcagaaaagagaaagagactttcaaggaaaaagatacatataagctatttaaaaatggaactctgaaaattaagcatctgaagaccgatgatcaggatatctacaaggtatcaatatatgatacaaaaggaaaaaatgtgttggaaaaaatatttgatttgaagattcaagagagggtctcaaaaccaaagatctcctggacttgtatcaacacaaccctgacctgtgaggtaatgaatggaactgaccccgaattaaacctgtatcaagatgggaaacatctaaaactttctcagagggtcatcacacacaagtggaccaccagcctgagtgcaaaattcaagtgcacagcagggaacaaagtcagcaaggaatccagtgtcgagcctgtcagctgtccagagaaaggtctggacatctatctcatcattggcatatgtggaggaggcagcctcttgatggtctttgtggcactgctcgttttctatatcaccaaaaggaaaaaacagaggagtcggagaaatgatgaggagctggagacaagagcccacagagtagctactgaagaaaggggccggaagccccaccaaattccagcttcaacccctcagaatccagcaacttcccaacatcctcctccaccacctggtcatcgttcccaggcacctagtcatcgtcccccgcctcctggacaccgtgttcagcaccagcctcagaagaggcctcctgctccgtcgggcacacaagttcaccagcagaaaggcccgcccctccccagacctcgagttcagccaaaacctccccatggggcagcagaaaactcattgtccccttcctctaattaaaaaagatagaaactgtctttttcaataaaaagcactgtggatttctgccctcctgatgtgcatatccgtacttccatgaggtgttttctgtgtgcagaacattgtcacctcctgaggctgtgggccacagccacctctgcatcttcgaactcagccatgtggtcaacatctggagtttttggtctcctcagagagctccatcacaccagtaaggagaagcaatataagtgtgattgcaagaatggtagaggaccgagcacagaaatcttagagatttcttgtcccctctcaggtcatgtgtagatgcgataaatcaagtgattggtgtgcctgggtctcactacaagcagcctatctgcttaagagactctggagtttcttatgtgccctggtggacacttgcccaccatcctgtgagtaaaagtgaaataaaagctttgactaga

SEQ ID NO: 304017 - DNA, 1129 bp, Homo sapiens
caggcatttctagcccctgagagcagtttcccaaagagcctgcagagggagcttcccaaggaccttgggtccttccagggttgacaccactcaccaccctctgtgagcctgggagttatggggtgaaaggtcccaacaagctcttctatctgcttgatgcaggaggcagcatccttggccagagtaatgggctctctgcctggacccctcccagccatcccacttctcttccttttgcagagaaaggtctggacatctatctcatcattggcatatgtggaggaggcagcctcttgatggtctttgtggcactgctcgttttctatatcaccaaaaggaaaaaacagaggagtcggagaaatgatgaggagctggagacaagagcccacagagtagctactgaagaaaggggccggaagccccaccaaattccagcttcaacccctcagaatccagcaacttcccaacatcctcctccaccacctggtcatcgttcccaggcacctagtcatcgtcccccgcctcctggacaccgtgttcagcaccagcctcagaagaggcctcctgctccgtcgggcacacaagttcaccagcagaaaggcccgcccctccccagacctcgagttcagccaaaacctccccatggggcagcagaaaactcattgtccccttcctctaattaaaaaagatagaaactgtctttttcaataaaaagcactgtggatttctgccctcctgatgtgcatatccgtacttccatgaggtgttttctgtgtgcagaacattgtcacctcctgaggctgtgggccacagccacctctgcatcttcgaactcagccatgtggtcaacatctggagtttttggtctcctcagagagctccatcacaccagtaaggagaagcaatataagtgtgattgcaagaatggtagaggaccgagcacagaaatcttagagatttcttgtcccctctcaggtcatgtgtagatgcgataaatcaagtgattggtgtgcctgggtctcactacaagcagcctatctgcttaagagactctggagtttcttatgtgccctggtggacacttgcccaccatcctgtgagtaaaagtgaaataaaagctttgactaga

SEQ ID NO: 304018 - DNA, 1137 bp, Homo sapiens
aaccccttcccatgcgctctaaccatgaggttcttgctctcagggaacaatttctaggtcagcacagaggtagggttccaggtctgcgtgctctctctgatcatgggagccccaggcacaaagccctccacccatgtgtcttcttcctgctgattccttgagttctcttgtcctaggctttcactctaccttatggtgagcacttctttctctcctacaagcttagagttctcagatagtaggggcaacttctgcttcctcattgcatcccccaaagcagctagcatggcgccttgcatataaaaggtactcaatatttacattgatttcacctggccaagatgaactctattgaggttttgttgttgcagatgaggagctggagacaagagcccacagagtagctactgaagaaaggggccggaagccccaccaaattccagcttcaacccctcagaatccagcaacttcccaacatcctcctccaccacctggtcatcgttcccaggcacctagtcatcgtcccccgcctcctggacaccgtgttcagcaccagcctcagaagaggcctcctgctccgtcgggcacacaagttcaccagcagaaaggcccgcccctccccagacctcgagttcagccaaaacctccccatggggcagcagaaaactcattgtccccttcctctaattaaaaaagatagaaactgtctttttcaataaaaagcactgtggatttctgccctcctgatgtgcatatccgtacttccatgaggtgttttctgtgtgcagaacattgtcacctcctgaggctgtgggccacagccacctctgcatcttcgaactcagccatgtggtcaacatctggagtttttggtctcctcagagagctccatcacaccagtaaggagaagcaatataagtgtgattgcaagaatggtagaggaccgagcacagaaatcttagagatttcttgtcccctctcaggtcatgtgtagatgcgataaatcaagtgattggtgtgcctgggtctcactacaagcagcctatctgcttaagagactctggagtttcttatgtgccctggtggacacttgcccaccatcctgtgagtaaaagtgaaataaaagctttgactaga

SEQ ID NO: 304019 - DNA, 1379 bp, Homo sapiens
gagcgatctagaggatcccgtatgttatcccaacacattgacgatataaaatgggaaaaaacttcagacaagaaaaagattgcacaattcagaaaagagaaagagactttcaaggaaaaagatacatataagctatttaaaaatggaactctgaaaattaagcatctgaagaccgatgatcaggatatctacaaggtatcaatatatgatacaaaaggaaaaaatgtgttggaaaaaatatttgatttgaagattcaagagagggtctcaaaaccaaagatctcctggacttgtatcaacacaaccctgacctgtgaggtaatgaatggaactgaccccgaattaaacctgtatcaagatgggaaacatctaaaactttctcagagggtcatcacacacaagtggaccaccagcctgagtgcaaaattcaagtgcacagcagggaacaaagtcagcaaggaatccagtgtcgagcctgtcagctgtccagagaaaggtctggacatctatctcatcattggcatatgtggaggaggcagcctcttgatggtctttgtggcactgctcgttttctatatcaccaaaaggaaaaaacagaggagtcggagaaatgatgaggagctggagacaagagcccacagagtagctactgaagaaaggggccggaagccccaccaaattccagcttcaacccctcagaatccagcaacttcccaacatcctcctccaccacctggtcatcgttcccaggcacctagtcatcgtcccccgcctcctggacaccgtgttcagcaccagcctcagaagaggcctcctgctccgtcgggcacacaagttcaccagcagaaaggcccgcccctccccagacctcgagttcagccaaaacctccccatggggcagcagaaaactcattgtccccttcctctaattaaaaaagatagaaactgtctttttcaataaaaagcactgtggatttctgccctcctgatgtgcatatccgtacttccatgaggtgttttctgtgtgcagaacattgtcacctcctgaggctgtgggccacagccacctctgcatcttcgaactcagccatgtggtcaacatctggagtttttggtctcctcagagagctccatcacaccagtaaggagaagcaatataagtgtgattgcaagaatggtagaggaccgagcacagaaatcttagagatttcttgtcccctctcaggtcatgtgtagatgcgataaatcaagtgattggtgtgcctgggtctcactacaagcagcctatctgcttaagagactctggagtttcttatgtgccctggtggacacttgcccaccatcctgtgagtaaaagtgaaataaaagctttgactaga

SEQ ID NO: 304020 - DNA, 1566 bp, Homo sapiens
gcctcagtcagcccccgggggaggccatgaacgccacggggaccccggtggcccccgagtcctgccaacagctggcggccggcgggcacagccggctcattgttctgcactacaaccactcgggccggctggccgggcgcggggggccggaggatggcggcctgggggccctgcgggggctgtcggtggccgccagctgcctggtggtgctggagaacttgctggtgctggcggccatcaccagccacatgcggtcgcgacgctgggtctactattgcctggtgaacatcacgctgagtgacctgctcacgggcgcggcctacctggccaacgtgctgctgtcgggggcccgcaccttccgtctggcgcccgcccagtggttcctacgggagggcctgctcttcaccgccctggccgcctccaccttcagcctgctcttcactgcaggggagcgctttgccaccatggtgcggccggtggccgagagcggggccaccaagaccagccgcgtctacggcttcatcggcctctgctggctgctggccgcgctgctggggatgctgcctttgctgggctggaactgcctgtgcgcctttgaccgctgctccagccttctgcccctctactccaagcgctacatcctcttctgcctggtgatcttcgccggcgtcctggccaccatcatgggcctctatggggccatcttccgcctggtgcaggccagcgggcagaaggccccacgcccagcggcccgccgcaaggcccgccgcctgctgaagacggtgctgatgatcctgctggccttcctggtgtgctggggcccactcttcgggctgctgctggccgacgtctttggctccaacctctgggcccaggagtacctgcggggcatggactggatcctggccctggccgtcctcaactcggcggtcaaccccatcatctactccttccgcagcagggaggtgtgcagagccgtgctcagcttcctctgctgcgggtgtctccggctgggcatgcgagggcccggggactgcctggcccgggccgtcgaggctcactccggagcttccaccaccgacagctctctgaggccaagggacagctttcgcggctcccgctcgctcagctttcggatgcgggagcccctgtccagcatctccagcgtgcggagcatctgaagttgcagtcttgcgtgtggatggtgcagccaccgggtgcgtgccaggcaggccctcctggggtacaggaagctgtgtgcacgcagcctcgcctgtatggggagcagggaacgggacaggcccccatggtcttcccggtggcctctcggggcttctgacgccaaatgggcttcccatggtcaccctggacaaggaggcaaccaccccacctccccgtaggagcagagagcaccctggtgtgggggcgagtgggttccccacaaccccgcttctgtgtgattctggggaagtcccggcccctctctgggcctcagtagggctcccaggctgcaaggggtggactgtgggatgcatgccctggcaacattgaagttcgatcatggta

SEQ ID NO: 304021 - DNA, 1866 bp, Homo sapiens
  misc_feature (1144)..(1144): n is a, c, g, or t
cagggatacaacagagtggaggaagctggaatacagaatgcacttagaaggaggctggattggaggtgaaaactgagttgccagttcagagtttgagctggtagctgggcagaaagcaggctagttaattgaaggactttgtacagattctttacaggctaatatgatttcccaaatgattggatgcatcatatataaaggaaagcaactgagaagagaaagactgtgtagaacaggtttagggggaagaattatggactaagttttaggtacatgaagtttggaattttatctcttgagtgtattaaaaataaccaagattcaagatgagggtagccttgaaacaaaagagaggagctcaaatcattggaagagaggagtgtaactttgacataggtatgactgcagcagtgagggcagcaaagaaaagtactaggtaatttctaaccctatccatatgtgatgagtcactaatcagagttgtgtgcctaagcttctaatgcaggtcttggtgagaaatgatgactctagattgatgaagaggaagaacaaaatccagtccttattggtggaataacagaagcaaatataagaatgtctcctttgctactggctatacttcagtggttacagcttaggccaatgagatatttggcagaggcttgcaagttgggaagagatttctttctgaaataaaacaacaaagctttctgagagacattttcctctattctgaactgtggatattagccctggggagcagtagccaccttgcaaccatgagggaaaaagtctagggaagaaagacaacacaggaaaggtggcagagctgggacactgctggagggttgttacccaaggcagcacttaatatatccaccagttgaacaatgagaacacttggacacagggtggggaacgtcacacactcgggcctgtcgtggggtggggggacgggggagggatagcattaggagacatacctaatgtaaacgacaagttaatgggtgcagcacaccaacatggcacatgtatacatatgtaacaaacctgcatgttgtgcacatgtaccctagaacttaaagtataataaaaagaaagaaaaagaaagaaagaaagaaagaaaagaaaagaaaaggaaagnaaagaaaagaaaagaaaagaaaagaaaaaagaaaaagaaatatctccaccaacagggatagggctatgtgctgtggatttttaagcttatatatatttttttcttttggagacaaggtctctctctagcacccaggtaggagtgtagtggtatgatcatagttttttgtaacctccaactcctgggctcataacattataaaacttaaatggaatgctcatataagaaaataattcaaaatcataaatacaaaatgaatgagggatcaatcttttgacagaatagtccagagttacttacactctggattaaactatttgttttggtaaactatttgtttactagatacataatatatgaattattagaaaatctattaagaaaaatcagataagggaaataggtactctcacaatattcaaattggtcttgaaaatttataaaggtaattgaagcacattttcctttatatcaaagaaataaaaatgagacttccactttccatcagagatgcagggagcaggaatgtctcacccacacccttacaatagaaaaagatggataaaatgcaaatcataacttttcttgaacccatcaggagttgagcttaccaggcaaacagctaactggaaatctagagagagatgggctcctgtaagaagacataggatttgaacacttgtttacttgaagcagaagtcaaccagtgctgtataagtaaa

SEQ ID NO: 304022 - DNA, 637 bp, Homo sapiens
tctgcctccaggcacagtaagagagagaacctccaggttgtccagaagcccggccaaatgcgctactctcctcacctgcctggtccgacggctgaggtctggcctgcttgttgtattaccatctcttttcccaacaggtctctgagatctggcatgcatatttgaacaatcactatcaagtcctctcacaggctcacatccaacaaatggatttactgggcaaactatttgagaatgacactggcttggatgaagcccaagaagcagaagccattcgcatcctgacttcaatcttgaacattcgagaatctacatctgacaaagccccccaaaaaaccatctttgttctgaagatcctggtcatgctttactacctgatgatgaattcttcaaaggcaagtttccctaaaaaagcaacacgtctaaaatgaaggtagaaattcaactagttgaactcaaaatttgtgttttgcccaattccaatagcttttgccctcagagcaagccctcactccaaagaggttcagatgctcacgatgtttctcctgtgttgagtctagcctgcataatggaaattggattgtcttcttcccccgagggttcccagtcttgcatagataaagagagtctgaggcag

SEQ ID NO: 304023 - DNA, 1789 bp, Homo sapiens
accggccactgtacgggcctttctggacttggactccttgggagtcgtttctcggccatttgacccgtgggacttgtgggttttgtgctgctttttctttctttcttccccttttccaacttcagcaatacacccagatgttagtcgagtcacgtcccgccgccctctgcccttgaaatgctggcaagtacgcagccccgcgatcgtcacgtgacgccggggttcagcgtatccttgctgggcaaccgtcttagagaccagcactgctggctgcaccatgaatgtgatctacccactggcagtccccaaggggcgcagactctgctgtgaggtgtgcgaagccccagccgagcgggtgtgcgcggcctgcacagtcacttattactgtggcgtggtacatcagaaggctgactgggacagcatccatgagaaaatatgtcagctcttgattccactgcgcacttccatgcccttctacaattcagaggaagaacggcagcatggcctgcagcagctgcagcagcggcagaagtatttgattgaattctgctacaccatagcccagaaatacctctttgaagggaaacacgaagatgctgtaccagcagctttgcagtcccttcgcttccgtgtgaagctgtatggcctgagctccgtagagcttgtgcctgcttacctgctgttggccgaggccagccttggtctgggccgaatcgttcaggctgaagaatatctattccaagcccagtggacagtcctcaaatcaactgactgtagtaatgccacccactctttactgcatcggaatctgggacttctctatatagctaagaaaaactatgaagaggcccgttatcatctggccaatgatatttattttgccagttgtgcatttggaacagaggacattaggacttcaggaggctacttccacctggctaatatattctatgaccttaaaaagttggacctggcagacacattgtacaccaaggtctctgagatctggcatgcatatttgaacaatcactatcaagtcctctcacaggctcacatccaacaaatggatttactgggcaaactatttgagaatgacactggcttggatgaagcccaagaagcagaagccattcgcatcctgacttcaatcttgaacattcgagaatctacatctgacaaagccccccaaaaaaccatctttgttctgaagatcctggtcatgctttactacctgatgatgaattcttcaaaggcacaggaatatggcatgagggccctcagtctagccaaagaacaacagcttgatgtccatgagcaaagcaccattcaagagttattaagtctcatttcaactgaagaccatcccattacttagtgacccatgagctctgcatcaagggttattccaggggctactgaagatctaatatattccagccttgcacaactgctttgaggtactgtagactgctgaagtttccaccctcttcccctgggattgcacacatagctgttatttttttcttacacagcatattaagggaatataaagctttaggcatagaaatcactaaaaactgtgtttgtcatgacctttgtacttgatttatcatgactttgtatgactgagtaatatgtagtcagatcactaatatggtatttgtaattaaactacaaatagtttgtcatttcccagaagtcttccaacgatgcatgtttcatacacttttgctaaaggaggggtaaaggagggggtagggaataaagctatattggaacaaaaaaaaaa

SEQ ID NO: 304024 - DNA, 1773 bp, Homo sapiens
tcgtcctttcgcgcccatgttgcagccgttggcggacttgctgtcgctgggtcgcatgactagggcgtatcctggctgagcctctgtgtcccatatctgaggcacgtacgcccattgagtgttcacgctcgagtcacgtcccgccgccctctgcccttgaaatgctggcaagtacgcagccccgcgatcgtcacgtgacgccggggttcagcgtatccttgctgggcaaccgtcttagagaccagcactgctggctgcaccatgaatgtgatctacccactggcagtccccaaggggcgcagactctgctgtgaggtgtgcgaagccccagccgagcgggtgtgcgcggcctgcacagtcacttattactgtggcgtggtacatcagaaggctgactgggacagcatccatgagaaaatatgtcagctcttgattccactgcgcacttccatgcccttctacaattcagaggaagaacggcagcatggcctgcagcagctgcagcagcggcagaagtatttgattgaattctgctacaccatagcccagaaatacctctttgaagggaaacacgaagatgctgtaccagcagctttgcagtcccttcgcttccgtgtgaagctgtatggcctgagctccgtagagcttgtgcctgcttacctgctgttggccgaggccagccttggtctgggccgaatcgttcaggctgaagaatatctattccaagcccagtggacagtcctcaaatcaactgactgtagtaatgccacccactctttactgcatcggaatctgggacttctctatatagctaagaaaaactatgaagaggcccgttatcatctggccaatgatatttattttgccagttgtgcatttggaacagaggacattaggacttcaggaggctacttccacctggctaatatattctatgaccttaaaaagttggacctggcagacacattgtacaccaaggtctctgagatctggcatgcatatttgaacaatcactatcaagtcctctcacaggctcacatccaacaaatggatttactgggcaaactatttgagaatgacactggcttggatgaagcccaagaagcagaagccattcgcatcctgacttcaatcttgaacattcgagaatctacatctgacaaagccccccaaaaaaccatctttgttctgaagatcctggtcatgctttactacctgatgatgaattcttcaaaggcacaggaatatggcatgagggccctcagtctagccaaagaacaacagcttgatgtccatgagcaaagcaccattcaagagttattaagtctcatttcaactgaagaccatcccattacttagtgacccatgagctctgcatcaagggttattccaggggctactgaagatctaatatattccagccttgcacaactgctttgaggtactgtagactgctgaagtttccaccctcttcccctgggattgcacacatagctgttatttttttcttacacagcatattaagggaatataaagctttaggcatagaaatcactaaaaactgtgtttgtcatgacctttgtacttgatttatcatgactttgtatgactgagtaatatgtagtcagatcactaatatggtatttgtaattaaactacaaatagtttgtcatttcccagaagtcttccaacgatgcatgtttcatacacttttgctaaaggaggggtaaaggagggggtagggaataaagctatattggaacaaaaaaaaaa

SEQ ID NO: 304025 - DNA, 1617 bp, Homo sapiens
accggccactgtacgggcctttctggacttggactccttgggagtcgtttctcggccatttgacccgtgggacttgtgggttttgtgctgctttttctttctttcttccccttttccaacttcagcaatacacccagatgttagtcgagtcacgtcccgccgccctctgcccttgaaatgctggcaagtacgcagccccgcgatcgtcacgtgacgccggggttcagcgtatccttgctgggcaaccgtcttagagaccagcactgctggctgcaccatgaatgtgatctacccactggcagtccccaaggggcgcagactctgctgtgaggtgtgcgaagccccagccgagcgggtgtgcgcggcctgcacagtcacttattactgtggcgtggtacatcagaaggctgactgggacagcatccatgagaaaatatgtcagctcttgattccactgcgcacttccatgcccttctacaattcagaggaagaacggcagcatggcctgcagcagctgcagcagcggcaggtctgggccgaatcgttcaggctgaagaatatctattccaagcccagtggacagtcctcaaatcaactgactgtagtaatgccacccactctttactgcatcggaatctgggacttctctatatagctaagaaaaactatgaagaggcccgttatcatctggccaatgatatttattttgccagttgtgcatttggaacagaggacattaggacttcaggaggctacttccacctggctaatatattctatgaccttaaaaagttggacctggcagacacattgtacaccaaggtctctgagatctggcatgcatatttgaacaatcactatcaagtcctctcacaggctcacatccaacaaatggatttactgggcaaactatttgagaatgacactggcttggatgaagcccaagaagcagaagccattcgcatcctgacttcaatcttgaacattcgagaatctacatctgacaaagccccccaaaaaaccatctttgttctgaagatcctggtcatgctttactacctgatgatgaattcttcaaaggcacaggaatatggcatgagggccctcagtctagccaaagaacaacagcttgatgtccatgagcaaagcaccattcaagagttattaagtctcatttcaactgaagaccatcccattacttagtgacccatgagctctgcatcaagggttattccaggggctactgaagatctaatatattccagccttgcacaactgctttgaggtactgtagactgctgaagtttccaccctcttcccctgggattgcacacatagctgttatttttttcttacacagcatattaagggaatataaagctttaggcatagaaatcactaaaaactgtgtttgtcatgacctttgtacttgatttatcatgactttgtatgactgagtaatatgtagtcagatcactaatatggtatttgtaattaaactacaaatagtttgtcatttcccagaagtcttccaacgatgcatgtttcatacacttttgctaaaggaggggtaaaggagggggtagggaataaagctatattggaacaaaaaaaaaa

SEQ ID NO: 304026 - DNA, 1459 bp, Homo sapiens
tcgtcctttcgcgcccatgttgcagccgttggcggacttgctgtcgctgggtcgcatgactagggcgtatcctggctgagcctctgtgtcccatatctgaggcacgtacgcccattgagtgttcacgctcgagtcacgtcccgccgccctctgcccttgaaatgctggcaagtacgcagccccgcgatcgtcacgtgacgccggggttcagcgtatccttgctgggcaaccgtcttagagaccagcactgctggctgcaccatgaatgtgatctacccactggcagtccccaaggggcgcagactctgctgtgaggtgtgcgaagccccagccgagcgggtgtgcgcggcctgcacagtcacttattactggtctgggccgaatcgttcaggctgaagaatatctattccaagcccagtggacagtcctcaaatcaactgactgtagtaatgccacccactctttactgcatcggaatctgggacttctctatatagctaagaaaaactatgaagaggcccgttatcatctggccaatgatatttattttgccagttgtgcatttggaacagaggacattaggacttcaggaggctacttccacctggctaatatattctatgaccttaaaaagttggacctggcagacacattgtacaccaaggtctctgagatctggcatgcatatttgaacaatcactatcaagtcctctcacaggctcacatccaacaaatggatttactgggcaaactatttgagaatgacactggcttggatgaagcccaagaagcagaagccattcgcatcctgacttcaatcttgaacattcgagaatctacatctgacaaagccccccaaaaaaccatctttgttctgaagatcctggtcatgctttactacctgatgatgaattcttcaaaggcacaggaatatggcatgagggccctcagtctagccaaagaacaacagcttgatgtccatgagcaaagcaccattcaagagttattaagtctcatttcaactgaagaccatcccattacttagtgacccatgagctctgcatcaagggttattccaggggctactgaagatctaatatattccagccttgcacaactgctttgaggtactgtagactgctgaagtttccaccctcttcccctgggattgcacacatagctgttatttttttcttacacagcatattaagggaatataaagctttaggcatagaaatcactaaaaactgtgtttgtcatgacctttgtacttgatttatcatgactttgtatgactgagtaatatgtagtcagatcactaatatggtatttgtaattaaactacaaatagtttgtcatttcccagaagtcttccaacgatgcatgtttcatacacttttgctaaaggaggggtaaaggagggggtagggaataaagctatattggaacaaaaaaaaaa

SEQ ID NO: 304027 - DNA, 941 bp, Homo sapiens
accggccactgtacgggcctttctggacttggactccttgggagtcgtttctcggccatttgacccgtgggacttgtgggttttgtgctgctttttctttctttcttccccttttccaacttcagcaatacacccagatgttagtcgagtcacgtcccgccgccctctgcccttgaaatgctggcaagtacgcagccccgcgatcgtcacgtgacgccggggttcagcgtatccttgctgggcaaccgtcttagagaccagcactgctggctgcaccatgaatgtgatctacccactggcagtccccaaggggcgcagactctgctgtgaggtgtgcgaagccccagccgagcgggtgtgcgcggcctgcacagtcacttattactgtggcgtggtacatcagaaggctgactgggacagcatccatgagaaaatatgtcagctcttgattccactgcgcacttccatgcccttctacaattcagaggaagaacggcagcatggcctgcagcagctgcagcagcggcagaagtatttgattgaattctgctacaccatagcccagaaatacctctttgaagggaaacacgaagatgctgtaccagcagctttgcagtcccttcgcttccgtgtgaagctgtatggcctgagctccgtagagcttgtgcctgcttacctgctgttggccgaggccagccttggtctgggccgaatcgttcaggctgaagaatatctattccaagcccagtggacagtcctcaaatcaactgactgtagtaatgccacccactctttactgcatcggaatctgggacttctctatatagctaagaaaaactatgaagaggcccgttatcatctggccaatgatgtaaacaagctaagttataacacctgtatatttccaaaatctaaattataacacctgtatatttccaaaa

SEQ ID NO: 304028 - DNA, 1584 bp, Homo sapiens
ttggttcaaaacatttaatggatagaaaaaacatttaatgcttacccatttctcaccagattaagtgcacatgccacaaccagtcattaaaggctttttctagtctaaattcctgttcttcaaacgtcaaaccgcccttctactctactgacctgaaacacacagcctcaccctccacatctctgcagacccaccgcatttgccacctgccctagggagcttttcctgatcttacctcggatgcctttcactgctcccacatctgaattcctttaactcactccatgtttttctcaaaggcagaccaaggtatttatgcaaacatggtgtctccctagtcttgggtgaggtctttgacatcactcactgcagcgattcatctcccctactctgcactgtcagactctaaagaagggtgcaacaaatacttgtccatttagactgccggcaaaccctgagagcaggaattttggccttttgtatctccagtgcctagaacagtgcttggtacacagtaggcactcattcattgaacgttgctgaaggaattgaacgtacatactacaagccctgcagatgcagatacaggaggggttgacggcacagtgcttagggtggaactggaggcaccacctctcctgaggggtgatgcgccgcttcctgggcaggctcgggggagctcgctcaaatgcctgcctctctgtagcccaaacgctggaaaaaaaaatactcacaaatcacctatccaagtatgtacacacaggctcacttaaacccgccctattaaaaaaatatacacacgcacacaccatttatccaagtatgtatacacgggcttgcttaaacctgccctattaaaaataataatgtatatatttatgcacgaacatacacacatatatctatccaggtctgtacatagacttgcttaaacctgccctattaaatacagacacacacccctatccaggtatgtacatacatatataatatataaatataaagacatatatatgcacagacttaactccaacacgattggagtgtcgggagggcaactgggctgccctctccgccctccaggactgcgggacaagtctcccggcgcccgggtcgcaggagacccggagccctaaaacggcccctgcgcggcttgggccttccggctttccgtccgccgcggccgccattggctgggttcggcgcagctaacagacggcggcagtgcgagaaagccgaagatggcggtccccgcggcgctgatcctacgggagagccccaggtagctgatccgttaagctcttgcggtagccgcgcccaggaaggcccagatcgggctcgcacaaggctgtccttgctgcctgccgcctgggcgccgcggcgggcccggttgagtggggtggggtggggtgggctgccgaggttgcgacgctgcgtctgcggagtgcgtggggccgtgtagcgcctctacagtcacggtggtccacctgtggggctcacagtgcgcctggcagctgaggtctgtacggaagcgtgtggtctgcaagcgtggggtctgcgtcactgttcgcggagtttggtatc

SEQ ID NO: 304029 - DNA, 298 bp, Homo sapiens
tcgctctgggatccccatcgcgaatcaccaagcaaaactaaaatctcctcaagctgtgttacaactcggagtgaacaatgaagattcaaagagcctggagaaagttcttgtggaattcagtcacaaggagttgtttgatttctataacaagctagagactatacaagcacagctggattcccttacatgatgttttcgaagactgtttttttcatcacgctcctgccacctcattattttgcattgaagatacattgccagctactgcagccgtggaactaagtgtggctaatgaatg

SEQ ID NO: 304030 - DNA, 2646 bp, Homo sapiens
ttggttcaaaacatttaatggatagaaaaaacatttaatgcttacccatttctcaccagattaagtgcacatgccacaaccagtcattaaaggctttttctagtctaaattcctgttcttcaaacgtcaaaccgcccttctactctactgacctgaaacacacagcctcaccctccacatctctgcagacccaccgcatttgccacctgccctagggagcttttcctgatcttacctcggatgcctttcactgctcccacatctgaattcctttaactcactccatgtttttctcaaaggcagaccaaggtatttatgcaaacatggtgtctccctagtcttgggtgaggtctttgacatcactcactgcagcgattcatctcccctactctgcactgtcagactctaaagaagggtgcaacaaatacttgtccatttagactgccggcaaaccctgagagcaggaattttggccttttgtatctccagtgcctagaacagtgcttggtacacagtaggcactcattcattgaacgttgctgaaggaattgaacgtacatactacaagccctgcagatgcagatacaggaggggttgacggcacagtgcttagggtggaactggaggcaccacctctcctgaggggtgatgcgccgcttcctgggcaggctcgggggagctcgctcaaatgcctgcctctctgtagcccaaacgctggaaaaaaaaatactcacaaatcacctatccaagtatgtacacacaggctcacttaaacccgccctattaaaaaaatatacacacgcacacaccatttatccaagtatgtatacacgggcttgcttaaacctgccctattaaaaataataatgtatatatttatgcacgaacatacacacatatatctatccaggtctgtacatagacttgcttaaacctgccctattaaatacagacacacacccctatccaggtatgtacatacatatataatatataaatataaagacatatatatgcacagacttaactccaacacgattggagtgtcgggagggcaactgggctgccctctccgccctccaggactgcgggacaagtctcccggcgcccgggtcgcaggagacccggagccctaaaacggcccctgcgcggcttgggccttccggctttccgtccgccgcggccgccattggctgggttcggcgcagctaacagacggcggcagtgcgagaaagccgaagatggcggtccccgcggcgctgatcctacgggagagccccagcatgaagaaagcagtgtcactgataaatgcaatagatacaggaagatttccacggttgctcactcggattcttcaaaaacttcacctgaaggctgagagcagtttcagtgaagaagaggaagaaaaacttcaagcggcattttctctagagaaacaagatcttcacctagttcttgaaacaatatcatttattttagaacaggcagtgtatcacaatgtgaagccagcagctttgcagcagcaattagagaacattcatcttagacaagacaaagctgaagcatttgtcaatacgtggtcttctatgggtcaagaaacagttgaaaagttccggcagagaattctggctccctgtaagctagagactgttggatggcagcttaaccttcagatggctcactctgctcaagcaaaactaaaatctcctcaagctgtgttacaactcggagtgaacaatgaagattcaaagagcctggagaaagttcttgtggaattcagtcacaaggagttgtttgatttctataacaagctagagactatacaagcacagctggattcccttacatgatgttttcgaagactgtttttttcatcacgctcctgccacctcattattttgcattgaagatacattgccaggttgtgttttctgaaggattcagtgacttgctttctgtaaattatatggcttatcacttcttagacaaataacaaccaatagagatcattgttaagaatactgaggttctaatatactttctttagttctgtgagccaacagtaattattaagaacactttccctttaaaggaaacaaaagtgaataccatattgtttttactgtcatagtgttgctttcttgcctgtcctgcttagtttttacttgctggatgataccataatgtatcaaggagcgtccatggatacaagataagatgtgtaccttagtagaatacagagctttggtaattacatgaataaaattaagaaaatagccatatacaatcaaatacactatggcatttttatttgaatatgatgagtatattttgcttcggaaataatataggaaggaaatgtaaaatagtgagtagtatggtatcagttaattccagtctgagcttctctgtcaacttcagtttctctctcagtttaatgatttaataatagtccaggtttttgtgtgtttttctttatactgcaaattaataatgattcactttatagtttgggagacagaatcaggtcttgaataaaataattgtaatgagtgctaaatgggcaccattattcgaatcagataccttttatattctctttccataaatacgttgatttctgtcaataaaatttttgtgtcttag

SEQ ID NO: 304031 - DNA, 2690 bp, Homo sapiens
  misc_feature (2680)..(2680): n is a, c, g, or t
ttggttcaaaacatttaatggatagaaaaaacatttaatgcttacccatttctcaccagattaagtgcacatgccacaaccagtcattaaaggctttttctagtctaaattcctgttcttcaaacgtcaaaccgcccttctactctactgacctgaaacacacagcctcaccctccacatctctgcagacccaccgcatttgccacctgccctagggagcttttcctgatcttacctcggatgcctttcactgctcccacatctgaattcctttaactcactccatgtttttctcaaaggcagaccaaggtatttatgcaaacatggtgtctccctagtcttgggtgaggtctttgacatcactcactgcagcgattcatctcccctactctgcactgtcagactctaaagaagggtgcaacaaatacttgtccatttagactgccggcaaaccctgagagcaggaattttggccttttgtatctccagtgcctagaacagtgcttggtacacagtaggcactcattcattgaacgttgctgaaggaattgaacgtacatactacaagccctgcagatgcagatacaggaggggttgacggcacagtgcttagggtggaactggaggcaccacctctcctgaggggtgatgcgccgcttcctgggcaggctcgggggagctcgctcaaatgcctgcctctctgtagcccaaacgctggaaaaaaaaatactcacaaatcacctatccaagtatgtacacacaggctcacttaaacccgccctattaaaaaaatatacacacgcacacaccatttatccaagtatgtatacacgggcttgcttaaacctgccctattaaaaataataatgtatatatttatgcacgaacatacacacatatatctatccaggtctgtacatagacttgcttaaacctgccctattaaatacagacacacacccctatccaggtatgtacatacatatataatatataaatataaagacatatatatgcacagacttaactccaacacgattggagtgtcgggagggcaactgggctgccctctccgccctccaggactgcgggacaagtctcccggcgcccgggtcgcaggagacccggagccctaaaacggcccctgcgcggcttgggccttccggctttccgtccgccgcggccgccattggctgggttcggcgcagctaacagacggcggcagtgcgagaaagccgaagatggcggtccccgcggcgctgatcctacgggagagccccagcatgaagaaagcagtgtcactgataaatgcaatagatacaggaagatttccacggttgctcactcggattcttcaaaaacttcacctgaaggctgagagcagtttcagtgaagaagaggaagaaaaacttcaagcggcattttctctagagaaacaagatcttcacctagttcttgaaacaatatcatttattttagaacaggcagtgtatcacaatgtgaagccagcagctttgcagcagcaattagagaacattcatcttagacaagacaaagctgaagcatttgtcaatacgtggtcttctatgggtcaagaaacagttgaaaagttccggcagagaattctggctccctgtaagctagagactgttggatggcagcttaaccttcagatggctcactctgctcaagcaaaactaaaatctcctcaagctgtgttacaactcggagtgaacaatgaagattcaaagagcctggagaaagttcttgtggaattcagtcacaaggagttgtttgatttctataacaagctagagactatacaagcacagctggattcccttacatgatgttttcgaagactgtttttttcatcacgctcctgccacctcattattttgcattgaagatacattgccaggttgtgttttctgaaggattcagtgacttgctttctgtaaattatatggcttatcacttcttagacaaataacaaccaatagagatcattgttaagaatactgaggttctaatatactttctttagttctgtgagccaacagtaattattaagaacactttccctttaaaggaaacaaaagtgaataccatattgtttttactgtcatagtgttgctttcttgcctgtcctgcttagtttttacttgctggatgataccataatgtatcaaggagcgtccatggatacaagataagatgtgtaccttagtagaatacagagctttggtaattacatgaataaaattaagaaaatagccatatacaatcaaatacactatggcatttttatttgaatatgatgagtatattttgcttcggaaataatataggaaggaaatgtaaaatagtgagtagtatggtatcagttaattccagtctgagcttctctgtcaacttcagtttctctctcagtttaatgatttaataatagtccaggtttttgtgtgtttttctttatactgcaaattaataatgattcactttatagtttgggagacagaatcaggtcttgaataaaataattgtaatgagtgctaaatgggcaccattattcgaatcagataccttttatattctctttccataaatacgttgatttctgtcaataaaatttttgtgtcttagaaaaaaaaaaatggcctttgcctacgggagcttncgccttcctt

SEQ ID NO: 304032 - DNA, 3072 bp, Homo sapiens
ttggttcaaaacatttaatggatagaaaaaacatttaatgcttacccatttctcaccagattaagtgcacatgccacaaccagtcattaaaggctttttctagtctaaattcctgttcttcaaacgtcaaaccgcccttctactctactgacctgaaacacacagcctcaccctccacatctctgcagacccaccgcatttgccacctgccctagggagcttttcctgatcttacctcggatgcctttcactgctcccacatctgaattcctttaactcactccatgtttttctcaaaggcagaccaaggtatttatgcaaacatggtgtctccctagtcttgggtgaggtctttgacatcactcactgcagcgattcatctcccctactctgcactgtcagactctaaagaagggtgcaacaaatacttgtccatttagactgccggcaaaccctgagagcaggaattttggccttttgtatctccagtgcctagaacagtgcttggtacacagtaggcactcattcattgaacgttgctgaaggaattgaacgtacatactacaagccctgcagatgcagatacaggaggggttgacggcacagtgcttagggtggaactggaggcaccacctctcctgaggggtgatgcgccgcttcctgggcaggctcgggggagctcgctcaaatgcctgcctctctgtagcccaaacgctggaaaaaaaaatactcacaaatcacctatccaagtatgtacacacaggctcacttaaacccgccctattaaaaaaatatacacacgcacacaccatttatccaagtatgtatacacgggcttgcttaaacctgccctattaaaaataataatgtatatatttatgcacgaacatacacacatatatctatccaggtctgtacatagacttgcttaaacctgccctattaaatacagacacacacccctatccaggtatgtacatacatatataatatataaatataaagacatatatatgcacagacttaactccaacacgattggagtgtcgggagggcaactgggctgccctctccgccctccaggactgcgggacaagtctcccggcgcccgggtcgcaggagacccggagccctaaaacggcccctgcgcggcttgggccttccggctttccgtccgccgcggccgccattggctgggttcggcgcagctaacagacggcggcagtgcgagaaagccgaagatggcggtccccgcggcgctgatcctacgggagagccccagcatgaagaaagcagtgtcactgataaatgcaatagatacaggaagatttccacggttgctcactcggattcttcaaaaacttcacctgaaggctgagagcagtttcagtgaagaagaggaagaaaaacttcaagcggcattttctctagagaaacaagatcttcacctagttcttgaaacaatatcatttattttagaacaggcagtgtatcacaatgtgaagccagcagctttgcagcagcaattagagaacattcatcttagacaagacaaagctgaagcatttgtcaatacgtggtcttctatgggtcaagaaacagttgaaaagttccggcagagaattctggctccctgtaagctagagactgttggatggcagcttaaccttcagatggctcactctgctcaagcaaaactaaaatctcctcaagctgtgttacaactcggagtgaacaatgaagattcaaagagcctggagaaagttcttgtggaattcagtcacaaggagttgtttgatttctataacaagctagagactatacaagcacagctggattcccttacatgatgttttcgaagactgtttttttcatcacgctcctgccacctcattattttgcattgaagatacattgccaggttgtgttttctgaaggattcagtgacttgctttctgtaaattatatggcttatcacttcttagacaaataacaaccaatagagatcattgttaagaatactgaggttctaatatactttctttagttctgtgagccaacagtaattattaagaacactttccctttaaaggaaacaaaagtgaataccatattgtttttactgtcatagtgttgctttcttgcctgtcctgcttagtttttacttgctggatgataccataatgtatcaaggagcgtccatggatacaagataagatgtgtaccttagtagaatacagagctttggtaattacatgaataaaattaagaaaatagccatatacaatcaaatacactatggcatttttatttgaatatgatgagtatattttgcttcggaaataatataggaaggaaatgtaaaatagtgagtagtatggtatcagttaattccagtctgagcttctctgtcaacttcagtttctctctcagtttaatgatttaataatagtccaggtttttgtgtgtttttctttatactgcaaattaataatgattcactttatagtttgggagacagaatcaggtcttgaataaaataattgtaatgagtgctaaatgggcaccattattcgaatcagataccttttatattctctttccataaatacgttgatttctgtcaataaaatttttgtgtcttagattggttgaagtgtacattttttaattatatacattatagtatattttatgccatgaatgtatgtaaatgaatacatttacgtacatttgttaaaatgtatgtaatgaatacatttacatacatttgtttaaaaaaaacttgaattttttatgaatgaaatttctgtattgtttccaaaaagagagagattcaaacatgacttgcttcacatgaagaaatttgatttcagaaatgtcctatatttaaataagcaaagccattgaaattgaagcacatttcttatttgaagcatctgggaaatacaactgttaagtatctctcaaatattcagtatatggaatttatacccacatttgtttgtatatctatttgtaagctgttgcttagaagaattgagagtttggattatttcagaatacaactat

SEQ ID NO: 304033 - DNA, 2624 bp, Homo sapiens
ttggttcaaaacatttaatggatagaaaaaacatttaatgcttacccatttctcaccagattaagtgcacatgccacaaccagtcattaaaggctttttctagtctaaattcctgttcttcaaacgtcaaaccgcccttctactctactgacctgaaacacacagcctcaccctccacatctctgcagacccaccgcatttgccacctgccctagggagcttttcctgatcttacctcggatgcctttcactgctcccacatctgaattcctttaactcactccatgtttttctcaaaggcagaccaaggtatttatgcaaacatggtgtctccctagtcttgggtgaggtctttgacatcactcactgcagcgattcatctcccctactctgcactgtcagactctaaagaagggtgcaacaaatacttgtccatttagactgccggcaaaccctgagagcaggaattttggccttttgtatctccagtgcctagaacagtgcttggtacacagtaggcactcattcattgaacgttgctgaaggaattgaacgtacatactacaagccctgcagatgcagatacaggaggggttgacggcacagtgcttagggtggaactggaggcaccacctctcctgaggggtgatgcgccgcttcctgggcaggctcgggggagctcgctcaaatgcctgcctctctgtagcccaaacgctggaaaaaaaaatactcacaaatcacctatccaagtatgtacacacaggctcacttaaacccgccctattaaaaaaatatacacacgcacacaccatttatccaagtatgtatacacgggcttgcttaaacctgccctattaaaaataataatgtatatatttatgcacgaacatacacacatatatctatccaggtctgtacatagacttgcttaaacctgccctattaaatacagacacacacccctatccaggtatgtacatacatatataatatataaatataaagacatatatatgcacagacttaactccaacacgattggagtgtcgggagggcaactgggctgccctctccgccctccaggactgcgggacaagtctcccggcgcccgggtcgcaggagacccggagccctaaaacggcccctgcgcggcttgggccttccggctttccgtccgccgcggccgccattggctgggttcggcgcaggaaagccgaagatggcggtccccgcggcgctgatcctacgggagagccccagcatgaagaaagcagtgtcactgataaatgcaatagatacaggaagatttccacggttgctcactcggattcttcaaaaacttcacctgaaggctgagagcagtttcagtgaagaagaggaagaaaaacttcaagcggcattttctctagagaaacaagatcttcacctagttcttgaaacaatatcatttattttagaacaggcagtgtatcacaatgtgaagccagcagctttgcagcagcaattagagaacattcatcttagacaagacaaagctgaagcatttgtcaatacgtggtcttctatgggtcaagaaacagttgaaaagttccggcagagaattctggctccctgtaagctagagactgttggatggcagcttaaccttcagatggctcactctgctcaagcaaaactaaaatctcctcaagctgtgttacaactcggagtgaacaatgaagattcaaagagcctggagaaagttcttgtggaattcagtcacaaggagttgtttgatttctataacaagctagagactatacaagcacagctggattcccttacatgatgttttcgaagactgtttttttcatcacgctcctgccacctcattattttgcattgaagatacattgccaggttgtgttttctgaaggattcagtgacttgctttctgtaaattatatggcttatcacttcttagacaaataacaaccaatagagatcattgttaagaatactgaggttctaatatactttctttagttctgtgagccaacagtaattattaagaacactttccctttaaaggaaacaaaagtgaataccatattgtttttactgtcatagtgttgctttcttgcctgtcctgcttagtttttacttgctggatgataccataatgtatcaaggagcgtccatggatacaagataagatgtgtaccttagtagaatacagagctttggtaattacatgaataaaattaagaaaatagccatatacaatcaaatacactatggcatttttatttgaatatgatgagtatattttgcttcggaaataatataggaaggaaatgtaaaatagtgagtagtatggtatcagttaattccagtctgagcttctctgtcaacttcagtttctctctcagtttaatgatttaataatagtccaggtttttgtgtgtttttctttatactgcaaattaataatgattcactttatagtttgggagacagaatcaggtcttgaataaaataattgtaatgagtgctaaatgggcaccattattcgaatcagataccttttatattctctttccataaatacgttgatttctgtcaataaaatttttgtgtcttag

SEQ ID NO: 304034 - DNA, 1497 bp, Homo sapiens
gacactctggtgggaaaggctcacgctgctgctggagggtctttaatagccaacatgtgttaataccccttttaaatcagtatcgaataggggaccgaatttttggttggtagaagaatctagcctggctttgcatgaagaaagcagtgtcactgataaatgcaatagatacaggaagatttccacggttgctcactcggattcttcaaaaacttcacctgaaggctgagagcagtttcagtgaagaagaggaagaaaaacttcaagcggcattttctctagagaaacaagatcttcacctagttcttgaaacaatatcatttattttagaacaggcagtgtatcacaatgtgaagccagcagctttgcagcagcaattagagaacattcatcttagacaagacaaagctgaagcatttgtcaatacgtggtcttctatgggtcaagaaacagttgaaaagttccggcagagaattctggctccctgtaagctagagactgttggatggcagcttaaccttcagatggctcactctgctcaagcaaaactaaaatctcctcaagctgtgttacaactcggagtgaacaatgaagattcaaagagcctggagaaagttcttgtggaattcagtcacaaggagttgtttgatttctataacaagctagagactatacaagcacagctggattcccttacatgatgttttcgaagactgtttttttcatcacgctcctgccacctcattattttgcattgaagatacattgccaggttgtgttttctgaaggattcagtgacttgctttctgtaaattatatggcttatcacttcttagacaaataacaaccaatagagatcattgttaagaatactgaggttctaatatactttctttagttctgtgagccaacagtaattattaagaacactttccctttaaaggaaacaaaagtgaataccatattgtttttactgtcatagtgttgctttcttgcctgtcctgcttagtttttacttgctggatgataccataatgtatcaaggagcgtccatggatacaagataagatgtgtaccttagtagaatacagagctttggtaattacatgaataaaattaagaaaatagccatatacaatcaaatacactatggcatttttatttgaatatgatgagtatattttgcttcggaaataatataggaaggaaatgtaaaatagtgagtagtatggtatcagttaattccagtctgagcttctctgtcaacttcagtttctctctcagtttaatgatttaataatagtccaggtttttgtgtgtttttctttatactgcaaattaataatgattcactttatagtttgggagacagaatcaggtcttgaataaaataattgtaatgagtgctaaatgggcaccattattcgaatcagataccttttatattctctttccataaatacgttgatttctgtcaataaaatttttgtgtcttag

SEQ ID NO: 304035 - DNA, 2592 bp, Homo sapiens
ttggttcaaaacatttaatggatagaaaaaacatttaatgcttacccatttctcaccagattaagtgcacatgccacaaccagtcattaaaggctttttctagtctaaattcctgttcttcaaacgtcaaaccgcccttctactctactgacctgaaacacacagcctcaccctccacatctctgcagacccaccgcatttgccacctgccctagggagcttttcctgatcttacctcggatgcctttcactgctcccacatctgaattcctttaactcactccatgtttttctcaaaggcagaccaaggtatttatgcaaacatggtgtctccctagtcttgggtgaggtctttgacatcactcactgcagcgattcatctcccctactctgcactgtcagactctaaagaagggtgcaacaaatacttgtccatttagactgccggcaaaccctgagagcaggaattttggccttttgtatctccagtgcctagaacagtgcttggtacacagtaggcactcattcattgaacgttgctgaaggaattgaacgtacatactacaagccctgcagatgcagatacaggaggggttgacggcacagtgcttagggtggaactggaggcaccacctctcctgaggggtgatgcgccgcttcctgggcaggctcgggggagctcgctcaaatgcctgcctctctgtagcccaaacgctggaaaaaaaaatactcacaaatcacctatccaagtatgtacacacaggctcacttaaacccgccctattaaaaaaatatacacacgcacacaccatttatccaagtatgtatacacgggcttgcttaaacctgccctattaaaaataataatgtatatatttatgcacgaacatacacacatatatctatccaggtctgtacatagacttgcttaaacctgccctattaaatacagacacacacccctatccaggtatgtacatacatatataatatataaatataaagacatatatatgcacagacttaactccaacacgattggagtgtcgggagggcaactgggctgccctctccgccctccaggactgcgggacaagtctcccggcgcccgggtcgcaggagacccggagccctaaaacggcccctgcgcggcttgggccttccggctttccgtccgccgcggccgccattggctgggttcggcgcagctaacagacggcggcagtgcgagaaagccgaagatggcggtccccgcggcgctgatcctacgggagagccccagcatgaagaaagcagtgtcactgataaatgcaatagatacaggaagatttccacggttgctcactcggattcttcaaaaacttcacctgaaggctgagagcagtttcagtgaagaagaggaagaaaaacttcaagcggcattttctctagagaaacaagatcttcacctagttcttgaaacaatatcatttattttagaacaggcagtgtatcacaatgtgaagccagcagctttgcagcagcaattagagaacattcatcttagacaagacaaagctgaagcatttgtcaatacgtggtcttctatgggtcaagaaacagttgagcttaaccttcagatggctcactctgctcaagcaaaactaaaatctcctcaagctgtgttacaactcggagtgaacaatgaagattcaaagagcctggagaaagttcttgtggaattcagtcacaaggagttgtttgatttctataacaagctagagactatacaagcacagctggattcccttacatgatgttttcgaagactgtttttttcatcacgctcctgccacctcattattttgcattgaagatacattgccaggttgtgttttctgaaggattcagtgacttgctttctgtaaattatatggcttatcacttcttagacaaataacaaccaatagagatcattgttaagaatactgaggttctaatatactttctttagttctgtgagccaacagtaattattaagaacactttccctttaaaggaaacaaaagtgaataccatattgtttttactgtcatagtgttgctttcttgcctgtcctgcttagtttttacttgctggatgataccataatgtatcaaggagcgtccatggatacaagataagatgtgtaccttagtagaatacagagctttggtaattacatgaataaaattaagaaaatagccatatacaatcaaatacactatggcatttttatttgaatatgatgagtatattttgcttcggaaataatataggaaggaaatgtaaaatagtgagtagtatggtatcagttaattccagtctgagcttctctgtcaacttcagtttctctctcagtttaatgatttaataatagtccaggtttttgtgtgtttttctttatactgcaaattaataatgattcactttatagtttgggagacagaatcaggtcttgaataaaataattgtaatgagtgctaaatgggcaccattattcgaatcagataccttttatattctctttccataaatacgttgatttctgtcaataaaatttttgtgtcttag

SEQ ID NO: 304036 - DNA, 2587 bp, Homo sapiens
ttggttcaaaacatttaatggatagaaaaaacatttaatgcttacccatttctcaccagattaagtgcacatgccacaaccagtcattaaaggctttttctagtctaaattcctgttcttcaaacgtcaaaccgcccttctactctactgacctgaaacacacagcctcaccctccacatctctgcagacccaccgcatttgccacctgccctagggagcttttcctgatcttacctcggatgcctttcactgctcccacatctgaattcctttaactcactccatgtttttctcaaaggcagaccaaggtatttatgcaaacatggtgtctccctagtcttgggtgaggtctttgacatcactcactgcagcgattcatctcccctactctgcactgtcagactctaaagaagggtgcaacaaatacttgtccatttagactgccggcaaaccctgagagcaggaattttggccttttgtatctccagtgcctagaacagtgcttggtacacagtaggcactcattcattgaacgttgctgaaggaattgaacgtacatactacaagccctgcagatgcagatacaggaggggttgacggcacagtgcttagggtggaactggaggcaccacctctcctgaggggtgatgcgccgcttcctgggcaggctcgggggagctcgctcaaatgcctgcctctctgtagcccaaacgctggaaaaaaaaatactcacaaatcacctatccaagtatgtacacacaggctcacttaaacccgccctattaaaaaaatatacacacgcacacaccatttatccaagtatgtatacacgggcttgcttaaacctgccctattaaaaataataatgtatatatttatgcacgaacatacacacatatatctatccaggtctgtacatagacttgcttaaacctgccctattaaatacagacacacacccctatccaggtatgtacatacatatataatatataaatataaagacatatatatgcacagacttaactccaacacgattggagtgtcgggagggcaactgggctgccctctccgccctccaggactgcgggacaagtctcccggcgcccgggtcgcaggagacccggagccctaaaacggcccctgcgcggcttgggccttccggctttccgtccgccgcggccgccattggctgggttcggcgcagctaacagacggcggcagtgcgagaaagccgaagatggcggtccccgcggcgctgatcctacgggagagccccagcatgaagaaagcagtgtcactgataaatgcaatagatacaggaagatttccacggttgctcactcggattcttcaaaaacttcacctgaaggctgagagcagtttcagtgaagaagaggaagaaaaacttcaagcggcattttctctagagaaacaagatcttcacctagttcttgaaacaatatcatttattttagaacaggcagtgtatcacaatgtgaagccagcagctttgcagcagcaattagagaacattcatcttagacaagacaaagctgaagcatttgtcaatacgtggtcttctatgggtcaagaaacagttgaaaagttccggcagagaattctggctccctgtaagctagagactgttggatggcagcttaaccttcagatggctcactctgctcaagagcctggagaaagttcttgtggaattcagtcacaaggagttgtttgatttctataacaagctagagactatacaagcacagctggattcccttacatgatgttttcgaagactgtttttttcatcacgctcctgccacctcattattttgcattgaagatacattgccaggttgtgttttctgaaggattcagtgacttgctttctgtaaattatatggcttatcacttcttagacaaataacaaccaatagagatcattgttaagaatactgaggttctaatatactttctttagttctgtgagccaacagtaattattaagaacactttccctttaaaggaaacaaaagtgaataccatattgtttttactgtcatagtgttgctttcttgcctgtcctgcttagtttttacttgctggatgataccataatgtatcaaggagcgtccatggatacaagataagatgtgtaccttagtagaatacagagctttggtaattacatgaataaaattaagaaaatagccatatacaatcaaatacactatggcatttttatttgaatatgatgagtatattttgcttcggaaataatataggaaggaaatgtaaaatagtgagtagtatggtatcagttaattccagtctgagcttctctgtcaacttcagtttctctctcagtttaatgatttaataatagtccaggtttttgtgtgtttttctttatactgcaaattaataatgattcactttatagtttgggagacagaatcaggtcttgaataaaataattgtaatgagtgctaaatgggcaccattattcgaatcagataccttttatattctctttccataaatacgttgatttctgtcaataaaatttttgtgtcttag

SEQ ID NO: 304037 - DNA, 2535 bp, Homo sapiens
ttggttcaaaacatttaatggatagaaaaaacatttaatgcttacccatttctcaccagattaagtgcacatgccacaaccagtcattaaaggctttttctagtctaaattcctgttcttcaaacgtcaaaccgcccttctactctactgacctgaaacacacagcctcaccctccacatctctgcagacccaccgcatttgccacctgccctagggagcttttcctgatcttacctcggatgcctttcactgctcccacatctgaattcctttaactcactccatgtttttctcaaaggcagaccaaggtatttatgcaaacatggtgtctccctagtcttgggtgaggtctttgacatcactcactgcagcgattcatctcccctactctgcactgtcagactctaaagaagggtgcaacaaatacttgtccatttagactgccggcaaaccctgagagcaggaattttggccttttgtatctccagtgcctagaacagtgcttggtacacagtaggcactcattcattgaacgttgctgaaggaattgaacgtacatactacaagccctgcagatgcagatacaggaggggttgacggcacagtgcttagggtggaactggaggcaccacctctcctgaggggtgatgcgccgcttcctgggcaggctcgggggagctcgctcaaatgcctgcctctctgtagcccaaacgctggaaaaaaaaatactcacaaatcacctatccaagtatgtacacacaggctcacttaaacccgccctattaaaaaaatatacacacgcacacaccatttatccaagtatgtatacacgggcttgcttaaacctgccctattaaaaataataatgtatatatttatgcacgaacatacacacatatatctatccaggtctgtacatagacttgcttaaacctgccctattaaatacagacacacacccctatccaggtatgtacatacatatataatatataaatataaagacatatatatgcacagacttaactccaacacgattggagtgtcgggagggcaactgggctgccctctccgccctccaggactgcgggacaagtctcccggcgcccgggtcgcaggagacccggagccctaaaacggcccctgcgcggcttgggccttccggctttccgtccgccgcggccgccattggctgggttcggcgcagctaacagacggcggcagtgcgagaaagccgaagatggcggtccccgcggcgctgatcctacgggagagccccagcatgaagaaagcagtgtcactgataaatgcaatagatacaggaagatttccacggttgctcactcggattcttcaaaaacttcacctgaaggctgagagcagtttcagtgaagaagaggaagaaaaacttcaagcggcattttctctagagaaacaagatcttcacctagttcttgaaacaatatcatttattttagaacaggcagtgtatcacaatgtgaagccagcagctttgcagcagcaattagagaacattcatcttagacaagacaaagctgaagcatttgtcaatacgtggtcttctatgggtcaagaaacagttgaaaagttccggcagagaattctggctccctgtaagagcctggagaaagttcttgtggaattcagtcacaaggagttgtttgatttctataacaagctagagactatacaagcacagctggattcccttacatgatgttttcgaagactgtttttttcatcacgctcctgccacctcattattttgcattgaagatacattgccaggttgtgttttctgaaggattcagtgacttgctttctgtaaattatatggcttatcacttcttagacaaataacaaccaatagagatcattgttaagaatactgaggttctaatatactttctttagttctgtgagccaacagtaattattaagaacactttccctttaaaggaaacaaaagtgaataccatattgtttttactgtcatagtgttgctttcttgcctgtcctgcttagtttttacttgctggatgataccataatgtatcaaggagcgtccatggatacaagataagatgtgtaccttagtagaatacagagctttggtaattacatgaataaaattaagaaaatagccatatacaatcaaatacactatggcatttttatttgaatatgatgagtatattttgcttcggaaataatataggaaggaaatgtaaaatagtgagtagtatggtatcagttaattccagtctgagcttctctgtcaacttcagtttctctctcagtttaatgatttaataatagtccaggtttttgtgtgtttttctttatactgcaaattaataatgattcactttatagtttgggagacagaatcaggtcttgaataaaataattgtaatgagtgctaaatgggcaccattattcgaatcagataccttttatattctctttccataaatacgttgatttctgtcaataaaatttttgtgtcttag

SEQ ID NO: 304038 - DNA, 954 bp, Homo sapiens
gttgtaattaatagtgatggttgttagtttgtatgtcactataaaccttcatacctggcagcctggagaaagttcttgtggaattcagtcacaaggagttgtttgatttctataacaagctagagactatacaagcacagctggattcccttacatgatgttttcgaagactgtttttttcatcacgctcctgccacctcattattttgcattgaagatacattgccaggttgtgttttctgaaggattcagtgacttgctttctgtaaattatatggcttatcacttcttagacaaataacaaccaatagagatcattgttaagaatactgaggttctaatatactttctttagttctgtgagccaacagtaattattaagaacactttccctttaaaggaaacaaaagtgaataccatattgtttttactgtcatagtgttgctttcttgcctgtcctgcttagtttttacttgctggatgataccataatgtatcaaggagcgtccatggatacaagataagatgtgtaccttagtagaatacagagctttggtaattacatgaataaaattaagaaaatagccatatacaatcaaatacactatggcatttttatttgaatatgatgagtatattttgcttcggaaataatataggaaggaaatgtaaaatagtgagtagtatggtatcagttaattccagtctgagcttctctgtcaacttcagtttctctctcagtttaatgatttaataatagtccaggtttttgtgtgtttttctttatactgcaaattaataatgattcactttatagtttgggagacagaatcaggtcttgaataaaataattgtaatgagtgctaaatgggcaccattattcgaatcagataccttttatattctctttccataaatacgttgatttctgtcaataaaatttttgtgtcttag

SEQ ID NO: 304039 - DNA, 897 bp, Homo sapiens
ctgatcctgcagaagtactcgtgtagtaccattcacattgagctgtgtgatttcttgactctctagagactatacaagcacagctggattcccttacatgatgttttcgaagactgtttttttcatcacgctcctgccacctcattattttgcattgaagatacattgccaggttgtgttttctgaaggattcagtgacttgctttctgtaaattatatggcttatcacttcttagacaaataacaaccaatagagatcattgttaagaatactgaggttctaatatactttctttagttctgtgagccaacagtaattattaagaacactttccctttaaaggaaacaaaagtgaataccatattgtttttactgtcatagtgttgctttcttgcctgtcctgcttagtttttacttgctggatgataccataatgtatcaaggagcgtccatggatacaagataagatgtgtaccttagtagaatacagagctttggtaattacatgaataaaattaagaaaatagccatatacaatcaaatacactatggcatttttatttgaatatgatgagtatattttgcttcggaaataatataggaaggaaatgtaaaatagtgagtagtatggtatcagttaattccagtctgagcttctctgtcaacttcagtttctctctcagtttaatgatttaataatagtccaggtttttgtgtgtttttctttatactgcaaattaataatgattcactttatagtttgggagacagaatcaggtcttgaataaaataattgtaatgagtgctaaatgggcaccattattcgaatcagataccttttatattctctttccataaatacgttgatttctgtcaataaaatttttgtgtcttag

SEQ ID NO: 304040 - DNA, 1864 bp, Homo sapiens
  misc_feature (1760)..(1760): n is a, c, g, or t
ttggttcaaaacatttaatggatagaaaaaacatttaatgcttacccatttctcaccagattaagtgcacatgccacaaccagtcattaaaggctttttctagtctaaattcctgttcttcaaacgtcaaaccgcccttctactctactgacctgaaacacacagcctcaccctccacatctctgcagacccaccgcatttgccacctgccctagggagcttttcctgatcttacctcggatgcctttcactgctcccacatctgaattcctttaactcactccatgtttttctcaaaggcagaccaaggtatttatgcaaacatggtgtctccctagtcttgggtgaggtctttgacatcactcactgcagcgattcatctcccctactctgcactgtcagactctaaagaagggtgcaacaaatacttgtccatttagactgccggcaaaccctgagagcaggaattttggccttttgtatctccagtgcctagaacagtgcttggtacacagtaggcactcattcattgaacgttgctgaaggaattgaacgtacatactacaagccctgcagatgcagatacaggaggggttgacggcacagtgcttagggtggaactggaggcaccacctctcctgaggggtgatgcgccgcttcctgggcaggctcgggggagctcgctcaaatgcctgcctctctgtagcccaaacgctggaaaaaaaaatactcacaaatcacctatccaagtatgtacacacaggctcacttaaacccgccctattaaaaaaatatacacacgcacacaccatttatccaagtatgtatacacgggcttgcttaaacctgccctattaaaaataataatgtatatatttatgcacgaacatacacacatatatctatccaggtctgtacatagacttgcttaaacctgccctattaaatacagacacacacccctatccaggtatgtacatacatatataatatataaatataaagacatatatatgcacagacttaactccaacacgattggagtgtcgggagggcaactgggctgccctctccgccctccaggactgcgggacaagtctcccggcgcccgggtcgcaggagacccggagccctaaaacggcccctgcgcggcttgggccttccggctttccgtccgccgcggccgccattggctgggttcggcgcagctaacagacggcggcagtgcgagaaagccgaagatggcggtccccgcggcgctgatcctacgggagagccccagcatgaagaaagcagtgtcactgataaatgcaatagatacaggaagatttccacggttgctcactcggattcttcaaaaacttcacctgaaggctgagagcagtttcagtgaagaagaggaagaaaaacttcaagcggcattttctctagagaaacaagatcttcacctagttcttgaaacaatatcatttattttagaacaggcagtgtatcacaatgtgaagccagcagctttgcagcagcaattagagaacattcatcttagacaagacaaagctgaagcatttgtcaatacgtggtcttctatgggtcaagaaacagttgaaaagttccggcagagaattctggctccctgtaagctagagactgttggatggcagcttaaccttcagatggctcactctgctcaagcaaaactaaaatctcctcaagctgtgttacaactcggagtgaacaatgaagattcaaagagagccctnggagaaaagttcttggtggaaattcagtcccaagggagttggttggatttcctattaacacggctttgaggacttttcaaactcccacggtggatttccccttc

SEQ ID NO: 304041 - DNA, 2291 bp, Homo sapiens
ttggttcaaaacatttaatggatagaaaaaacatttaatgcttacccatttctcaccagattaagtgcacatgccacaaccagtcattaaaggctttttctagtctaaattcctgttcttcaaacgtcaaaccgcccttctactctactgacctgaaacacacagcctcaccctccacatctctgcagacccaccgcatttgccacctgccctagggagcttttcctgatcttacctcggatgcctttcactgctcccacatctgaattcctttaactcactccatgtttttctcaaaggcagaccaaggtatttatgcaaacatggtgtctccctagtcttgggtgaggtctttgacatcactcactgcagcgattcatctcccctactctgcactgtcagactctaaagaagggtgcaacaaatacttgtccatttagactgccggcaaaccctgagagcaggaattttggccttttgtatctccagtgcctagaacagtgcttggtacacagtaggcactcattcattgaacgttgctgaaggaattgaacgtacatactacaagccctgcagatgcagatacaggaggggttgacggcacagtgcttagggtggaactggaggcaccacctctcctgaggggtgatgcgccgcttcctgggcaggctcgggggagctcgctcaaatgcctgcctctctgtagcccaaacgctggaaaaaaaaatactcacaaatcacctatccaagtatgtacacacaggctcacttaaacccgccctattaaaaaaatatacacacgcacacaccatttatccaagtatgtatacacgggcttgcttaaacctgccctattaaaaataataatgtatatatttatgcacgaacatacacacatatatctatccaggtctgtacatagacttgcttaaacctgccctattaaatacagacacacacccctatccaggtatgtacatacatatataatatataaatataaagacatatatatgcacagacttaactccaacacgattggagtgtcgggagggcaactgggctgccctctccgccctccaggactgcgggacaagtctcccggcgcccgggtcgcaggagacccggagccctaaaacggcccctgcgcggcttgggccttccggctttccgtccgccgcggccgccattggctgggttcggcgcagctaacagacggcggcagtgcgagaaagccgaagatggcggtccccgcggcgctgatcctacgggagagccccagcatgaagaaagcagtgtcactgataaatgcaatagatacaggaagatttccacggttgctcactcggattcttcaaaaacttcacctgaaggctgagagcagtttcagtgaagaagaggaagaaaaacttcaagcggcattttctctagagaaacaagatcttcacctagttcttgaaacaatatcatttattttagaacaggcagtgtatcacaatgtgaagccagcagctttgcagcagcaattagagaacattcatcttagacaagacaaagctgaagcatttgtcaatacgtggtcttctatgggtcaagaaacagttgaaaagttccggcagagaattctggctccctgtaagctagagactgttggatggcagcttaaccttcagatggctcactctgctcaagcaaaactaaaatctcctcaagctgtgttacaactcggagtgaacaatgaagattcaaagggtaagaaatggtatcccattaaaaggatgtattttgtttgttaggacttaaactttttattcttagcagtctttgctctctggatttagaatttaaacataattcagttaaacagttattaataagtggatcttttttgacagaaatagcttatcttgcaaggtgcctttcttacaaaaacatttcataatgtcttcttttaaattctgcagtgaaaaaaaattgttgaagaccatataaaattatgattttaatgttttaggtatttgcagatattcctgagtgtttcatgttttaagctgaatatatgtggtagagagaatattgtttgttgtccagctagagcctggaacaataaatatgatggtgacctgaattgtgtttttgtgtgtgtagtagtatagtatgcctgcatgtgtttaaatcccagctacttgggaggcagaagaatggcatgaacccgggaggtggagcttgcaatgagccgagatcctgccactgcaatccagcccgggtgacagaatgagactccatctcaa

SEQ ID NO: 304042 - DNA, 1102 bp, Homo sapiens
gtggggggcgggggcggcacgtgccgccgctctcggccaatgcggagccccgcgcggaggtcacgtgcctctgtttggcgcttttgtgcgcgcccgggtctgttggtgctcagagtgtggtcaggcggctcggactgagcaggactttccttatcccagttgattgtgcagaatacactgcctgtcgcttgtcttctattcaccatggcttcttctgatatccaggtgaaagaactggagaagcgtgcctcaggccaggcttttgagctgattctcagccctcggtcaaaagaatctgttccagaattccccctttcccctccaaagaagaaggatctttccctggaggaaattcagaagaaattagaagctgcagaagaaagacgcaagtcccatgaagctgaggtcttgaagcagctggctgagaaacgagagcacgagaaagaagtgcttcagaaggcaatagaagagaacaacaacttcagtaaaatggcagaagagaaactgacccacaaaatggaagctaataaagagaaccgagaggcacaaatggctgccaaactggaacgtttgcgagagaaggataagcacattgaagaagtgcggaagaacaaagaatccaaagaccctgctgacgagactgaagctgactaatttgttctgagaactgactttctccccatccccttcctaaatatccaaagactgtactggccagtgtcattttattttttccctcctgacaaatattttagaagctaatgtaggactgtataggtagatccagatccagactgtaagatgttgttttaggggctaaaggggagaaactgaaagtgttttactctttttctaaagtgttggtctttctaatgtagctatttttcttgttgcatcttttctacttcagtacacttggtgtactgggttaatggctagtactgtattggctctgtgaaaacatatttgtgaaaagagtatgtagtggcttcttttgaactgttagatgctgaatatctgttcacttttcaatcccaattctgtcccaatcttaccagatgctactggacttgaatggttaataaaactgcacagtgctgtt

SEQ ID NO: 304043 - DNA, 1006 bp, Homo sapiens
  misc_feature (39)..(39): n is a, c, g, or t
ggacgcgtgggtccggacgcgtgggttggcggctcggantgagcaggactttccttatcccagttgattgtgcagaatacactgcctgtcgcttgtcttctattcaccatggcttcttctgatatccaggtgaaagaactggagaagcgtgcctcaggccaggcttttgagctgattctcagccctcggtcaaaagaatctgttccagaattccccctttcccctccaaagaagaaggatctttccctggaggaaattcagaagaaattagaagctgcagaagaaagacgcaagtcccatgaagctgaggtcttgaagcagctggctgagaaacgagagcacgagaaagaagtgcttcagaaggcaatagaagagaacaacaacttcagtaaaatggcagaagagaaactgacccacaaaatggaagctaataaagagaaccgagaggcacaaatggctgccaaactggaacgtttgcgagagaaggataagcacattgaagaagtgcggaagaacaaagaatccaaagaccctgctgacgagactgaagctgactaatttgttctgagaactgactttctccccatccccttcctaaatatccaaagactgtactggccagtgtcattttattttttccctcctgacaaatattttagaagctaatgtaggactgtataggtagatccagatccagactgtaagatgttgttttaggggctaaaggggagaaactgaaagtgttttactctttttctaaagtgttggtctttctaatgtagctatttttcttgttgcatcttttctacttcagtacacttggtgtactgggttaatggctagtactgtattggctctgtgaaaacatatttgtgaaaagagtatgtagtggcttcttttgaactgttagatgctgaatatctgttcacttttcaatcccaattctgtcccaatcttaccagatgctactggacttgaatggttaataaaactgcacagtgctgtt

SEQ ID NO: 304044 - DNA, 951 bp, Homo sapiens
gggaaaaagtatactaccgggtcgacggtcttcaatggggcaagggcttatgactgagtatgcaagatatccaggtgaaagaactggagaagcgtgcctcaggccaggcttttgagctgattctcagccctcggtcaaaagaatctgttccagaattccccctttcccctccaaagaagaaggatctttccctggaggaaattcagaagaaattagaagctgcagaagaaagacgcaagtcccatgaagctgaggtcttgaagcagctggctgagaaacgagagcacgagaaagaagtgcttcagaaggcaatagaagagaacaacaacttcagtaaaatggcagaagagaaactgacccacaaaatggaagctaataaagagaaccgagaggcacaaatggctgccaaactggaacgtttgcgagagaaggataagcacattgaagaagtgcggaagaacaaagaatccaaagaccctgctgacgagactgaagctgactaatttgttctgagaactgactttctccccatccccttcctaaatatccaaagactgtactggccagtgtcattttattttttccctcctgacaaatattttagaagctaatgtaggactgtataggtagatccagatccagactgtaagatgttgttttaggggctaaaggggagaaactgaaagtgttttactctttttctaaagtgttggtctttctaatgtagctatttttcttgttgcatcttttctacttcagtacacttggtgtactgggttaatggctagtactgtattggctctgtgaaaacatatttgtgaaaagagtatgtagtggcttcttttgaactgttagatgctgaatatctgttcacttttcaatcccaattctgtcccaatcttaccagatgctactggacttgaatggttaataaaactgcacagtgctgtt

SEQ ID NO: 304045 - DNA, 930 bp, Homo sapiens
  misc_feature (891)..(891): n is a, c, g, or t
  misc_feature (898)..(898): n is a, c, g, or t
  misc_feature (901)..(901): n is a, c, g, or t
ccctgaccgggcctaacggagcgaggacccggggtaatgccgaggggcggctcggactgagcaggactttccttatcccagttgattgtgcagaatacactgcctgtcgcttgtcttctattcaccatggcttcttctgatatccaggtgaaagaactggagaagcgtgcctcaggccaggcttttgagctgattctcagccctcggtcaaaagaatctgttccagaattccccctttcccctccaaagaagaaggatctttccctggaggaaattcagaagaaattagaagctgcagaagaaagacgcaagtcccatgaagctgaggtcttgaagcagctggctgagaaacgagagcacgagaaagaagtgcttcagaaggcaatagaagagaacaacaacttcagtaaaatggcagaagagaaactgacccacaaaatggaagctaataaagagaaccgagaggcacaaatggctgccaaactggaacgtttgcgagagaaggataagcacattgaagaagtgcggaagaacaaagaatccaaagaccctgctgacgagactgaagctgactaatttgttctgagaactgactttctccccatccccttcctaaatatccaaagactgtactggccagtgtcattttattttttccctcctgacaaatattttagaagctaatgtaggactgtataggtagatccagatccagactgtaagatgttgttttaggggctaaaggggagaaactgaaagtgttttactctttttctaaagtgttggtctttctaatgtagctatttttcttgttgcatcttttctacttcagtacacttggtgtactgggttaatggctagtactgtattggctctgtgaaaacatgattntggggtnttnacgcgtaatgccgattcgtttctttaccc

SEQ ID NO: 304046 - DNA, 932 bp, Homo sapiens
  misc_feature (23)..(23): n is a, c, g, or t
  misc_feature (26)..(26): n is a, c, g, or t
aaacccatatggcaggacgaggncgnggtgaattggccgagggcggctcggactgagcaggactttccttatcccagttgattgtgcagaatacactgcctgtcgcttgtcttctattcaccatggcttcttctgatatccaggtgaaagaactggagaagcgtgcctcaggccaggcttttgagctgattctcagccctcggtcaaaagaatctgttccagaattccccctttcccctccaaagaagaaggatctttccctggaggaaattcagaagaaattagaagctgcagaagaaagacgcaagtcccatgaagctgaggtcttgaagcagctggctgagaaacgagagcacgagaaagaagtgcttcagcacaaatggctgccaaactggaacgtttgcgagagaaggataagcacattgaagaagtgcggaagaacaaagaatccaaagaccctgctgacgagactgaagctgactaatttgttctgagaactgactttctccccatccccttcctaaatatccaaagactgtactggccagtgtcattttattttttccctcctgacaaatattttagaagctaatgtaggactgtataggtagatccagatccagactgtaagatgttgttttaggggctaaaggggagaaactgaaagtgttttactctttttctaaagtgttggtctttctaatgtagctatttttcttgttgcatcttttctacttcagtacacttggtgtactgggttaatggctagtactgtattggctctgtgaaaacatatttgtgaaaagagtatgtagtggcttcttttgaactgttagatgctgaatatctgttcacttttcaatcccaattctgtcccaatcttaccagatgctactggacttgaatggttaataaaactgcacagtgctgtt

SEQ ID NO: 304047 - DNA, 1550 bp, Homo sapiens
gtggggggcgggggcggcacgtgccgccgctctcggccaatgcggagccccgcgcggaggtcacgtgcctctgtttggcgcttttgtgcgcgcccgggtctgttggtgctcagagtgtggtcaggcggctcggactgagcaggactttccttatcccagttgattgtgcagaatacactgcctgtcgcttgtcttctattcaccatggcttcttctgatatccaggtgaaagaactggagaagcgtgcctcaggccaggcttttgagctgattctcagccctcggtcaaaagaatctgttccagaattccccctttcccctccaaagaagaaggatctttccctggaggaaattcagaagaaattagaagctgcagaagaaagacgcaagtcccatgaagctgaggtcttgaagcagctggctgagaaacgagagcacgagaaagaagtgcttcagaaggcaatagaagagaacaacaacttcagtaaaatggcagaagagaaactgacccacaaaatggaagctaataaagagaaccgagaggcacaaatggctgccaaactggaacgtttgcgagagaaggataagcacattgaagaagtgcggaagaacaaagaatccaaagaccctgctgacgagactgaagctgactaatttgttctgagaactgactttctccccatccccttcctaaatatccaaagactgtactggccagtgtcattttattttttccctcctgacaaatattttagaagctaatgtaggactgtataggtagatccagatccagactgtaagatgttgttttaggggctaaaggggagaaactgaaagtgttttactctttttctaaagtgttggtctttctaatgtagctatttttcttgttgcatcttttctacttcagtacacttggtgtactgggttaatggctagtactgtattggctctgtgaaaacatatttgtgaaaagagtatgtagtggcttcttttgaactgttagatgctgaatatctgttcacttttcaatcccaattctgtcccaatcttaccagatgctactggacttgaatggttaataaaactgcacagtgctgttggtggcagtgacttcttttgagttaggttaataaatcaagccatagagcccctcctggttgatacttgttccagatggggcctttggggctggtagaaatacccaacgcacaaatgaccgcacgttctctgccccgtttcttgccccagtgtggtttgcattgtctccttccacaatgactgctttgtttggatgcctcagcccaggtcagctgttactttctttcagatgtttatttgcaaacaaccattttttgttctgtgtcccttttaaaaggcagattaaaagcacaagcgtgtttctagagaacagttgagagagaatctcaagattctacttggtggtttgcttgctctacgttacaggtggggcatgtcctcatcctttcctgccataaaagctatgacacgagaatcagaatattaataaaactttatgtactgctgta

SEQ ID NO: 304048 - DNA, 829 bp, Homo sapiens
gtggggggcgggggcggcacgtgccgccgctctcggccaatgcggagccccgcgcggaggtcacgtgcctctgtttggcgcttttgtgcgcgcccgggtctgttggtgctcagagtgtggtcaggcggctcggactgagcaggactttccttatcccagttgattgtgcagaatacactgcctgtcgcttgtcttctattcaccatggcttcttctgatatccaggtgaaagaactggagaagcgtgcctcaggccaggcttttgagctgattctcagccctcggtcaaaagaatctgttccagaattccccctttcccctccaaagaagaaggatctttccctggaggaaattcagaagaaattagaagctgcagaagaaagacgcaaggtaaacgaagcaattcacagaaagcaggatattaatttatgtaatgggcagatcaattttatttctataacaggaagaaaacagaattgtagctacactgtgattattacatatgccagtgactggaaggaaataccagtcctcatttattgaactcctgttacatgcccgctcctttgtttatatttttctcctttaatacatggtgttgcctcaaataatggaaattagaaacagtttcaggaatgttaagtcgtttttctgcagtcatacaactagtaagtgttggggtcagaattcaagccctggtctatcttaaaccaaagctcatgcttctctcatgcttcctctttgaaaagatttgttgccagatgattctttggcactttggttttgttttttgagagctgtacaataacattttaaattgctagtgtga

SEQ ID NO: 304049 - DNA, 858 bp, Homo sapiens
  misc_feature (21)..(21): n is a, c, g, or t
aattcgcggccgcgtcgacangacagaaggggagagtgtggtcaggcggctcggactgagcaggactttccttatcccagttgattgtgcagaatacactgcctgtcgcttgtcttctattcaccatggcttcttctgatatccaggtgaaagaactggagaagcgtgcctcaggccaggcttttgagctgattctcagccctcggtcaaaagaatctgttccagaattccccctttcccctccaaagaagaaggatctttccctggaggaaattcagaagaaattagaagctgcagaagaaagacgcaagtcccatgaagctgaggtcttgaagcagctggctgagaaacgagagcacgagaaagaagtgcttcagaaggcaatagaagagaacaacaacttcagtaaaatggcagaagagaaactgacccacaaaatggaagctaataaagagaaccgagaggcacaaatggctgccaaactggaacgtttgcgagagaaggataagcacattgaagaagtgcggaagaacaaagaatccaaagaccctgctgacgagactgaagctgactaatttgttctgagaactgagtgttttactctttttctaaagtgttggtctttctaatgtagctatttttcttgttgcatcttttctacttcagtacacttggtgtactgggttaatggctagtactgtattggctctgtgaaaacatatttgtgaaaagagtatgtagtggcttcttttgaactgttagatgctgaatatctgttcacttttcaatcccaattctgtcccaatcttaccagatgctactggacttgaatggttaataaaactgcacagtgctgtt

SEQ ID NO: 304050 - DNA, 881 bp, Homo sapiens
  misc_feature (646)..(646): n is a, c, g, or t
  misc_feature (673)..(673): n is a, c, g, or t
gataatctccttgggggtctctgaccgtgctgggatggggctcccatctctggtaagattgtagcatcaatacacatagactgtcagctagtattctattcacacatggacttcttctgatatccaggtgaaagaactggagaagcgtgcctcaggccaggcttttgagctgattctcagccctcggtcaaaagaatctgttccagaattccccctttcccctccaaagaagaaggatctttccctggaggaaattcagaagaaattagaagctgcagaagaaagacgcaagtcccatgaagctgaggtcttgaagcagctggctgagaaacgagagcacgagaaagaagtgcttcagaaggcaatagaagagaacaacaacttcagtaaaatggcagaagagaaactgacccacaaaatggaagctaataaagagaaccgagaggcacaaatggctgccaaactggaacgtttgcgagagaaggataagcacattgaagaagtgcggaagaacaaagaatccaaagaccctgctgacgagactgaagctgactaatttgttctgagaactgactttctccccatccccttcctaaatatccaaagactgtactggccagtgtcattttcacaaaatggaagctantaaagagaaccgagaggcacaaatggntgccaaactggaacgtttgcgagagaaggataagcacattgaagaagtgcggaagaacaaagaatccaaagaccctgctgacgagactgaagctgactaatttgttctgagaactgactttctccccatccccttcctaaatatccaaagactgtactgggcaagaggtcaaaaaaataaaaaacctacggacaaaactgtagaagcc

SEQ ID NO: 304051 - DNA, 871 bp, Homo sapiens
  misc_feature (21)..(21): n is a, c, g, or t
aattcgcggccgcgtcgacangacagaaggggagagtgtggtcaggcggctcggactgagcaggactttccttatcccagttgattgtgcagaatacactgcctgtcgcttgtcttctattcaccatggcttcttctgatatccaggtgaaagaactggagaagcgtgcctcaggccaggcttttgagctgattctcagccctcggtcaaaagaatctgttccagaattccccctttcccctccaaagaagaaggatctttccctggaggaaattcagaagaaattagaagctgcagaagaaagacgcaagtcccatgaagctgaggtcttgaagcagctggctgagaaacgagagcacgagaaagaagtgcttcagaaggcaatagaagagaacaacaacttcagtaaaatggcagaagagaaactgacccacaaaatggaagctaataaagagaaccgagaggcacaaatggctgccaaactggaacgtttgcgagagaaggataagcacattgaagaagtgcggaagaacaaagaatccaaagaccctgctgacgagactgaagctgactaatttgttctgagaactgatctaattcaagatgttcgcaggtcatttattctcctcctaccaaatgcaagacggtacgtaggaagatggttgaccggaccagacggtggagtgtcaggacaaggggcactgagtgctccctacaaaagcggcccaagcactccgacgtctacaagcaacaaccggggcggcaggcacgcgggcggacccttgaagatagggacagacgacatcactgaacgcaaccaacgccacacaggaccaaacacaaacaggaaaggaaacacacagccacgaca

SEQ ID NO: 304052 - DNA, 1009 bp, Homo sapiens
ttgggggggggggacaaacttacggctaggtacgaggctgggtgtcaggcggctcggactgagcaggactttccttatcccagttgattgtgcagaatacactgcctgtcgcttgtcttctattcaccatggcttcttctgatatccaggtgaaagaactggagaagcgtgcctcaggccaggcttttgagctgattctcagccctcggtcaaaagaatctgttccagaattccccctttcccctccaaagaagaaggatctttccctggaggaaattcagaagaaattagaagctgcagaagaaagacgcaagtcccatgaagctgaggtcttgaagcagctggctgagaaacgagagcacgagaaagaagtgcttcagaaggcaatagaagagaacaacaacttcagtaaaatggcagaagagaaactgacccacaaaatggaagctaataaagagaaccgagaggcacaaatggctgccaaactggaacgtttgcgagagaaggataagcacattgaagaagtgcggaagaacaaagaatccaaagaccctgctgacgagactgaagctgactaatttgttctgagaactgactttctccccatccccttcctaaatatccaaagactgtactggccagtgtcattttattttttccctcctgacaaatattttagaagctaatgtaggactgtataggtagatccagatccagactgtaagatgttgttttaggggctaaaggggagaaactgaaagtgttttactctttttctaaagtgttggtctttctaatgtagctatttttcttgttgcatcttttctacttcagtacacttggtgtactgggttaatggctagtactgtattggctctgtgaaaacatctttgtggcaggttgtggggccttgagcgggaggggttgtcctttaccccttgccttcgagccggcgggggaacgcgggtcaaaaaaaaccgctttgtgggggggggcgggttccctagtg

SEQ ID NO: 304053 - DNA, 1020 bp, Homo sapiens
  misc_feature (23)..(23): n is a, c, g, or t
  misc_feature (26)..(26): n is a, c, g, or t
aaacccatatggcaggacgaggncgnggtgaattggccgagggcggctcggactgagcaggactttccttatcccagttgattgtgcagaatacactgcctgtcgcttgtcttctattcaccatggcttcttctgatatccaggtgaaagaactggagaagcgtgcctcaggccaggcttttgagctgattctcagccctcggtcaaaagaatctgttccagaattccccctttcccctccaaagaagaaggatctttccctggaggaaattcagaagaaattagaagctgcagaagaaagacgcaagtcccatgaagctgaggtcttgaagcagctggctgagaaacgagagcacgagaaagaagtgcttcagaaggcaatagaagagaacaacaacttcagtaaaatggcagaagagaaactgacccacaaaatggaagctaataaagagaaccgagaggcacaaatggctgccaaactggaacgtttgcgagagaaggataagcacattgaagaagtgcggaagaacaaagaatccaaagaccctgctgacgagactgaagctgactaatttgttctgagaactgactttctccccatccccttcctaaatatccaaagactgtactggccagtgtcattttattttttccctcctgacaaatattttagaagctaatgtaggactgtataggtagatccagatccagactgtaagatgttgttttaggggctaaaggggagaaactgaaagtgttttactctttttctaaagtgttggtctttctaatgtagctatttttcttgttgcatcttttctacttcagtacacttggtgtactgggttaatggctagtactgtattggctctgtgaaaacatatttgtgaaaagagtatgtagtggcttcttttgaactgttagatgctgaatatctgttcacttttcaatcccaattctgtcccaatcttaccagatgctactggacttgaatggttaataaaactgcacagtgctgtt

SEQ ID NO: 304054 - DNA, 1468 bp, Homo sapiens
  misc_feature (23)..(23): n is a, c, g, or t
  misc_feature (26)..(26): n is a, c, g, or t
aaacccatatggcaggacgaggncgnggtgaattggccgagggcggctcggactgagcaggactttccttatcccagttgattgtgcagaatacactgcctgtcgcttgtcttctattcaccatggcttcttctgatatccaggtgaaagaactggagaagcgtgcctcaggccaggcttttgagctgattctcagccctcggtcaaaagaatctgttccagaattccccctttcccctccaaagaagaaggatctttccctggaggaaattcagaagaaattagaagctgcagaagaaagacgcaagtcccatgaagctgaggtcttgaagcagctggctgagaaacgagagcacgagaaagaagtgcttcagaaggcaatagaagagaacaacaacttcagtaaaatggcagaagagaaactgacccacaaaatggaagctaataaagagaaccgagaggcacaaatggctgccaaactggaacgtttgcgagagaaggataagcacattgaagaagtgcggaagaacaaagaatccaaagaccctgctgacgagactgaagctgactaatttgttctgagaactgactttctccccatccccttcctaaatatccaaagactgtactggccagtgtcattttattttttccctcctgacaaatattttagaagctaatgtaggactgtataggtagatccagatccagactgtaagatgttgttttaggggctaaaggggagaaactgaaagtgttttactctttttctaaagtgttggtctttctaatgtagctatttttcttgttgcatcttttctacttcagtacacttggtgtactgggttaatggctagtactgtattggctctgtgaaaacatatttgtgaaaagagtatgtagtggcttcttttgaactgttagatgctgaatatctgttcacttttcaatcccaattctgtcccaatcttaccagatgctactggacttgaatggttaataaaactgcacagtgctgttggtggcagtgacttcttttgagttaggttaataaatcaagccatagagcccctcctggttgatacttgttccagatggggcctttggggctggtagaaatacccaacgcacaaatgaccgcacgttctctgccccgtttcttgccccagtgtggtttgcattgtctccttccacaatgactgctttgtttggatgcctcagcccaggtcagctgttactttctttcagatgtttatttgcaaacaaccattttttgttctgtgtcccttttaaaaggcagattaaaagcacaagcgtgtttctagagaacagttgagagagaatctcaagattctacttggtggtttgcttgctctacgttacaggtggggcatgtcctcatcctttcctgccataaaagctatgacacgagaatcagaatattaataaaactttatgtactgctgta

SEQ ID NO: 304055 - DNA, 1582 bp, Homo sapiens
  misc_feature (23)..(23): n is a, c, g, or t
  misc_feature (26)..(26): n is a, c, g, or t
aaacccatatggcaggacgaggncgnggtgaattggccgagggcggctcggactgagcaggactttccttatcccagttgattgtgcagaatacactgcctgtcgcttgtcttctattcaccatggcttcttctgatatccaggtgaaagaactggagaagcgtgcctcaggccaggcttttgagctgattctcagccctcggtcaaaagaatctgttccagaattccccctttcccctccaaagaagaaggatctttccctggaggaaattcagaagaaattagaagctgcagaagaaagacgcaagtcccatgaagctgaggtcttgaagcagctggctgagaaacgagagcacgagaaagaagtgcttcagaaggcaatagaagagaacaacaacttcagtaaaatggcagaagagaaactgacccacaaaatggaagctaataaagagaaccgagaggcacaaatggctgccaaactggaacgtttgcgagagaaggataagcacattgaagaagtgcggaagaacaaagaatccaaagaccctgctgacgagactgaagctgactaatttgttctgagaactgactttctccccatccccttcctaaatatccaaagactgtactggccagtgtcattttattttttccctcctgacaaatattttagaagctaatgtaggactgtataggtagatccagatccagactgtaagatgttgttttaggggctaaaggggagaaactgaaagtgttttactctttttctaaagtgttggtctttctaatgtagctatttttcttgttgcatcttttctacttcagtacacttggtgtactgggttaatggctagtactgtattggctctgtgaaaacatatttgtgaaaagagtatgtagtggcttcttttgaactgttagatgctgaatatctgttcacttttcaatcccaattctgtcccaatcttaccagatgctactggacttgaatggttaataaaactgcacagtgctgttggtggcagtgacttcttttgagttaggttaataaatcaagccatagagcccctcctggttgatacttgttccagatggggcctttggggctggtagaaatacccaacgcacaaatgaccgcacgttctctgccccgtttcttgccccagtgtggtttgcattgtctccttccacaatgactgctttgtttggatgcctcagcccaggtcagctgttactttctttcagatgtttatttgcaaacaaccattttttgttctgtgtcccttttaaaaggcagattaaaagcacaagcgtgtttctagagaacagttgagagagaatctcaagattctacttggtggtttgcttgctctacgttacaggtggggcatgtcctcatcctttcctgccataaaagctatgacacgagaatcagaatattaataaaactttatgtactgctgtaaaaaaacaacaacaacccccccaccaccgacaacccccccccaccaccccccccccacaccccccccaaacccgcgatccacacccgcgcacccacccacccggccttaccgcc

SEQ ID NO: 304056 - DNA, 1512 bp, Homo sapiens
  misc_feature (23)..(23): n is a, c, g, or t
  misc_feature (26)..(26): n is a, c, g, or t
aaacccatatggcaggacgaggncgnggtgaattggccgagggcggctcggactgagcaggactttccttatcccagttgattgtgcagaatacactgcctgtcgcttgtcttctattcaccatggcttcttctgatatccaggtgaaagaactggagaagcgtgcctcaggccaggcttttgagctgattctcagccctcggtcaaaagaatctgttccagaattccccctttcccctccaaagaagaaggatctttccctggaggaaattcagaagaaattagaagctgcagaagaaagacgcaagtcccatgaagctgaggtcttgaagcagctggctgagaaacgagagcacgagaaagaagtgcttcagaaggcaatagaagagaacaacaacttcagtaaaatggcagaagagaaactgacccacaaaatggaagctaataaagagaaccgagaggcacaaatggctgccaaactggaacgtttgcgagagaaggataagcacattgaagaagtgcggaagaacaaagaatccaaagaccctgctgacgagactgaagctgactaatttgttctgagaactgactttctccccatccccttcctaaatatccaaagactgtactggccagtgtcattttattttttccctcctgacaaatattttagaagctaatgtaggactgtataggtagatccagatccagactgtaagatgttgttttaggggctaaaggggagaaactgaaagtgttttactctttttctaaagtgttggtctttctaatgtagctatttttcttgttgcatcttttctacttcagtacacttggtgtactgggttaatggctagtactgtattggctctgtgaaaacatatttgtgaaaagagtatgtagtggcttcttttgaactgttagatgctgaatatctgttcacttttcaatcccaattctgtcccaatcttaccagatgctactggacttgaatggttaataaaactgcacagtgctgttggtggcagtgacttcttttgagttaggttaataaatcaagccatagagcccctcctggttgatacttgttccagatggggcctttggggctggtagaaatacccaacgcacaaatgaccgcacgttctctgccccgtttcttgccccagtgtggtttgcattgtctccttccacaatgactgctttgtttggatgcctcagcccaggtcagctgttactttctttcagatgtttatttgcaaacaaccattttttgttctgtgtcccttttaaaaggcagattaaaagcacaagcgtgtttctagagaacagttgagagagaatctcaagattctacttggtggtttgcttgctctacgttacaggtggggcatgtcctcatcctttcctgccataaaagctatgacacgagaatcagaatattaataaaactttatgtactgctgtacaactcctgtgaaatgactaaagggaaccttaattatttctaaa

SEQ ID NO: 304057 - DNA, 2089 bp, Homo sapiens
  misc_feature (23)..(23): n is a, c, g, or t
  misc_feature (26)..(26): n is a, c, g, or t
aaacccatatggcaggacgaggncgnggtgaattggccgagggcggctcggactgagcaggactttccttatcccagttgattgtgcagaatacactgcctgtcgcttgtcttctattcaccatggcttcttctgatatccaggtgaaagaactggagaagcgtgcctcaggccaggcttttgagctgattctcagccctcggtcaaaagaatctgttccagaattccccctttcccctccaaagaagaaggatctttccctggaggaaattcagaagaaattagaagctgcagaagaaagacgcaagtcccatgaagctgaggtcttgaagcagctggctgagaaacgagagcacgagaaagaagtgcttcagaaggcaatagaagagaacaacaacttcagtaaaatggcagaagagaaactgacccacaaaatggaagctaataaagagaaccgagaggcacaaatggctgccaaactggaacgtttgcgagagaaggataagcacattgaagaagtgcggaagaacaaagaatccaaagaccctgctgacgagactgaagctgactaatttgttctgagaactgactttctccccatccccttcctaaatatccaaagactgtactggccagtgtcattttattttttccctcctgacaaatattttagaagctaatgtaggactgtataggtagatccagatccagactgtaagatgttgttttaggggctaaaggggagaaactgaaagtgttttactctttttctaaagtgttggtctttctaatgtagctatttttcttgttgcatcttttctacttcagtacacttggtgtactgggttaatggctagtactgtattggctctgtgaaaacatatttgtgaaaagagtatgtagtggcttcttttgaactgttagatgctgaatatctgttcacttttcaatcccaattctgtcccaatcttaccagatgctactggacttgaatggttaataaaactgcacagtgctgttggtggcagtgacttcttttgagttaggttaataaatcaagccatagagcccctcctggttgatacttgttccagatggggcctttggggctggtagaaatacccaacgcacaaatgaccgcacgttctctgccccgtttcttgccccagtgtggtttgcattgtctccttccacaatgactgctttgtttggatgcctcagcccaggtcagctgttactttctttcagatgtttatttgcaaacaaccattttttgttctgtgtcccttttaaaaggcagattaaaagcacaagcgtgtttctagagaacagttgagagagaatctcaagattctacttggtggtttgcttgctctacgttacaggtggggcatgtcctcatcctttcctgccataaaagctatgacacgagaatcagaatattaataaaactttatgtactgctgtaaaaaaaaaaaaaaaaaaaaaaaaaaaaacacttttctggcgcgcgccttgggccctctgaaaaacgtttttataacccatttctttgggcgccggggccccacggtggtatagcggagacacctgggtcaaatagcgtgtccatggagagaaaactcggcgggccacgaaccaacaggcggcgctgggacatcctccccccaaatataaaaaaagcgcccccggggccaaacacccagcaagcggtttctgagaaacacaatctctccaaaatgggattctcggggagccccccatccacggggacactcttattacaaaagaggaggacctcccacaagggaagagcctcgcaataatactacgaatctaaaacgcccccacaatcgctgtggtacccatcctcacaaaccaaacaaaacgaaccaagcgagcgtaaaaaaggatgacagtaagcaggcgcaaaaacgacaacaggacgcaccgagacgacaacaaaaaggagctggcgagcacgccgttgcgccgacagcgaagagggccagccaaagcgcgagggagcatagacggttcagcccgaagaagcggaagacgcgcgacacgcaggcgcagcacacacgcc

SEQ ID NO: 304058 - DNA, 1561 bp, Homo sapiens
  misc_feature (23)..(23): n is a, c, g, or t
  misc_feature (26)..(26): n is a, c, g, or t
  misc_feature (1533)..(1533): n is a, c, g, or t
  misc_feature (1550)..(1551): n is a, c, g, or t
aaacccatatggcaggacgaggncgnggtgaattggccgagggcggctcggactgagcaggactttccttatcccagttgattgtgcagaatacactgcctgtcgcttgtcttctattcaccatggcttcttctgatatccaggtgaaagaactggagaagcgtgcctcaggccaggcttttgagctgattctcagccctcggtcaaaagaatctgttccagaattccccctttcccctccaaagaagaaggatctttccctggaggaaattcagaagaaattagaagctgcagaagaaagacgcaagtcccatgaagctgaggtcttgaagcagctggctgagaaacgagagcacgagaaagaagtgcttcagaaggcaatagaagagaacaacaacttcagtaaaatggcagaagagaaactgacccacaaaatggaagctaataaagagaaccgagaggcacaaatggctgccaaactggaacgtttgcgagagaaggataagcacattgaagaagtgcggaagaacaaagaatccaaagaccctgctgacgagactgaagctgactaatttgttctgagaactgactttctccccatccccttcctaaatatccaaagactgtactggccagtgtcattttattttttccctcctgacaaatattttagaagctaatgtaggactgtataggtagatccagatccagactgtaagatgttgttttaggggctaaaggggagaaactgaaagtgttttactctttttctaaagtgttggtctttctaatgtagctatttttcttgttgcatcttttctacttcagtacacttggtgtactgggttaatggctagtactgtattggctctgtgaaaacatatttgtgaaaagagtatgtagtggcttcttttgaactgttagatgctgaatatctgttcacttttcaatcccaattctgtcccaatcttaccagatgctactggacttgaatggttaataaaactgcacagtgctgttggtggcagtgacttcttttgagttaggttaataaatcaagccatagagcccctcctggttgatacttgttccagatggggcctttggggctggtagaaatacccaacgcacaaatgaccgcacgttctctgccccgtttcttgccccagtgtggtttgcattgtctccttccacaatgactgctttgtttggatgcctcagcccaggtcagctgttactttctttcagatgtttatttgcaaacaaccattttttgttctgtgtcccttttaaaaggcagattaaaagcacaagcgtgtttctagagaacagttgagagagaatctcaagattctacttggtggtttgcttgctctacgttacaggtggggcatgtcctcatcctttcctgccataaaagctatgacacgagaatcagaatattaataaaactttatgtactgctgtaaaaaaaaaaaaaaaaaaaaaaaaaaaaaaaaaaaaaaaaaaaaaaaaaaaaaaccacaaacaaanaaataaacaacaaaaannagagggggcg

SEQ ID NO: 304059 - DNA, 1389 bp, Homo sapiens
  misc_feature (23)..(23): n is a, c, g, or t
  misc_feature (26)..(26): n is a, c, g, or t
  misc_feature (1323)..(1323): n is a, c, g, or t
  misc_feature (1336)..(1336): n is a, c, g, or t
  misc_feature (1362)..(1362): n is a, c, g, or t
aaacccatatggcaggacgaggncgnggtgaattggccgagggcggctcggactgagcaggactttccttatcccagttgattgtgcagaatacactgcctgtcgcttgtcttctattcaccatggcttcttctgatatccaggtgaaagaactggagaagcgtgcctcaggccaggcttttgagctgattctcagccctcggtcaaaagaatctgttccagaattccccctttcccctccaaagaagaaggatctttccctggaggaaattcagaagaaattagaagctgcagaagaaagacgcaagtcccatgaagctgaggtcttgaagcagctggctgagaaacgagagcacgagaaagaagtgcttcagaaggcaatagaagagaacaacaacttcagtaaaatggcagaagagaaactgacccacaaaatggaagctaataaagagaaccgagaggcacaaatggctgccaaactggaacgtttgcgagagaaggataagcacattgaagaagtgcggaagaacaaagaatccaaagaccctgctgacgagactgaagctgactaatttgttctgagaactgactttctccccatccccttcctaaatatccaaagactgtactggccagtgtcattttattttttccctcctgacaaatattttagaagctaatgtaggactgtataggtagatccagatccagactgtaagatgttgttttaggggctaaaggggagaaactgaaagtgttttactctttttctaaagtgttggtctttctaatgtagctatttttcttgttgcatcttttctacttcagtacacttggtgtactgggttaatggctagtactgtattggctctgtgaaaacatatttgtgaaaagagtatgtagtggcttcttttgaactgttagatgctgaatatctgttcacttttcaatcccaattctgtcccaatcttaccagatgctactggacttgaatggttaataaaactgcacagtgctgttggtggcagtgacttcttttgagttaggttaataaatcaagccatagagcccctcctggttgatacttgttccagatggggcctttggggctggtagaaatacccaacgcacaaatgaccgcacgttctctgccccgtttcttgccccagtgtggtttgcattgtctccttccacaatgactgctttgtttggatgcctcagcccaggtcagctgttactttctttcagatgtttatttgcaaacaaccattttttgttctgtgtcccttttaaaaaagggcagaatttaaaaaagccacaaancgttgttttcctnagaaaaaaacaagtttgaaaaaaaanaaatcctccaagaattccttacctttg

SEQ ID NO: 304060 - DNA, 1024 bp, Homo sapiens
ccctgaccgggcctaacggagcgaggacccggggtaatgccgaggggcggctcggactgagcaggactttccttatcccagttgattgtgcagaatacactgcctgtcgcttgtcttctattcaccatggcttcttctgatatccaggtgaaagaactggagaagcgtgcctcaggccaggcttttgagctgattctcagccctcggtcaaaagaatctgttccagaattccccctttcccctccaaagaagaaggatctttccctggaggaaattcagaagaaattagaagctgcagaagaaagacgcaagtcccatgaagctgaggtcttgaagcagctggctgagaaacgagagcacgagaaagaagtgcttcagaaggcaatagaagagaacaacaacttcagtaaaatggcagaagagaaactgacccacaaaatggaagctaataaagagaaccgagaggcacaaatggctgccaaactggaacgtttgcgagagaaggataagcacattgaagaagtgcggaagaacaaagaatccaaagaccctgctgacgagactgaagctgactaatttgttctgagaactgactttctccccatccccttcctaaatatccaaagactgtactggccagtgtcattttattttttccctcctgacaaatattttagaagctaatgtaggactgtataggtagatccagatccagactgtaagatgttgttttaggggctaaaggggagaaactgaaagtgttttactctttttctaaagtgttggtctttctaatgtagctatttttcttgttgcatcttttctacttcagtacacttggtgtactgggttaatggctagtactgtattggctctgtgaaaacatatttgtgaaaagagtatgtagtggcttcttttgaactgttagatgctgaatatctgttcacttttcaatcccaattctgtcccaatcttaccagatgctactggacttgaatggttaataaaactgcacagtgctgtt

SEQ ID NO: 304061 - DNA, 1359 bp, Homo sapiens
  misc_feature (23)..(23): n is a, c, g, or t
  misc_feature (26)..(26): n is a, c, g, or t
aaacccatatggcaggacgaggncgnggtgaattggccgagggcggctcggactgagcaggactttccttatcccagttgattgtgcagaatacactgcctgtcgcttgtcttctattcaccatggcttcttctgatatccaggtgaaagaactggagaagcgtgcctcaggccaggcttttgagctgattctcagccctcggtcaaaagaatctgttccagaattccccctttcccctccaaagaagaaggatctttccctggaggaaattcagaagaaattagaagctgcagaagaaagacgcaagtcccatgaagctgaggtcttgaagcagctggctgagaaacgagagcacgagaaagaagtgcttcagaaggcaatagaagagaacaacaacttcagtaaaatggcagaagagaaactgacccacaaaatggaagctaataaagagaaccgagaggcacaaatggctgccaaactggaacgtttgcgagagaaggataagcacattgaagaagtgcggaagaacaaagaatccaaagaccctgctgacgagactgaagctgactaatttgttctgagaactgactttctccccatccccttcctaaatatccaaagactgtactggccagtgtcattttattttttccctcctgacaaatattttagaagctaatgtaggactgtataggtagatccagatccagactgtaagatgttgttttaggggctaaaggggagaaactgaaagtgttttactctttttctaaagtgttggtctttctaatgtagctatttttcttgttgcatcttttctacttcagtacacttggtgtactgggttaatggctagtactgtattggctctgtgaaaacatatttgtgaaaagagtatgtagtggcttcttttgaactgttagatgctgaatatctgttcacttttcaatcccaattctgtcccaatcttaccagatgctactggacttgaatggttaataaaactgcacagtgctgttaaaaaaaaaaaaaaaaaaaaaaaaaaaaaaaaaaaaaaaaaaaaaaaaaaaaacaaaaaaaaaaatacacaaaaaaagcaccaaaaaataaaacacaacaaaaagaaataaaatcagacaacaagcgactgtaacctcagaaaataaagcaaaggttggcagaagtcgaatagttaattcacgcacgcaggatcacaccataagtgaccaccgagacaacctctcgtatcagcgaggcgctttcctcaaatagggccccatatctcacacgcagagacgccagctccggcaaccacatcttagataataacattaccgccgcactagcattggaccgcc

SEQ ID NO: 304062 - DNA, 1059 bp, Homo sapiens
  misc_feature (23)..(23): n is a, c, g, or t
  misc_feature (26)..(26): n is a, c, g, or t
  misc_feature (1031)..(1031): n is a, c, g, or t
  misc_feature (1048)..(1049): n is a, c, g, or t
aaacccatatggcaggacgaggncgnggtgaattggccgagggcggctcggactgagcaggactttccttatcccagttgattgtgcagaatacactgcctgtcgcttgtcttctattcaccatggcttcttctgatatccaggtgaaagaactggagaagcgtgcctcaggccaggcttttgagctgattctcagccctcggtcaaaagaatctgttccagaattccccctttcccctccaaagaagaaggatctttccctggaggaaattcagaagaaattagaagctgcagaagaaagacgcaagtcccatgaagctgaggtcttgaagcagctggctgagaaacgagagcacgagaaagaagtgcttcagaaggcaatagaagagaacaacaacttcagtaaaatggcagaagagaaactgacccacaaaatggaagctaataaagagaaccgagaggcacaaatggctgccaaactggaacgtttgcgagagaaggataagcacattgaagaagtgcggaagaacaaagaatccaaagaccctgctgacgagactgaagctgactaatttgttctgagaactgactttctccccatccccttcctaaatatccaaagactgtactggccagtgtcattttattttttccctcctgacaaatattttagaagctaatgtaggactgtataggtagatccagatccagactgtaagatgttgttttaggggctaaaggggagaaactgaaagtgttttactctttttctaaagtgttggtctttctaatgtagctatttttcttgttgcatcttttctacttcagtacacttggtgtactgggttaatggctagtactgtattggctctgtgaaaacatatttgtgaaaagagtatgtagtggcttcttttgaactgttagatgctgaatatctgttcacttttcaatcccaattctgtcccaatcttaccagatgctactggacttgaatggttaataaaactgcacagtgctgttcacaaacaaanaaataaacaacaaaaannagagggggcg

SEQ ID NO: 304063 - DNA, 1123 bp, Homo sapiens
  misc_feature (23)..(23): n is a, c, g, or t
  misc_feature (26)..(26): n is a, c, g, or t
  misc_feature (1097)..(1097): n is a, c, g, or t
  misc_feature (1108)..(1108): n is a, c, g, or t
  misc_feature (1112)..(1112): n is a, c, g, or t
aaacccatatggcaggacgaggncgnggtgaattggccgagggcggctcggactgagcaggactttccttatcccagttgattgtgcagaatacactgcctgtcgcttgtcttctattcaccatggcttcttctgatatccaggtgaaagaactggagaagcgtgcctcaggccaggcttttgagctgattctcagccctcggtcaaaagaatctgttccagaattccccctttcccctccaaagaagaaggatctttccctggaggaaattcagaagaaattagaagctgcagaagaaagacgcaagtcccatgaagctgaggtcttgaagcagctggctgagaaacgagagcacgagaaagaagtgcttcagaaggcaatagaagagaacaacaacttcagtaaaatggcagaagagaaactgacccacaaaatggaagctaataaagagaaccgagaggcacaaatggctgccaaactggaacgtttgcgagagaaggataagcacattgaagaagtgcggaagaacaaagaatccaaagaccctgctgacgagactgaagctgactaatttgttctgagaactgactttctccccatccccttcctaaatatccaaagactgtactggccagtgtcattttattttttccctcctgacaaatattttagaagctaatgtaggactgtataggtagatccagatccagactgtaagatgttgttttaggggctaaaggggagaaactgaaagtgttttactctttttctaaagtgttggtctttctaatgtagctatttttcttgttgcatcttttctacttcagtacacttggtgtactgggttaatggctagtactgtattggctctgtgaaaacatatttgtgaaaagagtatgtagtggcttcttttgaactgttagatgctgaatatctgttcacttttcaatcccaattctgtcccaatcttaccagatgctactggacttgaatggttaataaaactgcacagtgctgttaaaaaaaaaaaaaaaaaaaaaaaaaaaaaaaaaaaaaaaaaaaaaaaaaaaaaaaaaaaaaaacaaaaaaaaaaaanaaaaaaaaaanaagnaaaaaagaaaa

SEQ ID NO: 304064 - DNA, 1117 bp, Homo sapiens
  misc_feature (23)..(23): n is a, c, g, or t
  misc_feature (26)..(26): n is a, c, g, or t
  misc_feature (1091)..(1091): n is a, c, g, or t
  misc_feature (1102)..(1102): n is a, c, g, or t
  misc_feature (1106)..(1106): n is a, c, g, or t
aaacccatatggcaggacgaggncgnggtgaattggccgagggcggctcggactgagcaggactttccttatcccagttgattgtgcagaatacactgcctgtcgcttgtcttctattcaccatggcttcttctgatatccaggtgaaagaactggagaagcgtgcctcaggccaggcttttgagctgattctcagccctcggtcaaaagaatctgttccagaattccccctttcccctccaaagaagaaggatctttccctggaggaaattcagaagaaattagaagctgcagaagaaagacgcaagtcccatgaagctgaggtcttgaagcagctggctgagaaacgagagcacgagaaagaagtgcttcagaaggcaatagaagagaacaacaacttcagtaaaatggcagaagagaaactgacccacaaaatggaagctaataaagagaaccgagaggcacaaatggctgccaaactggaacgtttgcgagagaaggataagcacattgaagaagtgcggaagaacaaagaatccaaagaccctgctgacgagactgaagctgactaatttgttctgagaactgactttctccccatccccttcctaaatatccaaagactgtactggccagtgtcattttattttttccctcctgacaaatattttagaagctaatgtaggactgtataggtagatccagatccagactgtaagatgttgttttaggggctaaaggggagaaactgaaagtgttttactctttttctaaagtgttggtctttctaatgtagctatttttcttgttgcatcttttctacttcagtacacttggtgtactgggttaatggctagtactgtattggctctgtgaaaacatatttgtgaaaagagtatgtagtggcttcttttgaactgttagatgctgaatatctgttcacttttcaatcccaattctgtcccaatcttaccagatgctactggacttgaatggttaataaaactgcacagtgctgttaaaaaaaaaaaaaaaaaaaaaaaaaaaaaaaaaaaaaaaaaaaaaaaaaaaaaaaaacaaaaaaaaaaaanaaaaaaaaaanaagnaaaaaagaaaa

SEQ ID NO: 304065 - DNA, 1015 bp, Homo sapiens
  misc_feature (23)..(23): n is a, c, g, or t
  misc_feature (26)..(26): n is a, c, g, or t
  misc_feature (945)..(945): n is a, c, g, or t
aaacccatatggcaggacgaggncgnggtgaattggccgagggcggctcggactgagcaggactttccttatcccagttgattgtgcagaatacactgcctgtcgcttgtcttctattcaccatggcttcttctgatatccaggtgaaagaactggagaagcgtgcctcaggccaggcttttgagctgattctcagccctcggtcaaaagaatctgttccagaattccccctttcccctccaaagaagaaggatctttccctggaggaaattcagaagaaattagaagctgcagaagaaagacgcaagtcccatgaagctgaggtcttgaagcagctggctgagaaacgagagcacgagaaagaagtgcttcagaaggcaatagaagagaacaacaacttcagtaaaatggcagaagagaaactgacccacaaaatggaagctaataaagagaaccgagaggcacaaatggctgccaaactggaacgtttgcgagagaaggataagcacattgaagaagtgcggaagaacaaagaatccaaagaccctgctgacgagactgaagctgactaatttgttctgagaactgactttctccccatccccttcctaaatatccaaagactgtactggccagtgtcattttattttttccctcctgacaaatattttagaagctaatgtaggactgtataggtagatccagatccagactgtaagatgttgttttaggggctaaaggggagaaactgaaagtgttttactctttttctaaagtgttggtctttctaatgtagctatttttcttgttgcatcttttctacttcagtacacttggtgtactgggttaatggctagtactgtattggctctgtgaaaacatcctttgtgacaggttgttgggtcttgacgtagatgtgatattgtctttaatccatttgtccanttcagagtaggtgaggttaacggcgggggggttaaaataaaaaaactcgttttgggggagagagagggtc

SEQ ID NO: 304066 - DNA, 914 bp, Homo sapiens
tcgagctcgttacccgtcctacatagtgtatatccaggtgaaagaactggagaagcgtgcctcaggccaggcttttgagctgattctcagccctcggtcaaaagaatctgttccagaattccccctttcccctccaaagaagaaggatctttccctggaggaaattcagaagaaattagaagctgcagaagaaagacgcaagtcccatgaagctgaggtcttgaagcagctggctgagaaacgagagcacgagaaagaagtgcttcagaaggcaatagaagagaacaacaacttcagtaaaatggcagaagagaaactgacccacaaaatggaagctaataaagagaaccgagaggcacaaatggctgccaaactggaacgtttgcgagagaaggataagcacattgaagaagtgcggaagaacaaagaatccaaagaccctgctgacgagactgaagctgactaatttgttctgagaactgactttctccccatccccttcctaaatatccaaagactgtactggccagtgtcattttattttttccctcctgacaaatattttagaagctaatgtaggactgtataggtagatccagatccagactgtaagatgttgttttaggggctaaaggggagaaactgaaagtgttttactctttttctaaagtgttggtctttctaatgtagctatttttcttgttgcatcttttctacttcagtacacttggtgtactgggttaatggctagtactgtattggctctgtgaaaacatatttgtgaaaagagtatgtagtggcttcttttgaactgttagatgctgaatatctgttcacttttcaatcccaattctgtcccaatcttaccagatgctactggacttgaatggttaataaaactgcacagtgctgtt

SEQ ID NO: 304067 - DNA, 1003 bp, Homo sapiens
  misc_feature (23)..(23): n is a, c, g, or t
  misc_feature (26)..(26): n is a, c, g, or t
aaacccatatggcaggacgaggncgnggtgaattggccgagggcggctcggactgagcaggactttccttatcccagttgattgtgcagaatacactgcctgtcgcttgtcttctattcaccatggcttcttctgatatccaggtgaaagaactggagaagcgtgcctcaggccaggcttttgagctgattctcagccctcggtcaaaagaatctgttccagaattccccctttcccctccaaagaagaaggatctttccctggaggaaattcagaagaaattagaagctgcagaagaaagacgcaagtcccatgaagctgaggtcttgaagcagctggctgagaaacgagagcacgagaaagaagtgcttcagaaggcaatagaagagaacaacaacttcagtaaaatggcagaagagaaactgacccacaaaatggaagctaataaagagaaccgagaggcacaaatggctgccaaactggaacgtttgcgagagaaggataagcacattgaagaagtgcggaagaacaaagaatccaaagaccctgctgacgagactgaagctgactaatttgttctgagaactgactttctccccatccccttcctaaatatccaaagactgtactggccagtgtcattttattttttccctcctgacaaatattttagaagctaatgtaggactgtataggtagatccagatccagactgtaagatgttgttttaggggctaaaggggagaaactgaaagtgttttactctttttctaaagtgttggtctttctaatgtagctatttttcttgttgcatcttttctacttcagtacacttggtgtactgggttaatggctagtactgtattggctctgtgaaaacatctttgtggcaggttgtggggccttgagcgggaggggttgtcctttaccccttgccttcgagccggcgggggaacgcgggtcaaaaaaaaccgctttgtgggggggggcgggttccctagtg

SEQ ID NO: 304068 - DNA, 926 bp, Homo sapiens
  misc_feature (23)..(23): n is a, c, g, or t
  misc_feature (26)..(26): n is a, c, g, or t
  misc_feature (887)..(887): n is a, c, g, or t
  misc_feature (894)..(894): n is a, c, g, or t
  misc_feature (897)..(897): n is a, c, g, or t
aaacccatatggcaggacgaggncgnggtgaattggccgagggcggctcggactgagcaggactttccttatcccagttgattgtgcagaatacactgcctgtcgcttgtcttctattcaccatggcttcttctgatatccaggtgaaagaactggagaagcgtgcctcaggccaggcttttgagctgattctcagccctcggtcaaaagaatctgttccagaattccccctttcccctccaaagaagaaggatctttccctggaggaaattcagaagaaattagaagctgcagaagaaagacgcaagtcccatgaagctgaggtcttgaagcagctggctgagaaacgagagcacgagaaagaagtgcttcagaaggcaatagaagagaacaacaacttcagtaaaatggcagaagagaaactgacccacaaaatggaagctaataaagagaaccgagaggcacaaatggctgccaaactggaacgtttgcgagagaaggataagcacattgaagaagtgcggaagaacaaagaatccaaagaccctgctgacgagactgaagctgactaatttgttctgagaactgactttctccccatccccttcctaaatatccaaagactgtactggccagtgtcattttattttttccctcctgacaaatattttagaagctaatgtaggactgtataggtagatccagatccagactgtaagatgttgttttaggggctaaaggggagaaactgaaagtgttttactctttttctaaagtgttggtctttctaatgtagctatttttcttgttgcatcttttctacttcagtacacttggtgtactgggttaatggctagtactgtattggctctgtgaaaacatgattntggggtnttnacgcgtaatgccgattcgtttctttaccc

SEQ ID NO: 304069 - DNA, 1146 bp, Homo sapiens
  misc_feature (23)..(23): n is a, c, g, or t
  misc_feature (26)..(26): n is a, c, g, or t
  misc_feature (1145)..(1145): n is a, c, g, or t
aaacccatatggcaggacgaggncgnggtgaattggccgagggcggctcggactgagcaggactttccttatcccagttgattgtgcagaatacactgcctgtcgcttgtcttctattcaccatggcttcttctgatatccaggtgaaagaactggagaagcgtgcctcaggccaggcttttgagctgattctcagccctcggtcaaaagaatctgttccagaattccccctttcccctccaaagaagaaggatctttccctggaggaaattcagaagaaattagaagctgcagaagaaagacgcaagtcccatgaagctgaggtcttgaagcagctggctgagaaacgagagcacgagaaagaagtgcttcagaaggcaatagaagagaacaacaacttcagtaaaatggcagaagagaaactgacccacaaaatggaagctaataaagagaaccgagaggcacaaatggctgccaaactggaacgtttgcgagagaaggataagcacattgaagaagtgcggaagaacaaagaatccaaagaccctgctgacgagactgaagctgactaatttgttctgagaactgactttctccccatccccttcctaaatatccaaagactgtactggccagtgtcattttattttttccctcctgacaaatattttagaagctaatgtaggactgtataggtagatccagatccagactgtaagatgttgttttaggggctaaaggggagaaactgaaagtgttttactctttttctaaagtgttggtctttctaatgtagctatttttcttgttgcatcttttctacttcagtacacttggtgtactgagacgcagtgggtccgggaaaccttttggttgaacgaagatatgtgggggggcgtgaacaggttaatcgggagaaatcggttccgtttaaagacccacatatgtgccaacattccaagaacagggcagttcagggtagtagaagacgggcggtgagcaaaaaaggggggggcagataaatggggaggaagcaagacgtgttaagtactagagtatacaatatggaggaagtggaagcgaataagaagcgtgtgtagtatgaaattactagtctatgcgtattttttcttggtgatgttaana

SEQ ID NO: 304070 - DNA, 971 bp, Homo sapiens
  misc_feature (23)..(23): n is a, c, g, or t
  misc_feature (26)..(26): n is a, c, g, or t
  misc_feature (846)..(846): n is a, c, g, or t
  misc_feature (856)..(856): n is a, c, g, or t
  misc_feature (866)..(866): n is a, c, g, or t
  misc_feature (868)..(868): n is a, c, g, or t
  misc_feature (870)..(870): n is a, c, g, or t
aaacccatatggcaggacgaggncgnggtgaattggccgagggcggctcggactgagcaggactttccttatcccagttgattgtgcagaatacactgcctgtcgcttgtcttctattcaccatggcttcttctgatatccaggtgaaagaactggagaagcgtgcctcaggccaggcttttgagctgattctcagccctcggtcaaaagaatctgttccagaattccccctttcccctccaaagaagaaggatctttccctggaggaaattcagaagaaattagaagctgcagaagaaagacgcaagtcccatgaagctgaggtcttgaagcagctggctgagaaacgagagcacgagaaagaagtgcttcagaaggcaatagaagagaacaacaacttcagtaaaatggcagaagagaaactgacccacaaaatggaagctaataaagagaaccgagaggcacaaatggctgccaaactggaacgtttgcgagagaaggataagcacattgaagaagtgcggaagaacaaagaatccaaagaccctgctgacgagactgaagctgactaatttgttctgagaactgactttctccccatccccttcctaaatatccaaagactgtactggccagtgtcattttattttttccctcctgacaaatattttagaagctaatgtaggactgtataggtagatccagatccagactgtaagatgttgttttaggggctaaaggggagaaactgaaagtgttttactctttttctaaagtgttggtctttctaatgtagctatttttcttgttgcatcttttctacttcagtacacttggtgtactgcngctaggctancgtttggtcngnanaccttttgcaacacgctgtcggccttgaacggaaagcgactttgtccttcaccttgcccctccagccggcgggtacccccgctggggcgaaaaagggccac

SEQ ID NO: 304071 - DNA, 857 bp, Homo sapiens
  misc_feature (23)..(23): n is a, c, g, or t
  misc_feature (26)..(26): n is a, c, g, or t
aaacccatatggcaggacgaggncgnggtgaattggccgagggcggctcggactgagcaggactttccttatcccagttgattgtgcagaatacactgcctgtcgcttgtcttctattcaccatggcttcttctgatatccaggtgaaagaactggagaagcgtgcctcaggccaggcttttgagctgattctcagccctcggtcaaaagaatctgttccagaattccccctttcccctccaaagaagaaggatctttccctggaggaaattcagaagaaattagaagctgcagaagaaagacgcaagtcccatgaagctgaggtcttgaagcagctggctgagaaacgagagcacgagaaagaagtgcttcagaaggcaatagaagagaacaacaacttcagtaaaatggcagaagagaaactgacccacaaaatggaagctaataaagagaaccgagaggcacaaatggctgccaaactggaacgtttgcgagagaaggataagcacattgaagaagtgcggaagaacaaagaatccaaagaccctgctgacgagactgaagctgactaatttgttctgagaactgactttctccccatccccttcctaaatatccaaagactgtactggccagtgtcattttattttttccctcctgacaaatattttagaagctaatgtaggactgtataggtagatccagatccagactgtaagatgttgttttaggggctaaaggggagaaactgaaacattttattttttccctccatgacaaatattttagaagctaatgtaggactgtataggtagatccagatccagactgtaagatgttgttttaggggctaaaaa

SEQ ID NO: 304072 - DNA, 1313 bp, Homo sapiens
  misc_feature (23)..(23): n is a, c, g, or t
  misc_feature (26)..(26): n is a, c, g, or t
aaacccatatggcaggacgaggncgnggtgaattggccgagggcggctcggactgagcaggactttccttatcccagttgattgtgcagaatacactgcctgtcgcttgtcttctattcaccatggcttcttctgatatccaggtgaaagaactggagaagcgtgcctcaggccaggcttttgagctgattctcagccctcggtcaaaagaatctgttccagaattccccctttcccctccaaagaagaaggatctttccctggaggaaattcagaagaaattagaagctgcagaagaaagacgcaagtcccatgaagctgaggtcttgaagcagctggctgagaaacgagagcacgagaaagaagtgcttcagaaggcaatagaagagaacaacaacttcagtaaaatggcagaagagaaactgacccacaaaatggaagctaataaagagaaccgagaggcacaaatggctgccaaactggaacgtttgcgagagaaggataagcacattgaagaagtgcggaagaacaaagaatccaaagaccctgctgacgagactgaagctgactaatttgttctgagaactgactttctccccatccccttcctaaatatccaaagactgtactggccagtgtcattttattttttccctcctgacaaatattttagaagctaatgtaggactggttaatggctagtactgtattggctctgtgaaaacatatttgtgaaaagagtatgtagtggcttcttttgaactgttagatgctgaatatctgttcacttttcaatcccaattctgtcccaatcttaccagatgctactggacttgaatggttaataaaactgcacagtgctgttggtggcagtgacttcttttgagttaggttaataaatcaagccatagagcccctcctggttgatacttgttccagatggggcctttggggctggtagaaatacccaacgcacaaatgaccgcacgttctctgccccgtttcttgccccagtgtggtttgcattgtctccttccacaatgactgctttgtttggatgcctcagcccaggtcagctgttactttctttcagatgtttatttgcaaacaaccattttttgttctgtgtcccttttaaaaggcagattaaaagcacaagcgtgtttctagagaacagttgagagagaatctcaagattctacttggtggtttgcttgctctacgttacaggtggggcatgtcctcatcctttcctgccataaaagctatgacacgagaatcagaatattaataaaactttatgtactgctgta

SEQ ID NO: 304073 - DNA, 995 bp, Homo sapiens
  misc_feature (23)..(23): n is a, c, g, or t
  misc_feature (26)..(26): n is a, c, g, or t
aaacccatatggcaggacgaggncgnggtgaattggccgagggcggctcggactgagcaggactttccttatcccagttgattgtgcagaatacactgcctgtcgcttgtcttctattcaccatggcttcttctgatatccaggtgaaagaactggagaagcgtgcctcaggccaggcttttgagctgattctcagccctcggtcaaaagaatctgttccagaattccccctttcccctccaaagaagaaggatctttccctggaggaaattcagaagaaattagaagctgcagaagaaagacgcaagtcccatgaagctgaggtcttgaagcagctggctgagaaacgagagcacgagaaagaagtgcttcagaaggcaatagaagagaacaacaacttcagtaaaatggcagaagagaaactgacccacaaaatggaagctaataaagagaaccgagaggcacaaatggctgccaaactggaacgtttgcgagagaaggataagcacattgaagaagtgcggaagaacaaagaatccaaagaccctgctgacgagactgaagctttctccccatccccttcctaaatatccaaagactgtactggccagtgtcattttattttttccctcctgacaaatattttagaagctaatgtaggactgtataggtagatccagatccagactgtaagatgttgttttaggggctaaaggggagaaactgaaagtgttttactctttttctaaagtgttggtctttctaatgtagctatttttcttgttgcatcttttctacttcagtacacttggtgtactgggttaatggctagtactgtattggctctgtgaaaacatatttgtgaaaagagtatgtagtggcttcttttgaactgttagatgctgaatatctgttcacttttcaatcccaattctgtcccaatcttaccagatgctactggacttgaatggttaataaaactgcacagtgctgtt

SEQ ID NO: 304074 - DNA, 865 bp, Homo sapiens
  misc_feature (23)..(23): n is a, c, g, or t
  misc_feature (26)..(26): n is a, c, g, or t
aaacccatatggcaggacgaggncgnggtgaattggccgagggcggctcggactgagcaggactttccttatcccagttgattgtgcagaatacactgcctgtcgcttgtcttctattcaccatggcttcttctgatatccaggtgaaagaactggagaagcgtgcctcaggccaggcttttgagctgattctcagccctcggtcaaaagaatctgttccagaattccccctttcccctccaaagaagaaggatctttccctggaggaaattcagaagaaattagaagctgcagaagaaagacgcaagtcccatgaagctgaggtcttgaagcagctggctgagaaacgagagcacgagaaagaagtgcttcagaaggcaatagaagagaacaacaacttcagtaaaatggcagaagagaaactgacccacaaaatggaagctaataaagagaaccgagaggcacaaatggctgccaaactggaacgtttgcgagagaaggataagcacattgaagaagtgcggaagaacaaagaatccaaagaccctgctgacgagactgaagctgactaatttgttctgagaactgactttctccccatccccttcctaaatatccaaagactgtactggccagtgtcattttattttttccctcctgacaaatattttagaagctaatgtaggactggttaatggctagtactgtattggctctgtgaaaacatatttgtgaaaagagtatgtagtggcttcttttgaactgttagatgctgaatatctgttcacttttcaatcccaattctgtcccaatcttaccagatgctactggacttgaatggttaataaaactgcacagtgctgtt

SEQ ID NO: 304075 - DNA, 1303 bp, Homo sapiens
  misc_feature (23)..(23): n is a, c, g, or t
  misc_feature (26)..(26): n is a, c, g, or t
aaacccatatggcaggacgaggncgnggtgaattggccgagggcggctcggactgagcaggactttccttatcccagttgattgtgcagaatacactgcctgtcgcttgtcttctattcaccatggcttcttctgatatccaggtgaaagaactggagaagcgtgcctcaggccaggcttttgagctgattctcagccctcggtcaaaagaatctgttccagaattccccctttcccctccaaagaagaaggatctttccctggaggaaattcagaagaaattagaagctgcagaagaaagacgcaagtcccatgaagctgaggtcttgaagcagctggctgagaaacgagagcacgagaaagaagtgcttcagaaggcaatagaagagaacaacaacttcagtaaaatggcagaagagaaactgacccacaaaatggaagctaataaagagaaccgagaggcacaaatggctgccaaactggaacgtttgcgagagaaggataagcacattgaagaagtgcggaagaacaaagaatccaaagaccctgctgacgagactgaagctgactaatttgttctgagaactgagtgttttactctttttctaaagtgttggtctttctaatgtagctatttttcttgttgcatcttttctacttcagtacacttggtgtactgggttaatggctagtactgtattggctctgtgaaaacatatttgtgaaaagagtatgtagtggcttcttttgaactgttagatgctgaatatctgttcacttttcaatcccaattctgtcccaatcttaccagatgctactggacttgaatggttaataaaactgcacagtgctgttggtggcagtgacttcttttgagttaggttaataaatcaagccatagagcccctcctggttgatacttgttccagatggggcctttggggctggtagaaatacccaacgcacaaatgaccgcacgttctctgccccgtttcttgccccagtgtggtttgcattgtctccttccacaatgactgctttgtttggatgcctcagcccaggtcagctgttactttctttcagatgtttatttgcaaacaaccattttttgttctgtgtcccttttaaaaggcagattaaaagcacaagcgtgtttctagagaacagttgagagagaatctcaagattctacttggtggtttgcttgctctacgttacaggtggggcatgtcctcatcctttcctgccataaaagctatgacacgagaatcagaatattaataaaactttatgtactgctgta

SEQ ID NO: 304076 - DNA, 964 bp, Homo sapiens
  misc_feature (23)..(23): n is a, c, g, or t
  misc_feature (26)..(26): n is a, c, g, or t
aaacccatatggcaggacgaggncgnggtgaattggccgagggcggctcggactgagcaggactttccttatcccagttgattgtgcagaatacactgcctgtcgcttgtcttctattcaccatggcttcttctgatatccaggtgaaagaactggagaagcgtgcctcaggccaggcttttgagctgattctcagccctcggtcaaaagaatctgttccagaattccccctttcccctccaaagaagaaggatctttccctggaggaaattcagaagaaattagaagctgcagaagaaagacgcaagtcccatgaagctgaggtcttgaagcagctggctgagaaacgagagcacgagaaagaagtgcttcagaaggcaatagaagagaacaacaacttcagtaaaatggcagaagagaaactgacccacaaaatggaagctaataaagagaaccgagaggcacaaatggctgccaaactggaacgtttgcgagagaaggataagcacattgaagaagtgcggaagaacaaagaatccaaagaccctgctgacgagactgaagctgactaatttgttctgagaactgaattttttccctcctgacaaatattttagaagctaatgtaggactgtataggtagatccagatccagactgtaagatgttgttttaggggctaaaggggagaaactgaaagtgttttactctttttctaaagtgttggtctttctaatgtagctatttttcttgttgcatcttttctacttcagtacacttggtgtactgggttaatggctagtactgtattggctctgtgaaaacatatttgtgaaaagagtatgtagtggcttcttttgaactgttagatgctgaatatctgttcacttttcaatcccaattctgtcccaatcttaccagatgctactggacttgaatggttaataaaactgcacagtgctgtt

SEQ ID NO: 304077 - DNA, 911 bp, Homo sapiens
  misc_feature (23)..(23): n is a, c, g, or t
  misc_feature (26)..(26): n is a, c, g, or t
aaacccatatggcaggacgaggncgnggtgaattggccgagggcggctcggactgagcaggactttccttatcccagttgattgtgcagaatacactgcctgtcgcttgtcttctattcaccatggcttcttctgatatccaggtgaaagaactggagaagcgtgcctcaggccaggcttttgagctgattctcagccctcggtcaaaagaatctgttccagaattccccctttcccctccaaagaagaaggatctttccctggaggaaattcagaagaaattagaagctgcagaagaaagacgcaagtcccatgaagctgaggtcttgaagcagctggctgagaaacgagagcacgagaaagaagtgcttcagaaggcaatagaagagaacaacaacttcagtaaaatggcagaagagaaactgacccacaaaatggaagctaataaagagaaccgagaggcacaaatggctgccaaactggaacgtttgcgagagaaggataagcacattgaagaagtgcggaagaacaaagaatccaaagaccctgctgacgagactgaagctgactaatttgttctgagaactgactttctccccatccccttcctaaatatccaaagactgtactggccagtgtcattttgtgttttactctttttctaaagtgttggtctttctaatgtagctatttttcttgttgcatcttttctacttcagtacacttggtgtactgggttaatggctagtactgtattggctctgtgaaaacatatttgtgaaaagagtatgtagtggcttcttttgaactgttagatgctgaatatctgttcacttttcaatcccaattctgtcccaatcttaccagatgctactggacttgaatggttaataaaactgcacagtgctgtt

SEQ ID NO: 304078 - DNA, 1527 bp, Homo sapiens
  misc_feature (23)..(23): n is a, c, g, or t
  misc_feature (26)..(26): n is a, c, g, or t
aaacccatatggcaggacgaggncgnggtgaattggccgagggcggctcggactgagcaggactttccttatcccagttgattgtgcagaatacactgcctgtcgcttgtcttctattcaccatggcttcttctgatatccaggtgaaagaactggagaagcgtgcctcaggccaggcttttgagctgattctcagccctcggtcaaaagaatctgttccagaattccccctttcccctccaaagaagaaggatctttccctggaggaaattcagaagaaattagaagctgcagaagaaagacgcaagtcccatgaagctgaggtcttgaagcagctggctgagaaacgagagcacgagaaagaagtgcttcagaaggcaatagaagagaacaacaacttcagtaaaatggcagaagagaaactgacccacaaaatggaagctaataaagagaaccgagaggcacaaatggctgccaaactggaacgtttgcgagagaaggataagcacattgaagaagtgcggaagaacaaagaatccaaagaccctgctgacgagactgaagctgactaatttgttctgagaactgactttctccccatccccttcctaaatatccaaagactgtactggccagtgtcattttgtgttttactctttttctaaagtgttggtctttctaatgtagctatttttcttgttgcatcttttctacttcagtacacttggtgtactgggttaatggctagtactgtattggctctgtgaaaacatatttgtgaaaagagtatgtagtggcttcttttgaactgttagatgctgaatatctgttcacttttcaatcccaattctgtcccaatcttaccagatgctactggacttgaatggttaataaaactgcacagtgctgttaaaaaaaaaaaaaaaaaaaaaaaaaaaaaaaaaaaaaaaaaaaaaaaaaaaaaccggggggctcttatgtgggggggcggcggaaaaaagacggggatcaagagaagaggaggacaggtgggtcatcagatggtgttacggtagaccaccattttgtgcgtgtaccagagcggggtcaaaccgccgggggctacccccaaagagggggaggcggataatacatcggcgaaaaacgccgggtgtttaatcgcggttttagtgacttcgccggacacacaaacaccaacgaaccaacaaacaatagacgaaaagagcaaccgacgaagaagacaacagaccaaaaaacacaaacaaagatagaaacgaaccacgcaacaaaaaagcaagcgaatgacacacatcccaaaccagtacaaaaaacaacaacaagcaaacaaagcgagaaacaaaccaaaaaagaaaaacgaacaaccacaaagaaacaacaaaaagacaggaaagagaagaaagaaagaaagaagacaagagaaacaagaaacaacgccgacagcaaaagaaagaagaaagaacagagaagaagagaacacggacgacacacaacagagacaacaaaagg

SEQ ID NO: 304079 - DNA, 897 bp, Homo sapiens
  misc_feature (23)..(23): n is a, c, g, or t
  misc_feature (26)..(26): n is a, c, g, or t
  misc_feature (662)..(662): n is a, c, g, or t
  misc_feature (689)..(689): n is a, c, g, or t
aaacccatatggcaggacgaggncgnggtgaattggccgagggcggctcggactgagcaggactttccttatcccagttgattgtgcagaatacactgcctgtcgcttgtcttctattcaccatggcttcttctgatatccaggtgaaagaactggagaagcgtgcctcaggccaggcttttgagctgattctcagccctcggtcaaaagaatctgttccagaattccccctttcccctccaaagaagaaggatctttccctggaggaaattcagaagaaattagaagctgcagaagaaagacgcaagtcccatgaagctgaggtcttgaagcagctggctgagaaacgagagcacgagaaagaagtgcttcagaaggcaatagaagagaacaacaacttcagtaaaatggcagaagagaaactgacccacaaaatggaagctaataaagagaaccgagaggcacaaatggctgccaaactggaacgtttgcgagagaaggataagcacattgaagaagtgcggaagaacaaagaatccaaagaccctgctgacgagactgaagctgactaatttgttctgagaactgactttctccccatccccttcctaaatatccaaagactgtactggccagtgtcattttcacaaaatggaagctantaaagagaaccgagaggcacaaatggntgccaaactggaacgtttgcgagagaaggataagcacattgaagaagtgcggaagaacaaagaatccaaagaccctgctgacgagactgaagctgactaatttgttctgagaactgactttctccccatccccttcctaaatatccaaagactgtactgggcaagaggtcaaaaaaataaaaaacctacggacaaaactgtagaagcc

SEQ ID NO: 304080 - DNA, 1197 bp, Homo sapiens
tcgagctcgttacccgtcctacatagtgtatatccaggtgaaagaactggagaagcgtgcctcaggccaggcttttgagctgattctcagccctcggtcaaaagaatctgttccagaattccccctttcccctccaaagaagaaggatctttccctggaggaaattcagaagaaattagaagctgcagaagaaagacgcaagtcccatgaagctgaggtcttgaagcagctggctgagaaacgagagcacgagaaagaagtgcttcagaaggcaatagaagagaacaacaacttcagtaaaatggcagaagagaaactgacccacaaaatggaagctaataaagagaaccgagaggcacaaatggctgccaaactggaacgtttgcgagagaaggataagcacattgaagaagtgcggaagaacaaagaatccaaagaccctgctgacgagactgaagctgactaatttgttctgagaactgagtgttttactctttttctaaagtgttggtctttctaatgtagctatttttcttgttgcatcttttctacttcagtacacttggtgtactgggttaatggctagtactgtattggctctgtgaaaacatatttgtgaaaagagtatgtagtggcttcttttgaactgttagatgctgaatatctgttcacttttcaatcccaattctgtcccaatcttaccagatgctactggacttgaatggttaataaaactgcacagtgctgttggtggcagtgacttcttttgagttaggttaataaatcaagccatagagcccctcctggttgatacttgttccagatggggcctttggggctggtagaaatacccaacgcacaaatgaccgcacgttctctgccccgtttcttgccccagtgtggtttgcattgtctccttccacaatgactgctttgtttggatgcctcagcccaggtcagctgttactttctttcagatgtttatttgcaaacaaccattttttgttctgtgtcccttttaaaaggcagattaaaagcacaagcgtgtttctagagaacagttgagagagaatctcaagattctacttggtggtttgcttgctctacgttacaggtggggcatgtcctcatcctttcctgccataaaagctatgacacgagaatcagaatattaataaaactttatgtactgctgta

SEQ ID NO: 304081 - DNA, 855 bp, Homo sapiens
  misc_feature (23)..(23): n is a, c, g, or t
  misc_feature (26)..(26): n is a, c, g, or t
aaacccatatggcaggacgaggncgnggtgaattggccgagggcggctcggactgagcaggactttccttatcccagttgattgtgcagaatacactgcctgtcgcttgtcttctattcaccatggcttcttctgatatccaggtgaaagaactggagaagcgtgcctcaggccaggcttttgagctgattctcagccctcggtcaaaagaatctgttccagaattccccctttcccctccaaagaagaaggatctttccctggaggaaattcagaagaaattagaagctgcagaagaaagacgcaagtcccatgaagctgaggtcttgaagcagctggctgagaaacgagagcacgagaaagaagtgcttcagaaggcaatagaagagaacaacaacttcagtaaaatggcagaagagaaactgacccacaaaatggaagctaataaagagaaccgagaggcacaaatggctgccaaactggaacgtttgcgagagaaggataagcacattgaagaagtgcggaagaacaaagaatccaaagaccctgctgacgagactgaagctgactaatttgttctgagaactgagtgttttactctttttctaaagtgttggtctttctaatgtagctatttttcttgttgcatcttttctacttcagtacacttggtgtactgggttaatggctagtactgtattggctctgtgaaaacatatttgtgaaaagagtatgtagtggcttcttttgaactgttagatgctgaatatctgttcacttttcaatcccaattctgtcccaatcttaccagatgctactggacttgaatggttaataaaactgcacagtgctgtt

SEQ ID NO: 304082 - DNA, 966 bp, Homo sapiens
  misc_feature (23)..(23): n is a, c, g, or t
  misc_feature (26)..(26): n is a, c, g, or t
aaacccatatggcaggacgaggncgnggtgaattggccgagggcggctcggactgagcaggactttccttatcccagttgattgtgcagaatctgttccagaattccccctttcccctccaaagaagaaggatctttccctggaggaaattcagaagaaattagaagctgcagaagaaagacgcaagtcccatgaagctgaggtcttgaagcagctggctgagaaacgagagcacgagaaagaagtgcttcagtgttttactctttttctaaagtgttggtctttctaatgtagctatttttcttgttgcatcttttctacttcagtacacttggtgtactgggttaatggctagtactgtattggctctgtgaaaacatatttgtgaaaagagtatgtagtggcttcttttgaactgttagatgctgaatatctgttcacttttcaatcccaattctgtcccaatcttaccagatgctactggacttgaatggttaataaaactgcacagtgctgttggtggcagtgacttcttttgagttaggttaataaatcaagccatagagcccctcctggttgatacttgttccagatggggcctttggggctggtagaaatacccaacgcacaaatgaccgcacgttctctgccccgtttcttgccccagtgtggtttgcattgtctccttccacaatgactgctttgtttggatgcctcagcccaggtcagctgttactttctttcagatgtttatttgcaaacaaccattttttgttctgtgtcccttttaaaaggcagattaaaagcacaagcgtgtttctagagaacagttgagagagaatctcaagattctacttggtggtttgcttgctctacgttacaggtggggcatgtcctcatcctttcctgccataaaagctatgacacgagaatcagaatattaataaaactttatgtactgctgta

SEQ ID NO: 304083 - DNA, 589 bp, Homo sapiens
  misc_feature (23)..(23): n is a, c, g, or t
  misc_feature (26)..(26): n is a, c, g, or t
aaacccatatggcaggacgaggncgnggtgaattggccgagggcggctcggactgagcaggactttccttatcccagttgattgtgcagaatacactgcctgtcgcttgtcttctattcaccatggcttcttctgatatccaggtgaaagaactggagaagcgtgcctcaggccaggcttttgagctgattctcagccctcggtcaaaagaatctgttccagaattccccctttcccctccaaagaagaaggatctttccctggaggaaattcagaagaaattagaagctgcagaagaaagacgcaagtcccatgaagctgaggtcttgaagcagctggctgagaaacgagagcacgagaaagaagtgcttcagaaggcaatagaagagaacaacaacttcagtaaaatggcagaagagaaactgacccacaaaatggaagctaataaagagaaccgagaggcacaaatggctgccaaactggaacgtttgcgagagaaggttggtttcttactttgtaaaagggttgagcttggagtttgatgcaccaatgagttggcttgaactaagtgctttgataaaaggtgttt

SEQ ID NO: 304084 - DNA, 581 bp, Homo sapiens
  misc_feature (23)..(23): n is a, c, g, or t
  misc_feature (26)..(26): n is a, c, g, or t
  misc_feature (512)..(512): n is a, c, g, or t
aaacccatatggcaggacgaggncgnggtgaattggccgagggcggctcggactgagcaggactttccttatcccagttgattgtgcagaatacactgcctgtcgcttgtcttctattcaccatggcttcttctgatatccaggtgaaagaactggagaagcgtgcctcaggccaggcttttgagctgattctcagccctcggtcaaaagaatctgttccagaattccccctttcccctccaaagaagaaggatctttccctggaggaaattcagaagaaattagaagctgcagaagaaagacgcaagtcccatgaagctgaggtcttgaagcagctggctgagaaacgagagcacgagaaagaagtgcttcagaaggcaatagaagagaacaacaacttcagtaaaatggcagaagagaaactgacccacaaaatggaagctaataaagagaaccgagaggcacaaatggctgccaaactggaacgtttgcgagagaagataagcacattnaagaagtgcggaagaacagccctcggataaaccttggtggaccagcctgagtcatgtgcccacccctca

SEQ ID NO: 304085 - DNA, 798 bp, Homo sapiens
  misc_feature (23)..(23): n is a, c, g, or t
  misc_feature (26)..(26): n is a, c, g, or t
aaacccatatggcaggacgaggncgnggtgaattggccgagggcggctcggactgagcaggactttccttatcccagttgattgtgcagaatacactgcctgtcgcttgtcttctattcaccatggcttcttctgatatccaggtgaaagaactggagaagcgtgcctcaggccaggcttttgagctgattctcagccctcggtcaaaagaatctgttccagaattccccctttcccctccaaagaagaaggatctttccctggaggaaattcagaagaaattagaagctgcagaagaaagacgcaagtcccatgaagctgaggtcttgaagcagctggctgagaaacgagagcacgagaaagaagtgcttcagaaggcaatagaagagaacaacaacttcagtaaaatggcagaagagaaactgacccacaaaatggaaggataagcacattgaagaagtgcggaagaacaaagaatccaaagaccctgctgacgagactgaagctgactaatttgttctgagaactgactttctccccatccccttcctaaatatccaaagactgtactggccagtgtcattttattttttccctcctgacaaatattttagaagctaatgtaggactgtataggtagatccagatccagactgtaagatgttgttttaggggctaaaggggagaaactgaaacattttattttttccctccatgacaaatattttagaagctaatgtaggactgtataggtagatccagatccagactgtaagatgttgttttaggggctaaaaa

SEQ ID NO: 304086 - DNA, 4125 bp, Homo sapiens
cagcccggacgcaccgggagagcgagaggtggaggccgcggacattttggtgccaagccgaaccgagccggggcgccgggagctattgggacctgcggaagcctggctacagataagggaccaaaatgactgactcaaaatatttcaccacgaccaagaaaggggagatcttcgagctgaaggcagagctcaacagtgacaagaaggagaagaagaaggaggcagtgaagaaagtgattgcatcgatgaccgtgggcaaagatgtcagtgccctcttccccgatgtggtcaactgcatgcagacggacaacctggagctgaagaagctggtatacctctacttgatgaattacgccaagagtcagcctgacatggccattatggccgtcaacacctttgtgaaggactgtgaggaccccaaccccctcatccgagccctggcagtgcggaccatgggctgcatccgcgttgacaagatcacagagtacctgtgcgagccactccggaagtgcctgaaggacgaggatccatatgtgcgcaagacagcagctgtgtgcgtggccaagctccacgacatcaacgcccagctggtggaggaccagggcttcctggacacccttaaagacctcatctccgactctaaccccatggtggtggccaatgcagtggcagcgctctcagaaattgccgagtctcaccccagcagcaacctgctcgatctgaacccacagtccatcaacaagctgctgacagccctcaatgagtgcaccgagtggggccagatcttcatcctggactgcctcgccaactatatgcccaaggacgaccgcgaggcccagagcatctgtgagcgggtcacccccaggctctcccatgccaactccgctgtggtgctctctgctgtgaaggtgctgatgaagttcatggagatgttgtctaaggacttggactactacggcacactgctcaagaagctggccccacccctggtcacactgctgtcagccgagccagagctgcagtatgtggccctgcgcaacatcaatctcatcgtgcagaaaaggcctgagatcctgaagcatgagatgaaggtgttcttcgtgaagtacaacgaccctatctacgtgaagctggagaagctggacatcatgatccgcctggcctctcaggccaacatcgcccaggtgttggcagagctgaaagagtacgcaacagaagtggatgtggactttgtacggaaggctgtgcgtgctattggccgctgcgccatcaaggtggagcaatctgcggagcgctgtgtgagcacgctgctcgacctcatccagaccaaggtcaactatgtggtccaggaggccatcgtggtcatcaaggacatcttccgcaagtaccccaacaagtatgagagtgtgattgccacactgtgtgagaatctggactccctggatgagcctgaggcccgggctgccatgatctggattgtgggcgagtacgcggaacggatcgacaacgcagatgagctgctggagagcttcctcgagggcttccatgacgagagcacacaggtccagctgcagctgctgacagccattgtgaaactctttctaaagaagccaacagagacccaggagctggtgcagcaggtcctcagtttggccactcaggactcagataacccagacctgcgggaccgtggctacatctactggcgcctgctgtccacggacccggtggcagccaaggaggtggtgttggctgagaagccactcatctctgaagagacggacctcatcgagcccacactgttagacgagcttatctgctacatcggcacgctggcttccgtctaccataagcctcccagtgcctttgtggaggggggccggggcgtcgtgcacaagagcctgccacctcgcacggcctcgagtgagagcgcagagagccctgagacagcccctactggagcacctcctggggagcagccagatgtcatccccgcccagggcgacctgctgggtgacctcctcaacctggacctcggccccccagtgagcggcccacccctggccacctcctcggtgcagatgggagctgtggaccttcttggcggtggccttgacagcctgatgggggatgagcctgaagggattgggggcaccaacttcgtggcacctccaacagcagcagtaccagccaatcttggagcacccatcggcagtggcctgagtgacctctttgacctgaccagtggcgtgggcaccctgtcaggatcatatgtggcccccaaagcagtctggctcccagccatgaaggctaaggggctggagatctcaggcaccttcacccgccaggtgggctccatctccatggacctgcagctgaccaacaaggccttgcaggtcatgaccgactttgccatccagttcaaccgcaacagctttggcctggcccccgccgcccccctccaggtccacgcgccactcagccccaaccagacagtggagatctccctgcctctcagcacggtgggctcggtcatgaagatggagcctctgaacaacctccaggtggccgtgaagaacaacatcgatgtcttctacttcagcaccttgtacccactgcacatcctctttgtggaggacgggaagatggaccggcagatgttcctggccacatggaaggatattcccaatgagaatgaggcccagttccagatcagagactgccccctcaatgcagaggctgcgagcagcaagctgcagagcagcaacatcttcactgtcgccaagaggaacgtggagggccaggacatgctctaccagtccctgaagctgaccaacggcatctgggtgctggcggagctgcggatccagccgggcaaccccagctgcacggacttagagctgtccctgaagtgtcgagcaccagaggtgtcccagcacgtgtaccaggcctacgagaccatcctcaagaactgagaccccggccagcgcccaccccagccttctgcccgccccatcgaggaggcccctcgggggcagcacatcttcctcctcgcaggagggaccaggcggggctccaggccactcagtgggctccctggtcctgatggcagaacccacccgatccctggggtagggcaccaccccctcctggggtgagagcgcagtgcactcccgtgctctgggacacccctgctcctgtggctgtgatgtggggttaagtgaggtggggaccaaaggaaacagagccagagcagccacagaagctgtgcctgaagggtgagtgtggagcttgcccctccggctcacagccccggcagcccctggctccttggtctctccggttggtgttaaagggccctccactgccacctctcatgggatggaccctgccaacctggcctgggtgtgcagggaggggttccccttggtaccaggagagctgctcacttagggcctggggctcaaggagctgtaggtgccggcagaggggcagagctaggctgggaggagcccagggcctgcaccacccacttgcaaccaccaggctggtgccctgcagctgtgccagttgggccacagcctcccgagtgctgacccacatggtcaagaccaggcagaagctcccagagcccctgtctcgggctccccaccgactggcagctgcactatccccaactccccacttctgccccaagggtggtcactgcctgtgatacattcctcagtgtcgcctctgagcccaggcctcctgccacaaagactgggccgagagatggggctgggtaagcgggtgcgcctcctgtttgggtttcttcggggtttctctgtagtgtctgctgccctcctcctggcctcccaggtttcagttgtgtctgacagagcattaggttttcctgttactgctgtgtaataataaagaaagattcggcttttggcaatcacggacacttttttcccctccaccgaatgtcaggattgaaagctgcctccgagtggttggggatggttttctgaccctacggtaactagatctaatatatatcatcagaaaatatatattgtatgtttactcttattttcagaaagagaaaatgaataaaaatgatgacatcaaatgtgtccc

SEQ ID NO: 304087 - DNA, 4104 bp, Homo sapiens
cagcccggacgcaccgggagagcgagaggtggaggccgcggacattttggtgccaagccgaaccgagccggggcgccgggagctattgggacctgcggaagcctggctacagataagggaccaaaatgactgactcaaaatatttcaccacgaccaagaaaggggagatcttcgagctgaaggcagagctcaacagtgacaagaaggagaagaagaaggaggcagtgaagaaagtgattgcatcgatgaccgtgggcaaagatgtcagtgccctcttccccgatgtggtcaactgcatgcagacggacaacctggagctgaagaagctggtatacctctacttgatgaattacgccaagagtcagcctgacatggccattatggccgtcaacacctttgtgaaggactgtgaggaccccaaccccctcatccgagccctggcagtgcggaccatgggctgcatccgcgttgacaagatcacagagtacctgtgcgagccactccggaagtgcctgaaggacgaggatccatatgtgcgcaagacagcagctgtgtgcgtggccaagctccacgacatcaacgcccagctggtggaggaccagggcttcctggacacccttaaagacctcatctccgactctaaccccatggtggtggccaatgcagtggcagcgctctcagaaattgccgagtctcaccccagcagcaacctgctcgatctgaacccacagtccatcaacaagctgctgacagccctcaatgagtgcaccgagtggggccagatcttcatcctggactgcctcgccaactatatgcccaaggacgaccgcgaggcccagagcatctgtgagcgggtcacccccaggctctcccatgccaactccgctgtggtgctctctgctgtgaaggtgctgatgaagttcatggagatgttgtctaaggacttggactactacggcacactgctcaagaagctggccccacccctggtcacactgctgtcagccgagccagagctgcagtatgtggccctgcgcaacatcaatctcatcgtgcagaaaaggcctgagatcctgaagcatgagatgaaggtgttcttcgtgaagtacaacgaccctatctacgtgaagctggagaagctggacatcatgatccgcctggcctctcaggccaacatcgcccaggtgttggcagagctgaaagagtacgcaacagaagtggatgtggactttgtacggaaggctgtgcgtgctattggccgctgcgccatcaaggtggagcaatctgcggagcgctgtgtgagcacgctgctcgacctcatccagaccaaggtcaactatgtggtccaggaggccatcgtggtcatcaaggacatcttccgcaagtaccccaacaagtatgagagtgtgattgccacactgtgtgagaatctggactccctggatgagcctgaggcccgggctgccatgatctggattgtgggcgagtacgcggaacggatcgacaacgcagatgagctgctggagagcttcctcgagggcttccatgacgagagcacacaggtccagctgcagctgctgacagccattgtgaaactctttctaaagaagccaacagagacccaggagctggtgcagcaggtcctcagtttggccactcaggactcagataacccagacctgcgggaccgtggctacatctactggcgcctgctgtccacggacccggtggcagccaaggaggtggtgttggctgagaagccactcatctctgaagagacggacctcatcgagcccacactgttagacgagcttatctgctacatcggcacgctggcttccgtctaccataagcctcccagtgcctttgtggaggggggccggggcgtcgtgcacaagagcctgccacctcgcacggcctcgagtgagagcgcagagagccctgagacagcccctactggagcacctcctggggagcagccagatgtcatccccgcccagggcgacctgctgggtgacctcctcaacctggacctcggccccccagtgagcggcccacccctggccacctcctcggtgcagatgggagctgtggaccttcttggcggtggccttgacagcctgattgggggcaccaacttcgtggcacctccaacagcagcagtaccagccaatcttggagcacccatcggcagtggcctgagtgacctctttgacctgaccagtggcgtgggcaccctgtcaggatcatatgtggcccccaaagcagtctggctcccagccatgaaggctaaggggctggagatctcaggcaccttcacccgccaggtgggctccatctccatggacctgcagctgaccaacaaggccttgcaggtcatgaccgactttgccatccagttcaaccgcaacagctttggcctggcccccgccgcccccctccaggtccacgcgccactcagccccaaccagacagtggagatctccctgcctctcagcacggtgggctcggtcatgaagatggagcctctgaacaacctccaggtggccgtgaagaacaacatcgatgtcttctacttcagcaccttgtacccactgcacatcctctttgtggaggacgggaagatggaccggcagatgttcctggccacatggaaggatattcccaatgagaatgaggcccagttccagatcagagactgccccctcaatgcagaggctgcgagcagcaagctgcagagcagcaacatcttcactgtcgccaagaggaacgtggagggccaggacatgctctaccagtccctgaagctgaccaacggcatctgggtgctggcggagctgcggatccagccgggcaaccccagctgcacggacttagagctgtccctgaagtgtcgagcaccagaggtgtcccagcacgtgtaccaggcctacgagaccatcctcaagaactgagaccccggccagcgcccaccccagccttctgcccgccccatcgaggaggcccctcgggggcagcacatcttcctcctcgcaggagggaccaggcggggctccaggccactcagtgggctccctggtcctgatggcagaacccacccgatccctggggtagggcaccaccccctcctggggtgagagcgcagtgcactcccgtgctctgggacacccctgctcctgtggctgtgatgtggggttaagtgaggtggggaccaaaggaaacagagccagagcagccacagaagctgtgcctgaagggtgagtgtggagcttgcccctccggctcacagccccggcagcccctggctccttggtctctccggttggtgttaaagggccctccactgccacctctcatgggatggaccctgccaacctggcctgggtgtgcagggaggggttccccttggtaccaggagagctgctcacttagggcctggggctcaaggagctgtaggtgccggcagaggggcagagctaggctgggaggagcccagggcctgcaccacccacttgcaaccaccaggctggtgccctgcagctgtgccagttgggccacagcctcccgagtgctgacccacatggtcaagaccaggcagaagctcccagagcccctgtctcgggctccccaccgactggcagctgcactatccccaactccccacttctgccccaagggtggtcactgcctgtgatacattcctcagtgtcgcctctgagcccaggcctcctgccacaaagactgggccgagagatggggctgggtaagcgggtgcgcctcctgtttgggtttcttcggggtttctctgtagtgtctgctgccctcctcctggcctcccaggtttcagttgtgtctgacagagcattaggttttcctgttactgctgtgtaataataaagaaagattcggcttttggcaatcacggacacttttttcccctccaccgaatgtcaggattgaaagctgcctccgagtggttggggatggttttctgaccctacggtaactagatctaatatatatcatcagaaaatatatattgtatgtttactcttattttcagaaagagaaaatgaataaaaatgatgacatcaaatgtgtccc

SEQ ID NO: 304088 - DNA, 3919 bp, Homo sapiens
cagcccggacgcaccgggagagcgagaggtggaggccgcggacattttggtgccaagccgaaccgagccggggcgccgggagctattgggacctgcggaagcctggctacagataagggaccaaaatgactgactcaaaatatttcaccacgaccaagaaaggggagatcttcgagctgaaggcagagctcaacagtgacaagaaggagaagaagaaggaggcagtgaagaaagtgattgcatcgatgaccgtgggcaaagatgtcagtgccctcttccccgatgtggtcaactgcatgcagacggacaacctggagctgaagaagctggtatacctctacttgatgaattacgccaagagtcagcctgacatggccattatggccgtcaacacctttgtgaaggactgtgaggaccccaaccccctcatccgagccctggcagtgcggaccatgggctgcatccgcgttgacaagatcacagagtacctgtgcgagccactccggaagtgcctgaaggacgaggatccatatgtgcgcaagacagcagctgtgtgcgtggccaagctccacgacatcaacgcccagctggtggaggaccagggcttcctggacacccttaaagacctcatctccgactctaaccccatggtggtggccaatgcagtggcagcgctctcagaaattgccgagtctcaccccagcagcaacctgctcgatctgaacccacagtccatcaacaagctgctgacagccctcaatgagtgcaccgagtggggccagatcttcatcctggactgcctcgccaactatatgcccaaggacgaccgcgaggcccagagcatctgtgagcgggtcacccccaggctctcccatgccaactccgctgtggtgctctctgctgtgaaggtgctgatgaagttcatggagatgttgtctaaggacttggactactacggcacactgctcaagaagctggccccacccctggtcacactgctgtcagccgagccagagctgcagtatgtggccctgcgcaacatcaatctcatcgtgcagaaaaggcctgagatcctgaagcatgagatgaaggtgttcttcgtgaagtacaacgaccctatctacgtgaagctggagaagctggacatcatgatccgcctggcctctcaggccaacatcgcccaggtgttggcagagctgaaagagtacgcaacagaagtggatgtggactttgtacggaaggctgtgcgtgctattggccgctgcgccatcaaggtggagcaatctgcggagcgctgtgtgagcacgctgctcgacctcatccagaccaaggtcaactatgtggtccaggaggccatcgtggtcatcaaggacatcttccgcaagtaccccaacaagtatgagagtgtgattgccacactgtgtgagaatctggactccctggatgagcctgaggcccgggctgccatgatctggattgtgggcgagtacgcggaacggatcgacaacgcagatgagctgctggagagcttcctcgagggcttccatgacgagagcacacaggtccagctgcagctgctgacagccattgtgaaactctttctaaagaagccaacagagacccaggagctggtgcagcaggtcctcagtttggccactcaggactcagataacccagacctgcgggaccgtggctacatctactggcgcctgctgtccacggacccggtggcagccaaggaggtggtgttggctgagaagccactcatctctgaagagacggacctcatcgagcccacactgttagacgagcttatctgctacatcggcacgctggcttccgtctaccataagccccccagtgagcggcccacccctggccacctcctcggtgcagatgggagctgtggaccttcttggcggtggccttgacagcctgattgggggcaccaacttcgtggcacctccaacagcagcagtaccagccaatcttggagcacccatcggcagtggcctgagtgacctctttgacctgaccagtggcgtgggcaccctgtcaggatcatatgtggcccccaaagcagtctggctcccagccatgaaggctaaggggctggagatctcaggcaccttcacccgccaggtgggctccatctccatggacctgcagctgaccaacaaggccttgcaggtcatgaccgactttgccatccagttcaaccgcaacagctttggcctggcccccgccgcccccctccaggtccacgcgccactcagccccaaccagacagtggagatctccctgcctctcagcacggtgggctcggtcatgaagatggagcctctgaacaacctccaggtggccgtgaagaacaacatcgatgtcttctacttcagcaccttgtacccactgcacatcctctttgtggaggacgggaagatggaccggcagatgttcctggccacatggaaggatattcccaatgagaatgaggcccagttccagatcagagactgccccctcaatgcagaggctgcgagcagcaagctgcagagcagcaacatcttcactgtcgccaagaggaacgtggagggccaggacatgctctaccagtccctgaagctgaccaacggcatctgggtgctggcggagctgcggatccagccgggcaaccccagctgcacggacttagagctgtccctgaagtgtcgagcaccagaggtgtcccagcacgtgtaccaggcctacgagaccatcctcaagaactgagaccccggccagcgcccaccccagccttctgcccgccccatcgaggaggcccctcgggggcagcacatcttcctcctcgcaggagggaccaggcggggctccaggccactcagtgggctccctggtcctgatggcagaacccacccgatccctggggtagggcaccaccccctcctggggtgagagcgcagtgcactcccgtgctctgggacacccctgctcctgtggctgtgatgtggggttaagtgaggtggggaccaaaggaaacagagccagagcagccacagaagctgtgcctgaagggtgagtgtggagcttgcccctccggctcacagccccggcagcccctggctccttggtctctccggttggtgttaaagggccctccactgccacctctcatgggatggaccctgccaacctggcctgggtgtgcagggaggggttccccttggtaccaggagagctgctcacttagggcctggggctcaaggagctgtaggtgccggcagaggggcagagctaggctgggaggagcccagggcctgcaccacccacttgcaaccaccaggctggtgccctgcagctgtgccagttgggccacagcctcccgagtgctgacccacatggtcaagaccaggcagaagctcccagagcccctgtctcgggctccccaccgactggcagctgcactatccccaactccccacttctgccccaagggtggtcactgcctgtgatacattcctcagtgtcgcctctgagcccaggcctcctgccacaaagactgggccgagagatggggctgggtaagcgggtgcgcctcctgtttgggtttcttcggggtttctctgtagtgtctgctgccctcctcctggcctcccaggtttcagttgtgtctgacagagcattaggttttcctgttactgctgtgtaataataaagaaagattcggcttttggcaatcacggacacttttttcccctccaccgaatgtcaggattgaaagctgcctccgagtggttggggatggttttctgaccctacggtaactagatctaatatatatcatcagaaaatatatattgtatgtttactcttattttcagaaagagaaaatgaataaaaatgatgacatcaaatgtgtccc

SEQ ID NO: 304089 - DNA, 4256 bp, Homo sapiens
cagcccggacgcaccgggagagcgagaggtggaggccgcggacattttggtgccaagccgaaccgagccggggcgccgggagctattgggacctgcggaagcctggctacagataagggaccaaaatgactgactcaaaatatttcaccacgaccaagaaaggggagatcttcgagctgaaggcagagctcaacagtgacaagaaggagaagaagaaggaggcagtgaagaaagtgattgcatcgatgaccgtgggcaaagatgtcagtgccctcttccccgatgtggtcaactgcatgcagacggacaacctggagctgaagaagctggtatacctctacttgatgaattacgccaagagtcagcctgacatggccattatggccgtcaacacctttgtgaaggactgtgaggaccccaaccccctcatccgagccctggcagtgcggaccatgggctgcatccgcgttgacaagatcacagagtacctgtgcgagccactccggaagtgcctgaaggacgaggatccatatgtgcgcaagacagcagctgtgtgcgtggccaagctccacgacatcaacgcccagctggtggaggaccagggcttcctggacacccttaaagacctcatctccgactctaaccccatggtggtggccaatgcagtggcagcgctctcagaaattgccgagtctcaccccagcagcaacctgctcgatctgaacccacagtccatcaacaagctgctgacagccctcaatgagtgcaccgagtggggccagatcttcatcctggactgcctcgccaactatatgcccaaggacgaccgcgaggcccagagcatctgtgagcgggtcacccccaggctctcccatgccaactccgctgtggtgctctctgctgtgaaggtgctgatgaagttcatggagatgttgtctaaggacttggactactacggcacactgctcaagaagctggccccacccctggtcacactgctgtcagccgagccagagctgcagtatgtggccctgcgcaacatcaatctcatcgtgcagaaaaggcctgagatcctgaagcatgagatgaaggtgttcttcgtgaagtacaacgaccctatctacgtgaagctggagaagctggacatcatgatccgcctggcctctcaggccaacatcgcccaggcacctgccagctctctcccttgggccttctacctggagcaggaggcagaatcccattctcctagggagtctgtgtatattcactgcccaggagtgttccagcagattgccccatcaggtgccccagccccatcttttctgtttgggccacagtgttggcagagctgaaagagtacgcaacagaagtggatgtggactttgtacggaaggctgtgcgtgctattggccgctgcgccatcaaggtggagcaatctgcggagcgctgtgtgagcacgctgctcgacctcatccagaccaaggtcaactatgtggtccaggaggccatcgtggtcatcaaggacatcttccgcaagtaccccaacaagtatgagagtgtgattgccacactgtgtgagaatctggactccctggatgagcctgaggcccgggctgccatgatctggattgtgggcgagtacgcggaacggatcgacaacgcagatgagctgctggagagcttcctcgagggcttccatgacgagagcacacaggtccagctgcagctgctgacagccattgtgaaactctttctaaagaagccaacagagacccaggagctggtgcagcaggtcctcagtttggccactcaggactcagataacccagacctgcgggaccgtggctacatctactggcgcctgctgtccacggacccggtggcagccaaggaggtggtgttggctgagaagccactcatctctgaagagacggacctcatcgagcccacactgttagacgagcttatctgctacatcggcacgctggcttccgtctaccataagcctcccagtgcctttgtggaggggggccggggcgtcgtgcacaagagcctgccacctcgcacggcctcgagtgagagcgcagagagccctgagacagcccctactggagcacctcctggggagcagccagatgtcatccccgcccagggcgacctgctgggtgacctcctcaacctggacctcggccccccagtgagcggcccacccctggccacctcctcggtgcagatgggagctgtggaccttcttggcggtggccttgacagcctgattgggggcaccaacttcgtggcacctccaacagcagcagtaccagccaatcttggagcacccatcggcagtggcctgagtgacctctttgacctgaccagtggcgtgggcaccctgtcaggatcatatgtggcccccaaagcagtctggctcccagccatgaaggctaaggggctggagatctcaggcaccttcacccgccaggtgggctccatctccatggacctgcagctgaccaacaaggccttgcaggtcatgaccgactttgccatccagttcaaccgcaacagctttggcctggcccccgccgcccccctccaggtccacgcgccactcagccccaaccagacagtggagatctccctgcctctcagcacggtgggctcggtcatgaagatggagcctctgaacaacctccaggtggccgtgaagaacaacatcgatgtcttctacttcagcaccttgtacccactgcacatcctctttgtggaggacgggaagatggaccggcagatgttcctggccacatggaaggatattcccaatgagaatgaggcccagttccagatcagagactgccccctcaatgcagaggctgcgagcagcaagctgcagagcagcaacatcttcactgtcgccaagaggaacgtggagggccaggacatgctctaccagtccctgaagctgaccaacggcatctgggtgctggcggagctgcggatccagccgggcaaccccagctgcacggacttagagctgtccctgaagtgtcgagcaccagaggtgtcccagcacgtgtaccaggcctacgagaccatcctcaagaactgagaccccggccagcgcccaccccagccttctgcccgccccatcgaggaggcccctcgggggcagcacatcttcctcctcgcaggagggaccaggcggggctccaggccactcagtgggctccctggtcctgatggcagaacccacccgatccctggggtagggcaccaccccctcctggggtgagagcgcagtgcactcccgtgctctgggacacccctgctcctgtggctgtgatgtggggttaagtgaggtggggaccaaaggaaacagagccagagcagccacagaagctgtgcctgaagggtgagtgtggagcttgcccctccggctcacagccccggcagcccctggctccttggtctctccggttggtgttaaagggccctccactgccacctctcatgggatggaccctgccaacctggcctgggtgtgcagggaggggttccccttggtaccaggagagctgctcacttagggcctggggctcaaggagctgtaggtgccggcagaggggcagagctaggctgggaggagcccagggcctgcaccacccacttgcaaccaccaggctggtgccctgcagctgtgccagttgggccacagcctcccgagtgctgacccacatggtcaagaccaggcagaagctcccagagcccctgtctcgggctccccaccgactggcagctgcactatccccaactccccacttctgccccaagggtggtcactgcctgtgatacattcctcagtgtcgcctctgagcccaggcctcctgccacaaagactgggccgagagatggggctgggtaagcgggtgcgcctcctgtttgggtttcttcggggtttctctgtagtgtctgctgccctcctcctggcctcccaggtttcagttgtgtctgacagagcattaggttttcctgttactgctgtgtaataataaagaaagattcggcttttggcaatcacggacacttttttcccctccaccgaatgtcaggattgaaagctgcctccgagtggttggggatggttttctgaccctacggtaactagatctaatatatatcatcagaaaatatatattgtatgtttactcttattttcagaaagagaaaatgaataaaaatgatgacatcaaatgtgtccc

SEQ ID NO: 304090 - DNA, 3315 bp, Homo sapiens
gcaggtgatctagaggatcccatctcaggcaggacgaccgtgaggcccagagcatctgtgagcgggtcacccccaggctctcccatgccaactccgctgtggtgctctctgctgtgaaggtgctgatgaagttcatggagatgttgtctaaggacttggactactacggcacactgctcaagaagctggccccacccctggtcacactgctgtcagccgagccagagctgcagtatgtggccctgcgcaacatcaatctcatcgtgcagaaaaggcctgagatcctgaagcatgagatgaaggtgttcttcgtgaagtacaacgaccctatctacgtgaagctggagaagctggacatcatgatccgcctggcctctcaggccaacatcgcccaggtgttggcagagctgaaagagtacgcaacagaagtggatgtggactttgtacggaaggctgtgcgtgctattggccgctgcgccatcaaggtggagcaatctgcggagcgctgtgtgagcacgctgctcgacctcatccagaccaaggtcaactatgtggtccaggaggccatcgtggtcatcaaggacatcttccgcaagtaccccaacaagtatgagagtgtgattgccacactgtgtgagaatctggactccctggatgagcctgaggcccgggctgccatgatctggattgtgggcgagtacgcggaacggatcgacaacgcagatgagctgctggagagcttcctcgagggcttccatgacgagagcacacaggtccagctgcagctgctgacagccattgtgaaactctttctaaagaagccaacagagacccaggagctggtgcagcaggtcctcagtttggccactcaggactcagataacccagacctgcgggaccgtggctacatctactggcgcctgctgtccacggacccggtggcagccaaggaggtggtgttggctgagaagccactcatctctgaagagacggacctcatcgagcccacactgttagacgagcttatctgctacatcggcacgctggcttccgtctaccataagcctcccagtgcctttgtggaggggggccggggcgtcgtgcacaagagcctgccacctcgcacggcctcgagtgagagcgcagagagccctgagacagcccctactggagcacctcctggggagcagccagatgtcatccccgcccagggcgacctgctgggtgacctcctcaacctggacctcggccccccagtgagcggcccacccctggccacctcctcggtgcagatgggagctgtggaccttcttggcggtggccttgacagcctgattgggggcaccaacttcgtggcacctccaacagcagcagtaccagccaatcttggagcacccatcggcagtggcctgagtgacctctttgacctgaccagtggcgtgggcaccctgtcaggatcatatgtggcccccaaagcagtctggctcccagccatgaaggctaaggggctggagatctcaggcaccttcacccgccaggtgggctccatctccatggacctgcagctgaccaacaaggccttgcaggtcatgaccgactttgccatccagttcaaccgcaacagctttggcctggcccccgccgcccccctccaggtccacgcgccactcagccccaaccagacagtggagatctccctgcctctcagcacggtgggctcggtcatgaagatggagcctctgaacaacctccaggtggccgtgaagaacaacatcgatgtcttctacttcagcaccttgtacccactgcacatcctctttgtggaggacgggaagatggaccggcagatgttcctggccacatggaaggatattcccaatgagaatgaggcccagttccagatcagagactgccccctcaatgcagaggctgcgagcagcaagctgcagagcagcaacatcttcactgtcgccaagaggaacgtggagggccaggacatgctctaccagtccctgaagctgaccaacggcatctgggtgctggcggagctgcggatccagccgggcaaccccagctgcacggacttagagctgtccctgaagtgtcgagcaccagaggtgtcccagcacgtgtaccaggcctacgagaccatcctcaagaactgagaccccggccagcgcccaccccagccttctgcccgccccatcgaggaggcccctcgggggcagcacatcttcctcctcgcaggagggaccaggcggggctccaggccactcagtgggctccctggtcctgatggcagaacccacccgatccctggggtagggcaccaccccctcctggggtgagagcgcagtgcactcccgtgctctgggacacccctgctcctgtggctgtgatgtggggttaagtgaggtggggaccaaaggaaacagagccagagcagccacagaagctgtgcctgaagggtgagtgtggagcttgcccctccggctcacagccccggcagcccctggctccttggtctctccggttggtgttaaagggccctccactgccacctctcatgggatggaccctgccaacctggcctgggtgtgcagggaggggttccccttggtaccaggagagctgctcacttagggcctggggctcaaggagctgtaggtgccggcagaggggcagagctaggctgggaggagcccagggcctgcaccacccacttgcaaccaccaggctggtgccctgcagctgtgccagttgggccacagcctcccgagtgctgacccacatggtcaagaccaggcagaagctcccagagcccctgtctcgggctccccaccgactggcagctgcactatccccaactccccacttctgccccaagggtggtcactgcctgtgatacattcctcagtgtcgcctctgagcccaggcctcctgccacaaagactgggccgagagatggggctgggtaagcgggtgcgcctcctgtttgggtttcttcggggtttctctgtagtgtctgctgccctcctcctggcctcccaggtttcagttgtgtctgacagagcattaggttttcctgttactgctgtgtaataataaagaaagattcggcttttggcaatcacggacacttttttcccctccaccgaatgtcaggattgaaagctgcctccgagtggttggggatggttttctgaccctacggtaactagatctaatatatatcatcagaaaatatatattgtatgtttactcttattttcagaaagagaaaatgaataaaaatgatgacatcaaatgtgtccc

SEQ ID NO: 304091 - DNA, 2898 bp, Homo sapiens
  misc_feature (2885)..(2886): n is a, c, g, or t
cagcccggacgcaccgggagagcgagaggtggaggccgcggacattttggtgccaagccgaaccgagccggggcgccgggagctattgggacctgcggaagcctggctacagataagggaccaaaatgactgactcaaaatatttcaccacgaccaagaaaggggagatcttcgagctgaaggcagagctcaacagtgacaagaaggagaagaagaaggaggcagtgaagaaagtgattgcatcgatgaccgtgggcaaagatgtcagtgccctcttccccgatgtggtcaactgcatgcagacggacaacctggagctgaagaagctggtatacctctacttgatgaattacgccaagagtcagcctgacatggccattatggccgtcaacacctttgtgaaggactgtgaggaccccaaccccctcatccgagccctggcagtgcggaccatgggctgcatccgcgttgacaagatcacagagtacctgtgcgagccactccggaagtgcctgaaggacgaggatccatatgtgcgcaagacagcagctgtgtgcgtggccaagctccacgacatcaacgcccagctggtggaggaccagggcttcctggacacccttaaagacctcatctccgactctaaccccatggtggtggccaatgcagtggcagcgctctcagaaattgccgagtctcaccccagcagcaacctgctcgatctgaacccacagtccatcaacaagctgctgacagccctcaatgagtgcaccgagtggggccagatcttcatcctggactgcctcgccaactatatgcccaaggacgaccgcgaggcccagagcatctgtgagcgggtcacccccaggctctcccatgccaactccgctgtggtgctctctgctgtgaaggtgctgatgaagttcatggagatgttgtctaaggacttggactactacggcacactgctcaagaagctggccccacccctggtcacactgctgtcagccgagccagagctgcagtatgtggccctgcgcaacatcaatctcatcgtgcagaaaaggcctgagatcctgaagcatgagatgaaggtgttcttcgtgaagtacaacgaccctatctacgtgaagctggagaagctggacatcatgatccgcctggcctctcaggccaacatcgcccaggtgttggcagagctgaaagagtacgcaacagaagtggatgtggactttgtacggaaggctgtgcgtgctattggccgctgcgccatcaaggtggagcaatctgcggagcgctgtgtgagcacgctgctcgacctcatccagaccaaggtcaactatgtggtccaggaggccatcgtggtcatcaaggacatcttccgcaagtaccccaacaagtatgagagtgtgattgccacactgtgtgagaatctggactccctggatgagcctgaggcccgggctgccatgatctggattgtgggcgagtacgcggaacggatcgacaacgcagatgagctgctggagagcttcctcgagggcttccatgacgagagcacacaggtccagctgcagctgctgacagccattgtgaaactctttctaaagaagccaacagagacccaggagctggtgcagcaggtcctcagtttggccactcaggactcagataacccagacctgcgggaccgtggctacatctactggcgcctgctgtccacggacccggtggcagccaaggaggtggtgttggctgagaagccactcatctctgaagagacggacctcatcgagcccacactgttagacgagcttatctgctacatcggcacgctggcttccgtctaccataagcctcccagtgcctttgtggaggggggccggggcgtcgtgcacaagagcctgccacctcgcacggcctcgagtgagagcgcagagagccctgagacagcccctactggagcacctcctggggagcagccagatgtcatccccgcccagggcgacctgctgggtgacctcctcaacctggacctcggccccccagtgagcggcccacccctggccacctcctcggtgcagatgggagctgtggaccttcttggcggtggccttgacagcctgattgggggcaccaacttcgtggcacctccaacagcagcagtaccagccaatcttggagcacccatcggcagtggcctgagtgacctctttgacctgaccagtggcgtgggcaccctgtcaggatcatatgtggcccccaaagcagtctggctcccagccatgaaggctaaggggctggagatctcaggcaccttcacccgccaggtgggctccatctccatggacctgcagctgaccaacaaggccttgcaggtcatgaccgactttgccatccagttcaaccgcaacagctttggcctggcccccgccgcccccctccaggtccacgcgccactcagccccaaccagacagtggagatctccctgcctctcagcacggtgggctcggtcatgaagatggagcctctgaacaacctccaggtggccgtgaagaacaacatcgatgtcttctacttcagcaccttgtacccactgcacatcctctttgtggaggacgggaagatggaccggcagatgttcctggccacatggaaggatattcccaatgagaatgaggcccagttccagatcagagactgccccctcaatgcagaggctgcgagcagcaagctgcagagcagcaacatcttcactgtcgccaagaggaacgtggagggccaggacatgctctaccagtccctgaagctgaccaacggcatctgggtgctggcggagctgcggatccagccgggcaaccccagctgcacggacttagctggagtnngagcagatgtgg

SEQ ID NO: 304092 - DNA, 2537 bp, Homo sapiens
gtactgacagacattgtgtaattctctctaaatgaatactccatgctgagaccgaggatgctgttgcaacaagtcctcagcttagttcctctcagactcagataacccagacctgcgggaccgtggctacatctactggcgcctgctgtccacggacccggtggcagccaaggaggtggtgttggctgagaagccactcatctctgaagagacggacctcatcgagcccacactgttagacgagcttatctgctacatcggcacgctggcttccgtctaccataagcctcccagtgcctttgtggaggggggccggggcgtcgtgcacaagagcctgccacctcgcacggcctcgagtgagagcgcagagagccctgagacagcccctactggagcacctcctggggagcagccagatgtcatccccgcccagggcgacctgctgggtgacctcctcaacctggacctcggccccccagtgagcggcccacccctggccacctcctcggtgcagatgggagctgtggaccttcttggcggtggccttgacagcctgattgggggcaccaacttcgtggcacctccaacagcagcagtaccagccaatcttggagcacccatcggcagtggcctgagtgacctctttgacctgaccagtggcgtgggcaccctgtcaggatcatatgtggcccccaaagcagtctggctcccagccatgaaggctaaggggctggagatctcaggcaccttcacccgccaggtgggctccatctccatggacctgcagctgaccaacaaggccttgcaggtcatgaccgactttgccatccagttcaaccgcaacagctttggcctggcccccgccgcccccctccaggtccacgcgccactcagccccaaccagacagtggagatctccctgcctctcagcacggtgggctcggtcatgaagatggagcctctgaacaacctccaggtggccgtgaagaacaacatcgatgtcttctacttcagcaccttgtacccactgcacatcctctttgtggaggacgggaagatggaccggcagatgttcctggccacatggaaggatattcccaatgagaatgaggcccagttccagatcagagactgccccctcaatgcagaggctgcgagcagcaagctgcagagcagcaacatcttcactgtcgccaagaggaacgtggagggccaggacatgctctaccagtccctgaagctgaccaacggcatctgggtgctggcggagctgcggatccagccgggcaaccccagctgcacggacttagagctgtccctgaagtgtcgagcaccagaggtgtcccagcacgtgtaccaggcctacgagaccatcctcaagaactgagaccccggccagcgcccaccccagccttctgcccgccccatcgaggaggcccctcgggggcagcacatcttcctcctcgcaggagggaccaggcggggctccaggccactcagtgggctccctggtcctgatggcagaacccacccgatccctggggtagggcaccaccccctcctggggtgagagcgcagtgcactcccgtgctctgggacacccctgctcctgtggctgtgatgtggggttaagtgaggtggggaccaaaggaaacagagccagagcagccacagaagctgtgcctgaagggtgagtgtggagcttgcccctccggctcacagccccggcagcccctggctccttggtctctccggttggtgttaaagggccctccactgccacctctcatgggatggaccctgccaacctggcctgggtgtgcagggaggggttccccttggtaccaggagagctgctcacttagggcctggggctcaaggagctgtaggtgccggcagaggggcagagctaggctgggaggagcccagggcctgcaccacccacttgcaaccaccaggctggtgccctgcagctgtgccagttgggccacagcctcccgagtgctgacccacatggtcaagaccaggcagaagctcccagagcccctgtctcgggctccccaccgactggcagctgcactatccccaactccccacttctgccccaagggtggtcactgcctgtgatacattcctcagtgtcgcctctgagcccaggcctcctgccacaaagactgggccgagagatggggctgggtaagcgggtgcgcctcctgtttgggtttcttcggggtttctctgtagtgtctgctgccctcctcctggcctcccaggtttcagttgtgtctgacagagcattaggttttcctgttactgctgtgtaataataaagaaagattcggcttttggcaatcacggacacttttttcccctccaccgaatgtcaggattgaaagctgcctccgagtggttggggatggttttctgaccctacggtaactagatctaatatatatcatcagaaaatatatattgtatgtttactcttattttcagaaagagaaaatgaataaaaatgatgacatcaaatgtgtccc

SEQ ID NO: 304093 - DNA, 2219 bp, Homo sapiens
acaaagaagcctgtacaaaaggccttgatgtatcttttcacccacccttgtgactgtgccataccctttctcccgctcttcctcggtgagaaggggtaagtggttattttgtgccctcgcccaatttggccgaaaccccgctgcgcagctcagccccccagtgagcggcccacccctggccacctcctcggtgcagatgggagctgtggaccttcttggcggtggccttgacagcctgattgggggcaccaacttcgtggcacctccaacagcagcagtaccagccaatcttggagcacccatcggcagtggcctgagtgacctctttgacctgaccagtggcgtgggcaccctgtcaggatcatatgtggcccccaaagcagtctggctcccagccatgaaggctaaggggctggagatctcaggcaccttcacccgccaggtgggctccatctccatggacctgcagctgaccaacaaggccttgcaggtcatgaccgactttgccatccagttcaaccgcaacagctttggcctggcccccgccgcccccctccaggtccacgcgccactcagccccaaccagacagtggagatctccctgcctctcagcacggtgggctcggtcatgaagatggagcctctgaacaacctccaggtggccgtgaagaacaacatcgatgtcttctacttcagcaccttgtacccactgcacatcctctttgtggaggacgggaagatggaccggcagatgttcctggccacatggaaggatattcccaatgagaatgaggcccagttccagatcagagactgccccctcaatgcagaggctgcgagcagcaagctgcagagcagcaacatcttcactgtcgccaagaggaacgtggagggccaggacatgctctaccagtccctgaagctgaccaacggcatctgggtgctggcggagctgcggatccagccgggcaaccccagctgcacggacttagagctgtccctgaagtgtcgagcaccagaggtgtcccagcacgtgtaccaggcctacgagaccatcctcaagaactgagaccccggccagcgcccaccccagccttctgcccgccccatcgaggaggcccctcgggggcagcacatcttcctcctcgcaggagggaccaggcggggctccaggccactcagtgggctccctggtcctgatggcagaacccacccgatccctggggtagggcaccaccccctcctggggtgagagcgcagtgcactcccgtgctctgggacacccctgctcctgtggctgtgatgtggggttaagtgaggtggggaccaaaggaaacagagccagagcagccacagaagctgtgcctgaagggtgagtgtggagcttgcccctccggctcacagccccggcagcccctggctccttggtctctccggttggtgttaaagggccctccactgccacctctcatgggatggaccctgccaacctggcctgggtgtgcagggaggggttccccttggtaccaggagagctgctcacttagggcctggggctcaaggagctgtaggtgccggcagaggggcagagctaggctgggaggagcccagggcctgcaccacccacttgcaaccaccaggctggtgccctgcagctgtgccagttgggccacagcctcccgagtgctgacccacatggtcaagaccaggcagaagctcccagagcccctgtctcgggctccccaccgactggcagctgcactatccccaactccccacttctgccccaagggtggtcactgcctgtgatacattcctcagtgtcgcctctgagcccaggcctcctgccacaaagactgggccgagagatggggctgggtaagcgggtgcgcctcctgtttgggtttcttcggggtttctctgtagtgtctgctgccctcctcctggcctcccaggtttcagttgtgtctgacagagcattaggttttcctgttactgctgtgtaataataaagaaagattcggcttttggcaatcacggacacttttttcccctccaccgaatgtcaggattgaaagctgcctccgagtggttggggatggttttctgaccctacggtaactagatctaatatatatcatcagaaaatatatattgtatgtttactcttattttcagaaagagaaaatgaataaaaatgatgacatcaaatgtgtccc

SEQ ID NO: 304094 - DNA, 853 bp, Homo sapiens
cagcccggacgcaccgggagagcgagaggtggaggccgcggacattttggtgccaagccgaaccgagccggggcgccgggagctattgggacctgcggaagcctggctacagataagggaccaaaatgactgactcaaaatatttcaccacgaccaagaaaggggagatcttcgagctgaaggcagagctcaacagtgacaagaaggagaagaagaaggaggcagtgaagaaagtgattgcatcgatgaccgtgggcaaagatgtcagtgccctcttccccgatgtggtcaactgcatgcagacggacaacctggagctgaagaagctggtatacctctacttgatgaattacgccaagagtcagcctgacatggccattatggccgtcaacacctttgtgaaggactgtgaggaccccaaccccctcatccgagccctggcagtgcggaccatgggctgcatccgcgttgacaagatcacagagtacctgtgcgagccactccggaagtgcctgaaggacgaggatccatatgtgcgcaagacagcagctgtgtgcgtggccaagctccacgacatcaacgcccagctggtggaggaccagggcttcctggacacccttaaagacctcatctccgactctaaccccatgaacacagcctttgggctgctggggatggggcccgagggtcagcccctgggcagaagggtggccagtgggcccagccctggggaggggatatccccccagtctgctcaggcccctcaagctcctggagacaaccacgtggtgcctgtactgcgctaactcctgattaatacaatggaagtttctgggcatttaaaaaaaaaaaa

SEQ ID NO: 304095 - DNA, 236 bp, Homo sapiens
ctgccctccgtctcccttccggcgacgtgctcaggcacacaggagcagtcacagccttgctcaggccggttgctgggccctctacccaggagcttgcagccatggcagtgactctgccttcacagacatcaggctccacctcagaccccagaaatgtcccagcaaatgtggagggcattttctcacagggcttaagccttgttttttgctctccgggcatcctgccccaccaccag

SEQ ID NO: 304096 - DNA, 254 bp, Homo sapiens
cactcatcctcacggaggacctgaaagatggacctgctgtgggaatgggaatggggaagaagtggggccgtgtggacagccctgtcggggacagtgaggagactcagtgcctgtcctgggggacagctctgcctggaggctggggtctctttgaccttcctgagacatcctgatgcctccaccctacttctgtgtcccggcaggagtgagagcgcagagagccctgagacagcccctactggagcacctcctgg

SEQ ID NO: 304097 - DNA, 437 bp, Homo sapiens
agcggctttttacgtcggccttcgcgagcgtctgggcgggtggtaggaacaatggcgctgtcttaagtggcacagtggagcagctctgaagatgcaaagatacacgaaaaaacttccagaacatctgggagaatatttaatggaaaatcgcttggttaaaacctgacacttttaacagtgaacagcgttctgagtgtggacgagtagccagtgaagataatgaatgtcgaatgtgactgactagcagcttcattttgaatgagggtcgctgtctgcccattgatagaggccagattgtcttggaagttccaaagttgcaacgatttctggctagtgccacgaggtttacttgactgttgtgtgaaaagctgataagaaaaccatccagaaaaaagctcttcgttttacaaacatgaaaataaaacatgtaattttgg

SEQ ID NO: 304098 - DNA, 482 bp, Homo sapiens
  misc_feature (25)..(25): n is a, c, g, or t
  misc_feature (50)..(50): n is a, c, g, or t
ggcccgctcctagaacctagtgganccccccgggctgcaggaattcggcncgaggggcgggtggtaggaacaatggcgctgtcttaagtggcacagtggagcagctctgaagatgcaaagatacacgaaaaaacttccagaacatctgggagaatatttaatggaaaatcgcttggttaaaacctgacacttttaacagtgaacagcgttctgagtgtggacgagtagccagtgaagataatgaatgtcgaatgtgactgactagcagcttcattttgaatgagggtcgctgtctgcccattgatagaggccagattgtcttggaagttccaaagttgcaacgatttctggctagtgccacgaggtttacttgactgttgtgtgaaaagctgataagaaaaccatccagaaaaaagctcgtcaagctcgtcataccgaagctcgtcataccgaagctcgtcataccgaagctcgtcataccg

SEQ ID NO: 304099 - DNA, 186 bp, Homo sapiens
  misc_feature (21)..(21): n is a, c, g, or t
cacttggggatgaaggctgcngctcggccattgaaaagccagcattgtcttggagttccaaagttgcaacgatttctggctagtgccacgaggtttacttgactgttgtgtgaaaagctgataagaaaaccatccagaaaaaagctcttcgttttacaaacatgaaaataaaacatgtaattttgg

SEQ ID NO: 304100 - DNA, 942 bp, Homo sapiens
agcggctttttacgtcggccttcgcgagcgtctgggcgggtggtaggtgagtgggtattgcgggctagtatccgagcaaaagatggtggcgcaggccgagttaagagctttaatcctgtgaagacatcttagtgaagagtttagagtgctgagagttgaaagcttgcacgtgggaaacgtgcggccggactgccacatgtactgaggttgagtcgtgacggccacaggctccgaattttggcgtgaggaaccgctgatcggccacgggcgccgaacttgctggcctccggcatgtgcctgagcggcggcggaaaaaccaccttaattggggcggagggttagttttaagagcaaagggcctttactaaaatggcgaaggccttccgtcggcgttgttttaaaatgggaagcctcgaccctgtattgaaactgagctgttcgaaggcggcgttgtgtgcaattcggattaatgaaggggaagggttttgtgtggaaaaacgccttggagtgtgacatttctgcgagaatgcttaaataccgatttcccgcaggaacaatggcgctgtcttaagtggcacagtggagcagctctgaagatgcaaagatacacgaaaaaacttccagaacatctgggagaatatttaatggaaaatcgcttggttaaaacctgacacttttaacagtgaacagcgttctgagtgtggacgagtagccagtgaagataatgaatgtcgaatgtgactgactagcagcttcattttgaatgagggtcgctgtctgcccattgatagaggccagattgtcttggaagttccaaagttgcaacgatttctggctagtgccacgaggtttacttgactgttgtgtgaaaagctgataagaaaaccatccagaaaaaagctcttcgttttacaaacatgaaaataaaacatgtaattttgg

SEQ ID NO: 304101 - DNA, 1590 bp, Homo sapiens
agcggctttttacgtcggccttcgcgagcgtctgggcgggtggtaggtgagtgggtattgcgggctagtatccgagcaaaagatggtggcgcaggccgagttaagagctttaatcctgtgaagacatcttagtgaagagtttagagtgctgagagttgaaagcttgcacgtgggaaacgtgcggccggactgccacatgtactgaggttgagtcgtgacggccacaggctccgaattttggcgtgaggaaccgctgatcggccacgggcgccgaacttgctggcctccggcatgtgcctgagcggcggcggaaaaaccaccttaattggggcggagggttagttttaagagcaaagggcctttactaaaatggcgaaggccttccgtcggcgttgttttaaaatgggaagcctcgaccctgtattgaaactgagctgttcgaaggcggcgttgtgtgcaattcggattaatgaaggggaagggttttgtgtggaaaaacgccttggagtgtgacatttctgcgagaatgcttaaataccgatttcccgcaggaacaatggcgctgtcttaagtggcacagtggagcagctctgaagatgcaaagatacacgaaaaaacttccagaacatctgggagaatatttaatggaaaatcgcttggttaaaacctgacacttttaacagtgaacagcgttctgagtgtggacgagtagccagtgaagataatgaatgtcgaatgtgactgactagcagcttcattttgaatgagggtcgctgtctgcccattgatagaggccagattgtcttggaagttccaaagttgcaacgatttctggctagtgccacgaggtttacttgactgttgtgtgaaaagctgataagaaaaccatccagaaaaaagctcttcgttttacaaacatgaaaataaaacatgtaattttggaaaaaaaaaaaaaaaaaaaaaaaaaagaaaaaaaaaaaaaaaacgcggggagctatttgtggggggggggaaaaaaagagggttaagaacaacgggagagaggcagcggaaaacaaagtaggagcgcaagcgcaacacgactatgtggtgacaagcagagggagaagacaaagccgacagccacccccaaacgggaggaggaagacaaaccaacatccccaagaacagacccagcgacaccgccttcatgcgaccggccccacacaccgaacaccgaagcacgcaggacgcagaaggccacagccgagaacggatgcagacccagagtacaacagcacaaggaggaagcgacaggaaggcaacgcagcagaacaaaaaagtcacacggaacacgagagaaaaagagtagaaaaacatcaaatcagacgaagagcgaagaagcagaaagcacagagcgagacaaagcgaaaagaaaggaagaagaaagaaggaggaagcaaagaaggaccacacagcagcgaccacaacacatgaatcgcgagacccaaagcatgaaacgcgacctgagaccaaacgagaaggagaaaaagcaagaccacaaaagacaacaacagcgcaccaagccgaagcaacagacggaaaacgtaa

SEQ ID NO: 304102 - DNA, 1313 bp, Homo sapiens
  misc_feature (1253)..(1253): n is a, c, g, or t
agcggctttttacgtcggccttcgcgagcgtctgggcgggtggtaggtgagtgggtattgcgggctagtatccgagcaaaagatggtggcgcaggccgagttaagagctttaatcctgtgaagacatcttagtgaagagtttagagtgctgagagttgaaagcttgcacgtgggaaacgtgcggccggactgccacatgtactgaggttgagtcgtgacggccacaggctccgaattttggcgtgaggaaccgctgatcggccacgggcgccgaacttgctggcctccggcatgtgcctgagcggcggcggaaaaaccaccttaattggggcggagggttagttttaagagcaaagggcctttactaaaatggcgaaggccttccgtcggcgttgttttaaaatgggaagcctcgaccctgtattgaaactgagctgttcgaaggcggcgttgtgtgcaattcggattaatgaaggggaagggttttgtgtggaaaaacgccttggagtgtgacatttctgcgagaatgcttaaataccgatttcccgcaggaacaatggcgctgtcttaagtggcacagtggagcagctctgaagatgcaaagatacacgaaaaaacttccagaacatctgggagaatatttaatggaaaatcgcttggttaaaacctgacacttttaacagtgaacagcgttctgagtgtggacgagtagccagtgaagataatgaatgtcgaatgtgactgactagcagcttcattttgaatgagggtcgctgtctgcccattgatagaggccagattgtcttggaagttccaaagttgcaacgatttctggctagtgccacgaggtttacttgactgttgtgtgaaaagctgataagaaaaccatccagaaaaaagctcttcgttttacaaacatgaaaataaaacatgtaattttggaaaaaaaaaaaaaaaaaaaaaaaaaaaaaaaaaaaggaaaaaaaaaaaaaaaataaaaaaaaaaaaaatatatataaaaaaataaataaataaaaaataaaaaataaaataatatataaattaaataattattaaataataaaataaataaaaaaaatttttgggtcctttagtgcaattctttttaaatctggagattttattgcttggccccctattttcggtcatcttgtgccaattttccctaaatgggggctgtttataaaacaaacggcccgggtttataaaaaaggtgtttgtgggcaccggtngggtccccaaattataagcgctttgtgaaacaaattccctttttcccgaagttggggtct

SEQ ID NO: 304103 - DNA, 1025 bp, Homo sapiens
agcggctttttacgtcggccttcgcgagcgtctgggcgggtggtaggtgagtgggtattgcgggctagtatccgagcaaaagatggtggcgcaggccgagttaagagctttaatcctgtgaagacatcttagtgaagagtttagagtgctgagagttgaaagcttgcacgtgggaaacgtgcggccggactgccacatgtactgaggttgagtcgtgacggccacaggctccgaattttggcgtgaggaaccgctgatcggccacgggcgccgaacttgctggcctccggcatgtgcctgagcggcggcggaaaaaccaccttaattggggcggagggttagttttaagagcaaagggcctttactaaaatggcgaaggccttccgtcggcgttgttttaaaatgggaagcctcgaccctgtattgaaactgagctgttcgaaggcggcgttgtgtgcaattcggattaatgaaggggaagggttttgtgtggaaaaacgccttggagtgtgacatttctgcgagaatgcttaaataccgatttcccgcaggaacaatggcgctgtcttaagtggcacagtggagcagctctgaagatgcaaagatacacgaaaaaacttccagaacatctgggagaatatttaatggaaaatcgcttggttaaaacctgacacttttaacagtgaacagcgttctgagtgtggacgagtagccagtgaagataatgaatgtcgaatgtgactgactagcagcttcattttgaatgagggtcgctgtctgcccattgatagaggccagattgtcttggaagttccaaagttgcaacgatttctggctagtgccacgaggtttacttgactgttgtgtgaaaagctgataagaaaaccatccagaaaaaagctcttcgttttacaaacatgaaaataaaacatgtaattttggattatgttcctttttgttattacttttaaataggtcctgaaataacatggggagcattaaatggaaaatccactaaaaaaaaa

SEQ ID NO: 304104 - DNA, 1142 bp, Homo sapiens
agcggctttttacgtcggccttcgcgagcgtctgggcgggtggtaggtgagtgggtattgcgggctagtatccgagcaaaagatggtggcgcaggccgagttaagagctttaatcctgtgaagacatcttagtgaagagtttagagtgctgagagttgaaagcttgcacgtgggaaacgtgcggccggactgccacatgtactgaggttgagtcgtgacggccacaggctccgaattttggcgtgaggaaccgctgatcggccacgggcgccgaacttgctggcctccggcatgtgcctgagcggcggcggaaaaaccaccttaattggggcggagggttagttttaagagcaaagggcctttactaaaatggcgaaggccttccgtcggcgttgttttaaaatgggaagcctcgaccctgtattgaaactgagctgttcgaaggcggcgttgtgtgcaattcggattaatgaaggggaagggttttgtgtggaaaaacgccttggagtgtgacatttctgcgagaatgcttaaataccgatttcccgcaggaacaatggcgctgtcttaagtggcacagtggagcagctctgaagatgcaaagatacacgaaaaaacttccagaacatctgggagaatatttaatggaaaatcgcttggttaaaacctgacacttttaacagtgaacagcgttctgagtgtggacgagtagccagtgaagataatgaatgtcgaatgtgactgactagcagcttcattttgaatgagggtcgctgtctgcccattgatagaggccagattgtcttggaagttccaaagttgcaacgatttctggctagtgccacgaggtttacttgactgttgtgtgaaaagctgataagaaaaccatccagaaaaaagctcttcgttttacaaacatgaaaataaaacatgtaattttggaagaaaaaaaaaaaaaaaacgcggggagctatttgtggggggggggaaagggggtactggaatggggcacagggtcatacgctggtgttccgtggacccagttttctgggtacaacggggtcacgatctggcgcgggtctccctaataggggaggcggaattaattcggataagccaggttaacctggggtaatgaaccg

SEQ ID NO: 304105 - DNA, 428 bp, Homo sapiens
aattgccgtagaccgcgagcgtctgggcgggtggtaggaacaatggcgctgtcttaagtggcacagtggagcagctctgaagatgcaaagatacacgaaaaaacttccagaacatctgggagaatatttaatggaaaatcgcttggttaaaacctgacacttttaacagtgaacagcgttctgagtgtggacgagtagccagtgaagataatgaatgtcgaatgtgactgactagcagcttcattttgaatgagggtcgctgtctgcccattgatagaggccagattgtcttggaagttccaaagttgcaacgatttctggctagtgccacgaggtttacttgactgttgtgtgaaaagctgataagaaaaccatccagaaaaaagctcttcgttttacaaacatgaaaataaaacatgtaattttgg

SEQ ID NO: 304106 - DNA, 728 bp, Homo sapiens
agcggctttttacgtcggccttcgcgagcgtctgggcgggtggtaggtgagtgggtattgcgggctagtatccgagcaaaagatggtggcgcaggccgagttaagagctttaatcctgtgaagacatcttagtgaagagtttagagtgctgagagttgaaagcttgcacgtgggaaacgtgcggccggactgccacatgtactgaggttgagtcgtgacggccacaggctccgaattttggcgtgaggaaccgctgatcggccacgggcgccgaacttgctggcctccggcatgtgcctgagcggcggcggaaaaaccaccttaattggggcggagggaacaatggcgctgtcttaagtggcacagtggagcagctctgaagatgcaaagatacacgaaaaaacttccagaacatctgggagaatatttaatggaaaatcgcttggttaaaacctgacacttttaacagtgaacagcgttctgagtgtggacgagtagccagtgaagataatgaatgtcgaatgtgactgactagcagcttcattttgaatgagggtcgctgtctgcccattgatagaggccagattgtcttggaagttccaaagttgcaacgatttctggctagtgccacgaggtttacttgactgttgtgtgaaaagctgataagaaaaccatccagaaaaaagctcttcgttttacaaacatgaaaataaaacatgtaattttgg

SEQ ID NO: 304107 - DNA, 458 bp, Homo sapiens
  misc_feature (25)..(25): n is a, c, g, or t
  misc_feature (50)..(50): n is a, c, g, or t
ggcccgctcctagaacctagtgganccccccgggctgcaggaattcggcncgaggggcgggtggtaggaacaatggcgctgtcttaagtggcacagtggagcagctctgaagatgcaaagatacacgaaaaaacttccagaacatctgggagaatatttaatggaaaatcgcttggttaaaacctgacacttttaacagtgaacagcgttctgagtgtggacgagtagccagtgaagataatgaatgtcgaatgtgactgactagcagcttcattttgaatgagggtcgctgtctgcccattgatagaggccagattgtcttggaagttccaaagttgcaacgatttctggctagtgccacgaggtttacttgactgttgtgtgaaaagctgataagaaaaccatccagaaaaaagctcttcgttttacaaacatgaaaataaaacatgtaattttgg

SEQ ID NO: 304108 - DNA, 1106 bp, Homo sapiens
agcggctttttacgtcggccttcgcgagcgtctgggcgggtggtaggaacaatggcgctgtcttaagtggcacagtggagcagctctgaagatgcaaagatacacgaaaaaacttccagaacatctgggagaatatttaatggaaaatcgcttggttaaaacctgacacttttaacagtgaacagcgttctgagtgtggacgagtagccagtgaagataatgaatgtcgaatgtgactgactagcagcttcattttgaatgagggtcgctgtctgcccattgatagaggccagattgtcttggaagttccaaagttgcaacgatttctggctagtgccacgaggtttacttgactgttgtgtgaaaagctgataagaaaaccatccagaaaaaagctcttcgttttacaaacatgaaaataaaacatgtaattttggaaaaaaaaaaaaaaaaaaaaaaaaaaaaaaaaaaaaaaaaaaaaaaagaaaaaaaaaaaaaaaacgcggggagctatttgtggggggggggaaaaaaagagggttaagaacaacgggagagaggcagcggaaaacaaagtaggagcgcaagcgcaacacgactatgtggtgacaagcagagggagaagacaaagccgacagccacccccaaacgggaggaggaagacaaaccaacatccccaagaacagacccagcgacaccgccttcatgcgaccggccccacacaccgaacaccgaagcacgcaggacgcagaaggccacagccgagaacggatgcagacccagagtacaacagcacaaggaggaagcgacaggaaggcaacgcagcagaacaaaaaagtcacacggaacacgagagaaaaagagtagaaaaacatcaaatcagacgaagagcgaagaagcagaaagcacagagcgagacaaagcgaaaagaaaggaagaagaaagaaggaggaagcaaagaaggaccacacagcagcgaccacaacacatgaatcgcgagacccaaagcatgaaacgcgacctgagaccaaacgagaaggagaaaaagcaagaccacaaaagacaacaacagcgcaccaagccgaagcaacagacggaaaacgtaa

SEQ ID NO: 304109 - DNA, 1257 bp, Homo sapiens
agcggctttttacgtcggccttcgcgagcgtctgggcgggtggtaggtgagtgggtattgcgggctagtatccgagcaaaagatggtggcgcaggccgagttaagagctttaatcctgtgaagacatcttagtgaagagtttagagtgctgagagttgaaagcttgcacgtgggaaacgtgcggccggactgccacatgtactgaggttgagtcgtgacggccacaggctccgaattttggcgtgaggaaccgctgatcggccacgggcgccgaacttgctggcctccggcatgtgcctgagcggcggcggaaaaaccaccttaattggggcggagggttagttttaagagcaaagggcctttactaaaatggcgaaggccttccgtcggcgttgttttaaaatgggaagcctcgaccctgtattgaaactgagctgttcgaaggcggcgttgtgtgcaattcggattaatgaaggggaagggttttgtgtggaaaaacgccttggagtgtgacatttctgcgagaatgcttaaataccgatttcccgcaggaacaatggcgctgtcttaagtggcacagtggagcagctctgaagatgcaaagatacacgaaaaaacttccagaacatctgggagaatatttaatggaaaatcgcttggttaaaacctgacacttttaacagtgaacagcgttctgagtgtggacgagtagccagtgaagataatgaatgtcgaatgtgactgactagcagcttcattttgaatgagggtcgctgtctgcccattgatagaggccagattgtcttggaagttccaaagttgcaacgatttctgtaagtggagtttttctgtttgcttagagatcagtgaatattgtgtccttggtcttatctgtgatgatcttatcccgaacctgaacttctgttgaaaaaaaaaaacttttacggatctggcttctgagatggaccgttataaggacaatatttttttttaatacttttaatgcttttacatatgttgtaatgtttgtagtcttgtaagaatctcgtgtttttccttttctagggctagtgccacgaggtttacttgactgttgtgtgaaaagctgataagaaaaccatccagaaaaaagctcttcgttttacaaacatgaaaataaaacatgtaattttggattatgttcctttttgttattacttttaaataggtcctgaaataacatggggagcattaaatggaaaatccactaaaaaaaaa

SEQ ID NO: 304110 - DNA, 1045 bp, Homo sapiens
agcggctttttacgtcggccttcgcgagcgtctgggcgggtggtaggtgagtgggtattgcgggctagtatccgagcaaaagatggtggcgcaggccgagttaagagctttaatcctgtgaagacatcttagtgaagagtttagagtgctgagagttgaaagcttgcacgtgggaaacgtgcggccggactgccacatgtactgaggttgagtcgtgacggccacaggctccgaattttggcgtgaggaaccgctgatcggccacgggcgccgaacttgctggcctccggcatgtgcctgagcggcggcggaaaaaccaccttaattggggcggagggttagttttaagagcaaagggcctttactaaaatggcgaaggccttccgtcggcgttgttttaaaatgggaagcctcgaccctgtattgaaactgagctgttcgaaggcggcgttgtgtgcaattcggattaatgaaggggaagggttttgtgtggaaaaacgccttggagtgtgacatttctgcgagaatgcttaaataccgatttcccgcaggaacaatggcgctgtcttaagtggcacagtggagcagctctgaagatgcaaaggtaagagcttagttaagcttagtttccaaactaaaggagtaaacctgttgatttacaggaataggaactgttgcatcgtttgaaatttacttttttttgttagatacacgaaaaaacttccagaacatctgggagaatatttaatggaaaatcgcttggttaaaacctgacacttttaacagtgaacagcgttctgagtgtggacgagtagccagtgaagataatgaatgtcgaatgtgactgactagcagcttcattttgaatgagggtcgctgtctgcccattgatagaggccagattgtcttggaagttccaaagttgcaacgatttctggctagtgccacgaggtttacttgactgttgtgtgaaaagctgataagaaaaccatccagaaaaaagctcttcgttttacaaacatgaaaataaaacatgtaattttgg

SEQ ID NO: 304111 - DNA, 1244 bp, Homo sapiens
agcggctttttacgtcggccttcgcgagcgtctgggcgggtggtaggtgagtgggtattgcgggctagtatccgagcaaaagatggtggcgcaggccgagttaagagctttaatcctgtgaagacatcttagtgaagagtttagagtgctgagagttgaaagcttgcacgtgggaaacgtgcggccggactgccacatgtactgaggttgagtcgtgacggccacaggctccgaattttggcgtgaggaaccgctgatcggccacgggcgccgaacttgctggcctccggcatgtgcctgagcggcggcggaaaaaccaccttaattggggcggagggttagttttaagagcaaagggcctttactaaaatggcgaaggccttccgtcggcgttgttttaaaatgggaagcctcgaccctgtattgaaactgagctgttcgaaggcggcgttgtgtgcaattcggattaatgaaggggaagggttttgtgtggaaaaacgccttggagtgtgacatttctgcgagaatgcttaaataccgatttcccgcaggaacaatggcgctgtcttaagtggcacagtggagcagctctgaagatgcaaagatacacgaaaaaacttccagaacatctgggagaatatttaatggaaaatcgcttggttaaaacctgacacttttaacagtgaacagcgttctgagtgtggacgagtagccagtgaagataatgaatgtcgaatgtgactgactagcagcttcattttgaagtaggttgtatggcttaaaagttctgtagtatttgtactataatacttgccttttagcattaccttggtttgtagtcagtgtcacagaagtgcagtttaatgtattatgtgtacatatacaaggtctgattggtctaatcaatgatgaaacctatcccgaagctgataacctgaagaaaaataagtacggattcggcttctgagattaagaccagtaattcagaggtggagtaaattttgttgccgtgattttataacagttgtgttataaaatcctgggttttttttttttctgccaacagtgagggtcgctgtctgcccattgatagaggccagattgtcttggaagttccaaagttgcaacgatttctggctagtgccacgaggtttacttgactgttgtgtgaaaagctgataagaaaaccatccagaaaaaagctcttcgttttacaaacatgaaaataaaacatgtaattttgg

SEQ ID NO: 304112 - DNA, 861 bp, Homo sapiens
agcggctttttacgtcggccttcgcgagcgtctgggcgggtggtaggtgagtgggtattgcgggctagtatccgagcaaaagatggtggcgcaggccgagttaagagctttaatcctgtgaagacatcttagtgaagagtttagagtgctgagagttgaaagcttgcacgtgggaaacgtgcggccggactgccacatgtactgaggttgagtcgtgacggccacaggctccgaattttggcgtgaggaaccgctgatcggccacgggcgccgaacttgctggcctccggcatgtgcctgagcggcggcggaaaaaccaccttaattggggcggagggttagttttaagagcaaagggcctttactaaaatggcgaaggccttccgtcggcgttgttttaaaatgggaagcctcgaccctgtattgaaactgagctgttcgaaggcggcgttgtgtgcaattcggattaatgaaggggaagggttttgtgtggaaaaacgccttggagtgtgacatttctgcgagaatgcttaaataccgatttcccgcaggaacaatggcgctgtcttaagtggcacagtggagcagctctgaagatgcaaagatacacgaaaaaacttccagaacatctgggagaatatttaatggaaaatcgcttggttaaaacctgacacttttaacagtgagggtcgctgtctgcccattgatagaggccagattgtcttggaagttccaaagttgcaacgatttctggctagtgccacgaggtttacttgactgttgtgtgaaaagctgataagaaaaccatccagaaaaaagctcttcgttttacaaacatgaaaataaaacatgtaattttgg

SEQ ID NO: 304113 - DNA, 1559 bp, Homo sapiens
agcggctttttacgtcggccttcgcgagcgtctgggcgggtggtaggtgagtgggtattgcgggctagtatccgagcaaaagatggtggcgcaggccgagttaagagctttaatcctgtgaagacatcttagtgaagagtttagagtgctgagagttgaaagcttgcacgtgggaaacgtgcggccggactgccacatgtactgaggttgagtcgtgacggccacaggctccgaattttggcgtgaggaaccgctgatcggccacgggcgccgaacttgctggcctccggcatgtgcctgagcggcggcggaaaaaccaccttaattggggcggagggttagttttaagagcaaagggcctttactaaaatggcgaaggccttccgtcggcgttgttttaaaatgggaagcctcgaccctgtattgaaactgagctgttcgaaggcggcgttgtgtgcaattcggattaatgaaggggaagggttttgtgtggaaaaacgccttggagtgtgacatttctgcgagaatgcttaaataccgatttcccgcaggaacaatggcgctgtcttaagtggcacagtggagcagctctgaagatgcaaagatacacgaaaaaacttccagaacatctgggagaatatttaatggaaaatcgcttggttaaaacctgacacttttaacagtgaacagcgttctgagtgtggacgagtagccagtgaagataatgaatgtcgaatgtgactgactagcagcttcattttgaagtaggttgtatggcttaaaagttctgtagtatttgtactataatacttgccttttagcattaccttggtttgtagtcagtgtcacagaagtgcagtttaatgtattatgtgtacatatacaaggtctgattggtctaatcaatgatgaaacctatcccgaagctgataacctgaagaaaaataagtacggattcggcttctgagattaagaccagtaattcagaggtggagtaaattttgttgccgtgattttataacagttgtgttataaaatcctgggttttttttttttctgccaacagtgagggtcgctgtctgcccattgatagaggccagattgtcttggaagttccaaagttgcaacgatttctgtaagtggagtttttctgtttgcttagagatcagtgaatattgtgtccttggtcttatctgtgatgatcttatcccgaacctgaacttctgttgaaaaaaaaaaacttttacggatctggcttctgagatggaccgttataaggacaatatttttttttaatacttttaatgcttttacatatgttgtaatgtttgtagtcttgtaagaatctcgtgtttttccttttctagggctagtgccacgaggtttacttgactgttgtgtgaaaagctgataagaaaaccatccagaaaaaagctcttcgttttacaaacatgaaaataaaacatgtaattttggattatgttcctttttgttattacttttaaataggtcctgaaataacatggggagcattaaatggaaaatccactaaaaaaaaa

SEQ ID NO: 304114 - DNA, 1425 bp, Homo sapiens
agcggctttttacgtcggccttcgcgagcgtctgggcgggtggtaggtgagtgggtattgcgggctagtatccgagcaaaagatggtggcgcaggccgagttaagagctttaatcctgtgaagacatcttagtgaagagtttagagtgctgagagttgaaagcttgcacgtgggaaacgtgcggccggactgccacatgtactgaggttgagtcgtgacggccacaggctccgaattttggcgtgaggaaccgctgatcggccacgggcgccgaacttgctggcctccggcatgtgcctgagcggcggcggaaaaaccaccttaattggggcggagggttagttttaagagcaaagggcctttactaaaatggcgaaggccttccgtcggcgttgttttaaaatgggaagcctcgaccctgtattgaaactgagctgttcgaaggcggcgttgtgtgcaattcggattaatgaaggggaagggttttgtgtggaaaaacgccttggagtgtgacatttctgcgagaatgcttaaataccgatttcccgcaggaacaatggcgctgtcttaagtggcacagtggagcagctctgaagatgcaaaggtaagagcttagttaagcttagtttccaaactaaaggagtaaacctgttgatttacaggaataggaactgttgcatcgtttgaaatttacttttttttgttagatacacgaaaaaacttccagaacatctgggagaatatttaatggaaaatcgcttggttaaaacctgacacttttaacaggtatgtgttgttttagtactttatgattgagcatagcatttaatccacacctagactaaatcaaattttttttgtcagtgaacagcgttctgagtgtggacgagtagccagtgaagataatgaatgtcgaatgtgactgactagcagcttcattttgaagtaggttgtatggcttaaaagttctgtagtatttgtactataatacttgccttttagcattaccttggtttgtagtcagtgtcacagaagtgcagtttaatgtattatgtgtacatatacaaggtctgattggtctaatcaatgatgaaacctatcccgaagctgataacctgaagaaaaataagtacggattcggcttctgagattaagaccagtaattcagaggtggagtaaattttgttgccgtgattttataacagttgtgttataaaatcctgggttttttttttttctgccaacagtgagggtcgctgtctgcccattgatagaggccagattgtcttggaagttccaaagttgcaacgatttctggctagtgccacgaggtttacttgactgttgtgtgaaaagctgataagaaaaccatccagaaaaaagctcttcgttttacaaacatgaaaataaaacatgtaattttgg

SEQ ID NO: 304115 - DNA, 1322 bp, Homo sapiens
agcggctttttacgtcggccttcgcgagcgtctgggcgggtggtaggtgagtgggtattgcgggctagtatccgagcaaaagatggtggcgcaggccgagttaagagctttaatcctgtgaagacatcttagtgaagagtttagagtgctgagagttgaaagcttgcacgtgggaaacgtgcggccggactgccacatgtactgaggttgagtcgtgacggccacaggctccgaattttggcgtgaggaaccgctgatcggccacgggcgccgaacttgctggcctccggcatgtgcctgagcggcggcggaaaaaccaccttaattggggcggagggttagttttaagagcaaagggcctttactaaaatggcgaaggccttccgtcggcgttgttttaaaatgggaagcctcgaccctgtattgaaactgagctgttcgaaggcggcgttgtgtgcaattcggattaatgaaggggaagggttttgtgtggaaaaacgccttggagtgtgacatttctgcgagaatgcttaaataccgatttcccgcaggaacaatggcgctgtcttaagtggcacagtggagcagctctgaagatgcaaagatacacgaaaaaacttccagaacatctgggagaatatttaatggaaaatcgcttggttaaaacctgacacttttaacaggtatgtgttgttttagtactttatgattgagcatagcatttaatccacacctagactaaatcaaattttttttgtcagtgaacagcgttctgagtgtggacgagtagccagtgaagataatgaatgtcgaatgtgactgactagcagcttcattttgaagtaggttgtatggcttaaaagttctgtagtatttgtactataatacttgccttttagcattaccttggtttgtagtcagtgtcacagaagtgcagtttaatgtattatgtgtacatatacaaggtctgattggtctaatcaatgatgaaacctatcccgaagctgataacctgaagaaaaataagtacggattcggcttctgagattaagaccagtaattcagaggtggagtaaattttgttgccgtgattttataacagttgtgttataaaatcctgggttttttttttttctgccaacagtgagggtcgctgtctgcccattgatagaggccagattgtcttggaagttccaaagttgcaacgatttctggctagtgccacgaggtttacttgactgttgtgtgaaaagctgataagaaaaccatccagaaaaaagctcttcgttttacaaacatgaaaataaaacatgtaattttgg

SEQ ID NO: 304116 - DNA, 1530 bp, Homo sapiens
agcggctttttacgtcggccttcgcgagcgtctgggcgggtggtaggtgagtgggtattgcgggctagtatccgagcaaaagatggtggcgcaggccgagttaagagctttaatcctgtgaagacatcttagtgaagagtttagagtgctgagagttgaaagcttgcacgtgggaaacgtgcggccggactgccacatgtactgaggttgagtcgtgacggccacaggctccgaattttggcgtgaggaaccgctgatcggccacgggcgccgaacttgctggcctccggcatgtgcctgagcggcggcggaaaaaccaccttaattggggcggagggttagttttaagagcaaagggcctttactaaaatggcgaaggccttccgtcggcgttgttttaaaatgggaagcctcgaccctgtattgaaactgagctgttcgaaggcggcgttgtgtgcaattcggattaatgaaggggaagggttttgtgtggaaaaacgccttggagtgtgacatttctgcgagaatgcttaaataccgatttcccgcaggaacaatggcgctgtcttaagtggcacagtggagcagctctgaagatgcaaagatacacgaaaaaacttccagaacatctgggagaatatttaatggaaaatcgcttggttaaaacctgacacttttaacagtgagggtcgctgtctgcccattgatagaggccagattgtcttggaagttccaaagttgcaacgatttctggctagtgccacgaggtttacttgactgttgtgtgaaaagctgataagaaaaccatccagaaaaaagctcttcgttttacaaacatgaaaataaaacatgtaattttggaaaaaaaaaaaaaaaaaaaaaaaaaaaaaaaaaaaaaaaaaaaaaaagaaaaaaaaaaaaaaaacgcggggagctatttgtggggggggggaaaaaaagagggttaagaacaacgggagagaggcagcggaaaacaaagtaggagcgcaagcgcaacacgactatgtggtgacaagcagagggagaagacaaagccgacagccacccccaaacgggaggaggaagacaaaccaacatccccaagaacagacccagcgacaccgccttcatgcgaccggccccacacaccgaacaccgaagcacgcaggacgcagaaggccacagccgagaacggatgcagacccagagtacaacagcacaaggaggaagcgacaggaaggcaacgcagcagaacaaaaaagtcacacggaacacgagagaaaaagagtagaaaaacatcaaatcagacgaagagcgaagaagcagaaagcacagagcgagacaaagcgaaaagaaaggaagaagaaagaaggaggaagcaaagaaggaccacacagcagcgaccacaacacatgaatcgcgagacccaaagcatgaaacgcgacctgagaccaaacgagaaggagaaaaagcaagaccacaaaagacaacaacagcgcaccaagccgaagcaacagacggaaaacgtaa

SEQ ID NO: 304117 - DNA, 782 bp, Homo sapiens
agcggctttttacgtcggccttcgcgagcgtctgggcgggtggtaggtgagtgggtattgcgggctagtatccgagcaaaagatggtggcgcaggccgagttaagagctttaatcctgtgaagacatcttagtgaagagtttagagtgctgagagttgaaagcttgcacgtgggaaacgtgcggccggactgccacatgtactgaggttgagtcgtgacggccacaggctccgaattttggcgtgaggaaccgctgatcggccacgggcgccgaacttgctggcctccggcatgtgcctgagcggcggcggaaaaaccaccttaattggggcggagggttagttttaagagcaaagggcctttactaaaatggcgaaggccttccgtcggcgttgttttaaaatgggaagcctcgaccctgtattgaaactgagctgttcgaaggcggcgttgtgtgcaattcggattaatgaaggggaagggttttgtgtggaaaaacgccttggagtgtgacatttctgcgagaatgcttaaataccgatttcccgcaggaacaatggcgctgtcttaagtggcacagtggagcagctctgaagatgcaaagtgagggtcgctgtctgcccattgatagaggccagattgtcttggaagttccaaagttgcaacgatttctggctagtgccacgaggtttacttgactgttgtgtgaaaagctgataagaaaaccatccagaaaaaagctcttcgttttacaaacatgaaaataaaacatgtaattttgg

SEQ ID NO: 304118 - DNA, 743 bp, Homo sapiens
aattgccgtagaccgcgagcgtctgggcgggtggtaggaacaatggcgctgtcttaagtggcacagtggagcagctctgaagatgcaaagatacacgaaaaaacttccagaacatctgggagaatatttaatggaaaatcgcttggttaaaacctgacacttttaacagtgaacagcgttctgagtgtggacgagtagccagtgaagataatgaatgtcgaatgtgactgactagcagcttcattttgaatgagggtcgctgtctgcccattgatagaggccagattgtcttggaagttccaaagttgcaacgatttctgtaagtggagtttttctgtttgcttagagatcagtgaatattgtgtccttggtcttatctgtgatgatcttatcccgaacctgaacttctgttgaaaaaaaaaaacttttacggatctggcttctgagatggaccgttataaggacaatatttttttttaatacttttaatgcttttacatatgttgtaatgtttgtagtcttgtaagaatctcgtgtttttccttttctagggctagtgccacgaggtttacttgactgttgtgtgaaaagctgataagaaaaccatccagaaaaaagctcttcgttttacaaacatgaaaataaaacatgtaattttggattatgttcctttttgttattacttttaaataggtcctgaaataacatggggagcattaaatggaaaatccactaaaaaaaaa

SEQ ID NO: 304119 - DNA, 356 bp, Homo sapiens
agcggctttttacgtcggccttcgcgagcgtctgggcgggtggtaggaacaatggcgctgtcttaagtggcacagtggagcagctctgaagatgcaaagatacacgaaaaaacttccagaacatctgggagaatatttaatggaaaatcgcttggttaaaacctgacacttttaacagtgagggtcgctgtctgcccattgatagaggccagattgtcttggaagttccaaagttgcaacgatttctggctagtgccacgaggtttacttgactgttgtgtgaaaagctgataagaaaaccatccagaaaaaagctcttcgttttacaaacatgaaaataaaacatgtaattttgg

SEQ ID NO: 304120 - DNA, 568 bp, Homo sapiens
agcggctttttacgtcggccttcgcgagcgtctgggcgggtggtaggtgagtgggtattgcgggctagtatccgagcaaaagatggtggcgcaggccgagttaagagctttaatcctgtgaagacatcttagtgaagagtttagagtgctgagagttgaaagcttgcacgtgggaaacgtgcggccggactgccacatgtactgaggttgagtcgtgacggccacaggctccgaattttggcgtgaggaaccgctgatcggccacgggcgccgaacttgctggcctccggcatgtgcctgagcggcggcggaaaaaccaccttaattggggcggagggaacaatggcgctgtcttaagtggcacagtggagcagctctgaagatgcaaagtgagggtcgctgtctgcccattgatagaggccagattgtcttggaagttccaaagttgcaacgatttctggctagtgccacgaggtttacttgactgttgtgtgaaaagctgataagaaaaccatccagaaaaaagctcttcgttttacaaacatgaaaataaaacatgtaattttgg

SEQ ID NO: 304121 - DNA, 640 bp, Homo sapiens
agcggctttttacgtcggccttcgcgagcgtctgggcgggtggtaggaacaatggcgctgtcttaagtggcacagtggagcagctctgaagatgcaaagtgagggtcgctgtctgcccattgatagaggccagattgtcttggaagttccaaagttgcaacgatttctggctagtgccacgaggtttacttgactgttgtgtgaaaagctgataagaaaaccatccagaaaaaagctcttcgttttacaaacatgaaaataaaacatgtaattttggcaaaaaaaccaaaacaacaacagaaagataaaacacagccgtggttgggccgcatgggggccctgagaaaaaagtttgtagtaaacaactcgtggggggggccggcgggaccacagatgatggtataatgtgaaacacgtggtggcatataacagtggttcccataaaaggaggaacatcgcggggcgtcagagaacgaaggtgcgtgggactttctacacaccaaataaaaaaacgccgcggggggcaaaccggaggcgttttgggaaacaaactccgcaaaggggcagctcggaaggacaatgaggggatcactaccacaggaggtccaagggaccccagatataattgccgcgcgtgaga

SEQ ID NO: 304122 - DNA, 1367 bp, Homo sapiens
taagaaaaataaaagcatcagtattgcaaagactttccatgatcctacacccacctcgaaagccccctctcaccacaggaagtgcactgaccactggaggcataaaagaggtcctcaaagagcccgatcctcactctccttgcacagctcagcaggacctcagccatgagacttctcatcctggccctccttggcatctgctctctcactgcatacattgtggaaggtgtagggagtgaagtctcagataagaggacctgtgtgagcctcactacccagcgactgccggttagcagaatcaagacctacaccatcacggaaggctccttgagagcagtaatttttattaccaaacgtggcctaaaagtctgtgctgatccacaagccacatgggtgagagacgtggtcaggagcatggacaggaaatccaacaccagaaataacatgatccagaccaagccaacaggaacccagcaatcgaccaatacagctgtgactctgactggctagtagtctctggcaccctgtccgtctccagccagccagctcatttcactttacacgctcatggactgagtttatactcaccttttatgaaagcactgcatgaataaaattattcctttgtatttttacttttaaatgtcttctgtattcacttatatgttctaattaataaattatttattattaagaatagttccctagtctattcattatatttagggaaaggtagtgtatcattgttgtttgatttctgaccttgtacctctctttgatggtaaccataatggaagagattctggctagtgtctatcagaggtgaaagctatatcaatctctcttagagtccagcttgtaatggttctttacacatcagtcacaagttacagctgtgacaatggcaacaatttgagatgtatttcaacttgtctctataatagaattctgtttatagaataagggagaaaataatccagtcttcactgggttcccattctgagggtccactactcaaaaatttgcttcactcaatttttttcacctctttgtgttttattttggtgtcctattaaaggaataaaatgacacaacttgtcccttttttgtcccattagcaaaaattagaattttggtataaagaaactttattcaagtaaaaatcaataccctttgaattggacaataatctcactaccttattaggatttctgtatttgccattacgctagttatcatgcatgttatgctttactgcgaataagcttttaatgctccaaatgctgacccatgcaatatttcctcatgtgatcacaatttgcagtaaacttttaattaaatgctcatctggtaactcaacaccccag

SEQ ID NO: 304123 - DNA, 430 bp, Homo sapiens
ttccattctgctgctccctgctgagagcccatcagcggctccccattgcctaccaggaccagaatccacttggcagcactgaagaccctccctgaagactgagatataaaggcatcaaaaagagcttgagattttaagaaatgacagacctcagccttgcccttcacccaccagtggctcatacctaagcgctgcagactttacccgcacacctctagactctcttcctttctaaagatacggaaagaggataccaaacctctctggtaccagcccaactgtccctcctcacccctctgtccctgtcacacctgtccttttgtcaaactgcaggcagcctccagggccttggggcttcacccagggcacttgtctaccagccccacgaggtgcgtccagggctttcttgtcaccagttgggaaaagcagg

SEQ ID NO: 304124 - DNA, 290 bp, Homo sapiens
acctgggcatggctggaccactatggcaggagaaggaccctgtgtacaaacttcttggcttggctaccaggtcccaaagggcttttatagtgggcccccacctgcttgcttctgatagggactggcataagttccattttagaagtaacaaggcaagcccaagttcagtcagaatgagcaaaacaaatcagggacccacactactctaaataccctggggtggagggtgcacatctggagtaatttcaaggctttttccgtgtaatctgaggtggcaaccaagggggagg

SEQ ID NO: 304125 - DNA, 5225 bp, Homo sapiens
cgcccgggcgcaacgcaaacatggcggcgggtggcacccgtcggtgaggcggtgccgggcgggggttgtcgggtgtcatgggcggtggcgacggcaccgcccccgcgtctccctgagcgggacggcagggggggcttctgcgctgagccgggcgatggacgacagcggcgagctgggtggtctggagaccatggagaccctcacggagctgggcgacgagctgaccctgggagacatcgacgagatgctgcaatttgtcagtaatcaagtgggagagttccctgacttgttttcagaacagctgtgtagctcctttcctggcagtggtggtagtggtagcagcagcggcagcagtggcagcagcagcagcagcagcaatggcaggggcagcagcagcggagctgtggacccttcagtgcaacggtcattcacccaggtcacattaccttccttctctccctcggcggcctccccacaggctccaactctgcaagtcaaggtttctcccacctcagttcccaccacacccagggcaactcctattcttcagccccgcccccagccccagcctcaacctcaaactcagctgcaacaacagacggtaatgatcacgccaacattcagcaccactccgcagacgaggatcatccagcagcctttgatataccagaatgcagctactagctttcaagtccttcagcctcaagtccaaagcctggtgacatcctcccaggtacagccggtcaccattcagcagcaggtgcagacagtacaggcccagcgggtgctgacacaaacggccaatggcacgctgcagacccttgccccggctacggtgcagacagttgctgcgccacaggtgcagcaggtcccggtcctggtccagcctcagatcatcaagacagattcccttgttttgaccacactgaagacagatggcagccctgttatggctgcggtccagaacccggccctcaccgccctcaccacccctatccagacggctgcccttcaagtaccaaccctggtgggcagcagtgggaccattctgaccacaatgcctgtaatgatggggcaagagaaagtgcccattaagcaggtacctgggggagtcaagcagcttgagccccccaaagaaggagaaaggcggacaacccataatatcattgagaaacgatatcgctcctccatcaatgacaaaatcatcgaattgaaagacctggtcatggggacagacgccaagatgcacaagtctggcgttctgaggaaggccattgattacatcaaatacttgcagcaggtcaatcataaactgcgccaggagaacatggtgctgaagctggcaaatcaaaagaacaagcttctaaagggcatcgacctaggcagtctggtggacaatgaggtggacctgaagatcgaggactttaatcagaatgtccttctgatgtcccccccagcctctgactcagggtcccaggctggcttctctccctactccattgactctgagccaggaagccctctattggatgatgcaaaggtcaaagatgagccagactctcctcctgtggcgctgggcatggtagaccgctcacggattcttctgtgtgtcctcaccttcctgtgcctctcctttaaccccctgacttccctgctgcagtggggaggggcccacgactctgaccagcacccacactcaggctctggccgcagtgtcctgtcattcgagtcaggttctgggggctggtttgactggatgatgcctactcttctcttatggctggtaaatggtgtgattgtcctgagcgtctttgtgaagctgctggttcatggggagccagtgatccggccacactcgcgctcctcggtcaccttctggaggcaccggaaacaggcagatctggatctcgccagaggagattttgcagctgctgccggcaacctacaaacctgcctggcagttttgggccgggcactgcccacctcccgcctggacctggcctgcagcctctcctggaacgtgatccgctacagcctgcagaagctacgcctggtgcgctggctgctcaagaaagtcttccagtgccggcgggccacgccagccactgaggcaggctttgaagacgaagctaagaccagcgcccgggatgcggctctggcctatcaccggctgcaccagctgcacatcacagggaagcttcctgcaggatccgcctgttccgatgtacacatggcgttgtgtgccgtgaacctggctgaatgtgcagaggagaagatcccaccgagcacactggttgagatccatctgactgctgccatggggctcaagacccggtgtggaggcaagctgggcttcctggccagctacttcctcagccgagcccagagcctgtgtggccccgagcacagtgctgttcctgactccctgcgctggctctgccaccccctgggccagaagtttttcatggagcggagctggtctgtgaagtcagctgccaaggagagtctatactgtgcccagaggaacccagctgaccccattgcgcaggtccaccaggccttctgcaagaacctgctggagcgagctatagagtccttggtgaaacctcaggccaagaagaaggctggagaccaggaagaagagagctgtgaattctccagtgctctggagtacttgaaattacttcattcttttgtggactctgtgggggttatgagccccccactctccaggagctccgtgctcaagtccgccctgggtccagacatcatctgtcggtggtggacgtctgcaatcactgtggccatcagctggctccagggagacgatgcagctgtgcgctctcattttaccaaagtggaacgcatccccaaggccctggaagtgacagagagccccctggtgaaggccatcttccatgcctgcagagccatgcatgcctcactccctgggaaagcagatgggcagcagagttccttctgccattgcgagagggccagtggccacctatggagcagcctcaacgtcagtggggccacctctgaccctgccctcaaccacgtggtccagctgctcacctgtgacctgctactgtcgctacggacagcgctctggcaaaaacaggccagtgccagccaggctgtgggggagacctaccacgcgtcaggcgctgaactggcgggcttccaacgggacctgggcagcctgcgcaggctggcacacagcttccgcccagcataccgcaaggtgttcctgcatgaagccaccgtgcgcctgatggcaggagccagccccacccgcacccaccagctgctggaacacagcctgcggcggcgcaccacgcagagcaccaagcacggagaggtggatgcctggcccggccagcgagagcgggccaccgccatcctgctggcctgccgccacctgcccctctccttcctctcctccccgggccagcgggcagtgctgctggccgaagctgcccgcaccctggagaaggtgggcgaccggcgctcctgcaacgactgccagcagatgattgttaagctgggtggtggcactgccattgccgcctcctgaccaccaggctcagcccacccctccacctctctctcgatttctctctctccccctcagcatcttcccgctgagagtggtggggaagagccttgtcttcttagctgtcacctgccgaggcttctgggccactcaggccagtgcacccctgggcagagccccttaaagctgctgtcactagatgcccatggtccagggcctggtgggcgtgagaggataggtggcagggcagaaactgggcagccctgacttgatagcagcagggggagctcccaagctgccaagcccctgcctccagccttcctgagtttctctctcctgaaccctactctctcctttttgcttcctcagtttttatcaggctttctctgggggacagcagtctctgagcaccagggagcagttgccctcaggcctgtgcccagcatgccctcccctttttatacgaatgttttctaccagtgtgcttgggtttgccatgatgcgaggctgagttgctgtagcgtcttgattctctccctgggtctgcgttccctcccctgggcctgactgagcctgctcattgtttttccctttattacacaggacagccaggggaggaggggggcccagccctgggaggctggtgggaggcagggggcaggcctgcggatgcatgaaataatgttggcattattttttaattttttaaaaaataaatggtatcttatttaattgtcctgttccttcccactccccgcctcctaggatgttagcccaagctcagggtaggcccagggggctgggagaaatgaagccacccatggggactggggaccaggggccttcagcatggcttctaggttccctcctccccctaccccatctcctacctccacagtacagactgtccccaacttaacagtggttcaacttaaaccatgtttcaactttacaattggtctgttggggtattaaatgaatttgtgacttaggatattttcatttatgatgggtttatcaggaagtaaccccatggtaagttgaggcatatctgtatatatttaaacctaattaattcttgagctgaaaataaataaaccaggatggcagggaccaacccctaatccctccccagcggcaagcccctcttttcagagtgggcagagggttgcctatggtgggcactaggaatgaggtcccctgcctcgatgcgggtcctaggagaaaaagtcctacttttctgggtccccaggtgcagcacctcccggagactgtttctcccatggcctcctgagtgatgggccctgcctccctgtgcctcatcctcaggctggttggagcagagggtgggcaggagccccagcacagactggggggtgctcacagcagggccaccttgatgcaggctggaatgttatccctggggtgtgcttggaccccacctgctttctttctctcctgcccctcccctactctcactgtaatttatggaccctgcccgcctgcgtgttgtgtgtatgtcctgtgccttttctcactattgtttgggtgtgggagggggtggtttttcactgaaaaggggggtacacctatagctttcttgatgttcaatcaatcagtcactgtgtcccagacatattcaataaacacagattggtaccaccca

SEQ ID NO: 304126 - DNA, 5395 bp, Homo sapiens
cgcccgggcgcaacgcaaacatggcggcgggtggcacccgtcggtgaggcggtgccgggcgggggttgtcgggtgtcatgggcggtggcgacggcaccgcccccgcgtctccctgagcgggacggcagggggggcttctgcgctgagccgggcgatggacgacagcggcgagctgggtggtctggagaccatggagaccctcacggagctgggcgacgagctgaccctgggagacatcgacgagatgctgcaatttgtcagtaatcaagtgggagagttccctgacttgttttcagaacagctgtgtagctcctttcctggcagtggtggtagtggtagcagcagcggcagcagtggcagcagcagcagcagcagcaatggcaggggcagcagcagcggagctgtggacccttcagtgcaacggtcattcacccaggtcacattaccttccttctctccctcggcggcctccccacaggctccaactctgcaagtcaaggtttctcccacctcagttcccaccacacccagggcaactcctattcttcagccccgcccccagccccagcctcaacctcaaactcagctgcaacaacagacggtaatgatcacgccaacattcagcaccactccgcagacgaggatcatccagcagcctttgatataccagaatgcagctactagctttcaagtccttcagcctcaagtccaaagcctggtgacatcctcccaggtacagccggtcaccattcagcagcaggtgcagacagtacaggcccagcgggtgctgacacaaacggccaatggcacgctgcagacccttgccccggctacggtgcagacagttgctgcgccacaggtgcagcaggtcccggtcctggtccagcctcagatcatcaagacagattcccttgttttgaccacactgaagacagatggcagccctgttatggctgcggtccagaacccggccctcaccgccctcaccacccctatccagacggctgcccttcaagtaccaaccctggtgggcagcagtgggaccattctgaccacaatgcctgtaatgatggggcaagagaaagtgcccattaagcaggtacctgggggagtcaagcagcttgagccccccaaagaaggagaaaggcggacaacccataatatcattgagaaacgatatcgctcctccatcaatgacaaaatcatcgaattgaaagacctggtcatggggacagacgccaagatgcacaagtctggcgttctgaggaaggccattgattacatcaaatacttgcagcaggtcaatcataaactgcgccaggagaacatggtgctgaagctggcaaatcaaaagaacaagcttctaaagggcatcgacctaggcagtctggtggacaatgaggtggacctgaagatcgaggactttaatcagaatgtccttctgatgtcccccccagcctctgactcagggtcccaggctggcttctctccctactccattgactctgagccaggaagccctctattggatgatgcaaaggtcaaagatgagccagactctcctcctgtggcgctgggcatggtagaccgctcacggattcttctgtgtgtcctcaccttcctgtgcctctcctttaaccccctgacttccctgctgcagtggggaggggcccacgactctgaccagcacccacactcaggctctggccgcagtgtcctgtcattcgagtcaggttctgggggctggtttgactggatgatgcctactcttctcttatggctggtaaatggtgtgattgtcctgagcgtctttgtgaagctgctggttcatggggagccagtgatccggccacactcgcgctcctcggtcaccttctggaggcaccggaaacaggcagatctggatctcgccagaggagattttgcagctgctgccggcaacctacaaacctgcctggcagttttgggccgggcactgcccacctcccgcctggacctggcctgcagcctctcctggaacgtgatccgctacagcctgcagaagctacgcctggtgcgctggctgctcaagaaagtcttccagtgccggcgggccacgccagccactgaggcaggctttgaagacgaagctaagaccagcgcccgggatgcggctctggcctatcaccggctgcaccagctgcacatcacagggaagcttcctgcaggatccgcctgttccgatgtacacatggcgttgtgtgccgtgaacctggctgaatgtgcagaggagaagatcccaccgagcacactggttgagatccatctgactgctgccatggggctcaagacccggtgtggaggcaagctgggcttcctggccagctacttcctcagccgagcccagagcctgtgtggccccgagcacagtgctgttcctgactccctgcgctggctctgccaccccctgggccagaagtttttcatggagcggagctggtctgtgaagtcagctgccaaggagagtctatactgtgcccagaggaacccagctgaccccattgcgcaggtccaccaggccttctgcaagaacctgctggagcgagctatagagtccttggtgaaacctcaggccaagaagaaggctggagaccaggaagaagagagctgtgaattctccagtgctctggagtacttgaaattacttcattcttttgtggactctgtgggggttatgagccccccactctccaggagctccgtgctcaagtccgccctgggtccagacatcatctgtcggtggtggacgtctgcaatcactgtggccatcagctggctccagggagacgatgcagctgtgcgctctcattttaccaaagtggaacgcatccccaaggccctggaagtgacagagagccccctggtgaaggccatcttccatgcctgcagagccatgcatgcctcactccctgggaaagcagatgggcagcagagttccttctgccattgcgagagggccagtggccacctatggagcagcctcaacgtcagtggggccacctctgaccctgccctcaaccacgtggtccagctgctcacctgtgacctgctactgtcgctacggacagcgctctggcaaaaacaggccagtgccagccaggctgtgggggagacctaccacgcgtcaggcgctgaactggcgggcttccaacgggacctgggcagcctgcgcaggctggcacacagcttccgcccagcataccgcaaggtgttcctgcatgaagccaccgtgcgcctgatggcaggagccagccccacccgcacccaccagctgctggaacacagcctgcggcggcgcaccacgcagagcaccaagcacggagaggtggatgcctggcccggccagcgagagcgggccaccgccatcctgctggcctgccgccacctgcccctctccttcctctcctccccgggccagcgggcagtgctgctggccgaagctgcccgcaccctggagaaggtgggcgaccggcgctcctgcaacgactgccagcagatgattgttaagctgggtggtggcactgccattgccgcctcctgaccaccaggctcagcccacccctccacctctctctcgatttctctctctccccctcagcatcttcccgctgagagtggtggggaagagccttgtcttcttagctgtcacctgccgaggcttctgggccactcaggccagtgcacccctgggcagagccccttaaagctgctgtcactagatgcccatggtccagggcctggtgggcgtgagaggataggtggcagggcagaaactgggcagccctgacttgatagcagcagggggagctcccaagctgccaagcccctgcctccagccttcctgagtttctctctcctgaaccctactctctcctttttgcttcctcagtttttatcaggctttctctgggggacagcagtctctgagcaccagggagcagttgccctcaggcctgtgcccagcatgccctcccctttttatacgaatgttttctaccagtgtgcttgggtttgccatgatgcgaggctgagttgctgtagcgtcttgattctctccctgggtctgcgttccctcccctgggcctgactgagcctgctcattgtttttccctttattacacaggacagccaggggaggaggggggcccagccctgggaggctggtgggaggcagggggcaggcctgcggatgcatgaaataatgttggcattattttttaattttttaaaaaataaatggtatcttatttaattgtcctgttccttcccactccccgcctcctaggatgttagcccaagctcagggtaggcccagggggctgggagaaatgaagccacccatggggactggggaccaggggccttcagcatggcttctaggttccctcctccccctaccccatctcctacctccacagtacagactgtccccaacttaacagtggttcaacttaaaccatgtttcaactttacaattggtctgttggggtattaaatgaatttgtgacttaggatattttcatttatgatgggtttatcaggaagtaaccccatggtaagttgaggcatatctgtatatatttaaacctaattaattcttgagctgaaaataaataaaccaggatggcagggaccaacccctaatccctccccagcggcaagcccctcttttcagagtgggcagagggttgcctatggtgggcactaggaatgaggtcccctgcctcgatgcgggtcctaggagaaaaagtcctacttttctgggtccccaggtgcagcacctcccggagactgtttctcccatggcctcctgagtgatgggccctgcctccctgtgcctcatcctcaggctggttggagcagagggtgggcaggagccccagcacagactggggggtgctcacagcagggccaccttgatgcaggctggaatgttatccctggggtgtgcttggaccccacctgctttctttctctcctgcccctcccctactctcactgtaatttatggaccctgcccgcctgcgtgttgtgtgtatgtcctgtgccttttctcactattgtttgggtgtgggagggggtggtttttcactgaaaaggggggtacacctatagctttcttgatgttcaatcaatcagtcactgtgtcccagacatattcaataaacacagattggtaccacccaaaaaaaaaggggcgcctaatacccggggccagttacatacctttgtcaaaggccaaaaggataagaacagcgataaagcgcggaacacatgattgagacacttggtaaagcaacaaaaacgataattgaactgttatgtataacaacgaaaggatagtttatgtaccata

SEQ ID NO: 304127 - DNA, 5419 bp, Homo sapiens
  misc_feature (5226)..(5226): n is a, c, g, or t
  misc_feature (5228)..(5228): n is a, c, g, or t
cgcccgggcgcaacgcaaacatggcggcgggtggcacccgtcggtgaggcggtgccgggcgggggttgtcgggtgtcatgggcggtggcgacggcaccgcccccgcgtctccctgagcgggacggcagggggggcttctgcgctgagccgggcgatggacgacagcggcgagctgggtggtctggagaccatggagaccctcacggagctgggcgacgagctgaccctgggagacatcgacgagatgctgcaatttgtcagtaatcaagtgggagagttccctgacttgttttcagaacagctgtgtagctcctttcctggcagtggtggtagtggtagcagcagcggcagcagtggcagcagcagcagcagcagcaatggcaggggcagcagcagcggagctgtggacccttcagtgcaacggtcattcacccaggtcacattaccttccttctctccctcggcggcctccccacaggctccaactctgcaagtcaaggtttctcccacctcagttcccaccacacccagggcaactcctattcttcagccccgcccccagccccagcctcaacctcaaactcagctgcaacaacagacggtaatgatcacgccaacattcagcaccactccgcagacgaggatcatccagcagcctttgatataccagaatgcagctactagctttcaagtccttcagcctcaagtccaaagcctggtgacatcctcccaggtacagccggtcaccattcagcagcaggtgcagacagtacaggcccagcgggtgctgacacaaacggccaatggcacgctgcagacccttgccccggctacggtgcagacagttgctgcgccacaggtgcagcaggtcccggtcctggtccagcctcagatcatcaagacagattcccttgttttgaccacactgaagacagatggcagccctgttatggctgcggtccagaacccggccctcaccgccctcaccacccctatccagacggctgcccttcaagtaccaaccctggtgggcagcagtgggaccattctgaccacaatgcctgtaatgatggggcaagagaaagtgcccattaagcaggtacctgggggagtcaagcagcttgagccccccaaagaaggagaaaggcggacaacccataatatcattgagaaacgatatcgctcctccatcaatgacaaaatcatcgaattgaaagacctggtcatggggacagacgccaagatgcacaagtctggcgttctgaggaaggccattgattacatcaaatacttgcagcaggtcaatcataaactgcgccaggagaacatggtgctgaagctggcaaatcaaaagaacaagcttctaaagggcatcgacctaggcagtctggtggacaatgaggtggacctgaagatcgaggactttaatcagaatgtccttctgatgtcccccccagcctctgactcagggtcccaggctggcttctctccctactccattgactctgagccaggaagccctctattggatgatgcaaaggtcaaagatgagccagactctcctcctgtggcgctgggcatggtagaccgctcacggattcttctgtgtgtcctcaccttcctgtgcctctcctttaaccccctgacttccctgctgcagtggggaggggcccacgactctgaccagcacccacactcaggctctggccgcagtgtcctgtcattcgagtcaggttctgggggctggtttgactggatgatgcctactcttctcttatggctggtaaatggtgtgattgtcctgagcgtctttgtgaagctgctggttcatggggagccagtgatccggccacactcgcgctcctcggtcaccttctggaggcaccggaaacaggcagatctggatctcgccagaggagattttgcagctgctgccggcaacctacaaacctgcctggcagttttgggccgggcactgcccacctcccgcctggacctggcctgcagcctctcctggaacgtgatccgctacagcctgcagaagctacgcctggtgcgctggctgctcaagaaagtcttccagtgccggcgggccacgccagccactgaggcaggctttgaagacgaagctaagaccagcgcccgggatgcggctctggcctatcaccggctgcaccagctgcacatcacagggaagcttcctgcaggatccgcctgttccgatgtacacatggcgttgtgtgccgtgaacctggctgaatgtgcagaggagaagatcccaccgagcacactggttgagatccatctgactgctgccatggggctcaagacccggtgtggaggcaagctgggcttcctggccagctacttcctcagccgagcccagagcctgtgtggccccgagcacagtgctgttcctgactccctgcgctggctctgccaccccctgggccagaagtttttcatggagcggagctggtctgtgaagtcagctgccaaggagagtctatactgtgcccagaggaacccagctgaccccattgcgcaggtccaccaggccttctgcaagaacctgctggagcgagctatagagtccttggtgaaacctcaggccaagaagaaggctggagaccaggaagaagagagctgtgaattctccagtgctctggagtacttgaaattacttcattcttttgtggactctgtgggggttatgagccccccactctccaggagctccgtgctcaagtccgccctgggtccagacatcatctgtcggtggtggacgtctgcaatcactgtggccatcagctggctccagggagacgatgcagctgtgcgctctcattttaccaaagtggaacgcatccccaaggccctggaagtgacagagagccccctggtgaaggccatcttccatgcctgcagagccatgcatgcctcactccctgggaaagcagatgggcagcagagttccttctgccattgcgagagggccagtggccacctatggagcagcctcaacgtcagtggggccacctctgaccctgccctcaaccacgtggtccagctgctcacctgtgacctgctactgtcgctacggacagcgctctggcaaaaacaggccagtgccagccaggctgtgggggagacctaccacgcgtcaggcgctgaactggcgggcttccaacgggacctgggcagcctgcgcaggctggcacacagcttccgcccagcataccgcaaggtgttcctgcatgaagccaccgtgcgcctgatggcaggagccagccccacccgcacccaccagctgctggaacacagcctgcggcggcgcaccacgcagagcaccaagcacggagaggtggatgcctggcccggccagcgagagcgggccaccgccatcctgctggcctgccgccacctgcccctctccttcctctcctccccgggccagcgggcagtgctgctggccgaagctgcccgcaccctggagaaggtgggcgaccggcgctcctgcaacgactgccagcagatgattgttaagctgggtggtggcactgccattgccgcctcctgaccaccaggctcagcccacccctccacctctctctcgatttctctctctccccctcagcatcttcccgctgagagtggtggggaagagccttgtcttcttagctgtcacctgccgaggcttctgggccactcaggccagtgcacccctgggcagagccccttaaagctgctgtcactagatgcccatggtccagggcctggtgggcgtgagaggataggtggcagggcagaaactgggcagccctgacttgatagcagcagggggagctcccaagctgccaagcccctgcctccagccttcctgagtttctctctcctgaaccctactctctcctttttgcttcctcagtttttatcaggctttctctgggggacagcagtctctgagcaccagggagcagttgccctcaggcctgtgcccagcatgccctcccctttttatacgaatgttttctaccagtgtgcttgggtttgccatgatgcgaggctgagttgctgtagcgtcttgattctctccctgggtctgcgttccctcccctgggcctgactgagcctgctcattgtttttccctttattacacaggacagccaggggaggaggggggcccagccctgggaggctggtgggaggcagggggcaggcctgcggatgcatgaaataatgttggcattattttttaattttttaaaaaataaatggtatcttatttaattgtcctgttccttcccactccccgcctcctaggatgttagcccaagctcagggtaggcccagggggctgggagaaatgaagccacccatggggactggggaccaggggccttcagcatggcttctaggttccctcctccccctaccccatctcctacctccacagtacagactgtccccaacttaacagtggttcaacttaaaccatgtttcaactttacaattggtctgttggggtattaaatgaatttgtgacttaggatattttcatttatgatgggtttatcaggaagtaaccccatggtaagttgaggcatatctgtatatatttaaacctaattaattcttgagctgaaaataaataaaccaggatggcagggaccaacccctaatccctccccagcggcaagcccctcttttcagagtgggcagagggttgcctatggtgggcactaggaatgaggtcccctgcctcgatgcgggtcctaggagaaaaagtcctacttttctgggtccccaggtgcagcacctcccggagactgtttctcccatggcctcctgagtgatgggccctgcctccctgtgcctcatcctcaggctggttggagcagagggtgggcaggagccccagcacagactggggggtgctcacagcagggccaccttgatgcaggctggaatgttatccctggggtgtgcttggaccccacctgctttctttctctcctgcccctcccctactctcactgtaatttatggaccctgcccgcctgcgtgttgtgtgtatgtcctgtgccttttctcactattgtttgggtgtgggagggggtggtttttcactgaaaaggggggtacacctatagctttcttgatgttcaatcaatcagtcactgtgtcccagacatattcaataaacacagattggtaccacccanangaaaaaaagaaaaaacaaaaagggggcgcgcaaaaatactccagggcccaagtaaccgcacccagtttttggaaagggccaaaggagccgaaaagaagcaggcgcgaaacgcgggaggcaactggcggaccggggaagacctcggggcaaggaacacaacaggaaagcaggaaaattgtagggacacagag

SEQ ID NO: 304128 - DNA, 5225 bp, Homo sapiens
cgcccgggcgcaacgcaaacatggcggcgggtggcacccgtcggtgaggcggtgccgggcgggggttgtcgggtgtcatgggcggtggcgacggcaccgcccccgcgtctccctgagcgggacggcagggggggcttctgcgctgagccgggcgatggacgacagcggcgagctgggtggtctggagaccatggagaccctcacggagctgggcgacgagctgaccctgggagacatcgacgagatgctgcaatttgtcagtaatcaagtgggagagttccctgacttgttttcagaacagctgtgtagctcctttcctggcagtggtggtagtggtagcagcagcggcagcagtggcagcagcagcagcagcagcaatggcaggggcagcagcagcggagctgtggacccttcagtgcaacggtcattcacccaggtcacattaccttccttctctccctcggcggcctccccacaggctccaactctgcaagtcaaggtttctcccacctcagttcccaccacacccagggcaactcctattcttcagccccgcccccagccccagcctcaacctcaaactcagctgcaacaacagacggtaatgatcacgccaacattcagcaccactccgcagacgaggatcatccagcagcctttgatataccagaatgcagctactagctttcaagtccttcagcctcaagtccaaagcctggtgacatcctcccaggtacagccggtcaccattcagcagcaggtgcagacagtacaggcccagcgggtgctgacacaaacggccaatggcacgctgcagacccttgccccggctacggtgcagacagttgctgcgccacaggtgcagcaggtcccggtcctggtccagcctcagatcatcaagacagattcccttgttttgaccacactgaagacagatggcagccctgttatggctgcggtccagaacccggccctcaccgccctcaccacccctatccagacggctgcccttcaagtaccaaccctggtgggcagcagtgggaccattctgaccacaatgcctgtaatgatggggcaagagaaagtgcccattaagcaggtacctgggggagtcaagcagcttgagccccccaaagaaggagaaaggcggacaacccataatatcattgagaaacgatatcgctcctccatcaatgacaaaatcatcgaattgaaagacctggtcatggggacagacgccaagatgcacaagtctggcgttctgaggaaggccattgattacatcaaatacttgcagcaggtcaatcataaactgcgccaggagaacatggtgctgaagctggcaaatcaaaagaacaagcttctaaagggcatcgacctaggcagtctggtggacaatgaggtggacctgaagatcgaggactttaatcagaatgtccttctgatgtcccccccagcctctgactcagggtcccaggctggcttctctccctactccattgactctgagccaggaagccctctattggatgatgcaaaggtcaaagatgagccagactctcctcctgtggcgctgggcatggtagaccgctcacggattcttctgtgtgtcctcaccttcctgtgcctctcctttaaccccctgacttccctgctgcagtggggaggggcccacgactctgaccagcacccacactcaggctctggccgcagtgtcctgtcattcgagtcaggttctgggggctggtttgactggatgatgcctactcttctcttatggctggtaaatggtgtgattgtcctgagcgtctttgtgaagctgctggttcatggggagccagtgatccggccacactcgcgctcctcggtcaccttctggaggcaccggaaacaggcagatctggatctcgccagaggagattttgcagctgctgccggcaacctacaaacctgcctggcagttttgggccgggcactgcccacctcccgcctggacctggcctgcagcctctcctggaacgtgatccgctacagcctgcagaagctacgcctggtgcgctggctgctcaagaaagtcttccagtgccggcgggccacgccagccactgaggcaggctttgaagacgaagctaagaccagcgcccgggatgcggctctggcctatcaccggctgcaccagctgcacatcacagggaagcttcctgcaggatccgcctgttccgatgtacacatggcgttgtgtgccgtgaacctggctgaatgtgcagaggagaagatcccaccgagcacactggttgagatccatctgactgctgccatggggctcaagacccggtgtggaggcaagctgggcttcctggccagctacttcctcagccgagcccagagcctgtgtggccccgagcacagtgctgttcctgactccctgcgctggctctgccaccccctgggccagaagtttttcatggagcggagctggtctgtgaagtcagctgccaaggagagtctatactgtgcccagaggaacccagctgaccccattgcgcaggtccaccaggccttctgcaagaacctgctggagcgagctatagagtccttggtgaaacctcaggccaagaagaaggctggagaccaggaagaagagagctgtgaattctccagtgctctggagtacttgaaattacttcattcttttgtggactctgtgggggttatgagccccccactctccaggagctccgtgctcaagtccgccctgggtccagacatcatctgtcggtggtggacgtctgcaatcactgtggccatcagctggctccagggagacgatgcagctgtgcgctctcattttaccaaagtggaacgcatccccaaggccctggaagtgacagagagccccctggtgaaggccatcttccatgcctgcagagccatgcatgcctcactccctgggaaagcagatgggcagcagagttccttctgccattgcgagagggccagtggccacctatggagcagcctcaacgtcagtggggccacctctgaccctgccctcaaccacgtggtccagctgctcacctgtgacctgctactgtcgctacggacagcgctctggcaaaaacaggccagtgccagccaggctgtgggggagacctaccacgcgtcaggcgctgaactggcgggcttccaacgggacctgggcagcctgcgcaggctggcacacagcttccgcccagcataccgcaaggtgttcctgcatgaagccaccgtgcgcctgatggcaggagccagccccacccgcacccaccagctgctggaacacagcctgcggcggcgcaccacgcagagcaccaagcacggagaggtggatgcctggcccggccagcgagagcgggccaccgccatcctgctggcctgccgccacctgcccctctccttcctctcctccccgggccagcgggcagtgctgctggccgaagctgcccgcaccctggagaaggtgggcgaccggcgctcctgcaacgactgccagcagatgattgttaagctgggtggtggcactgccattgccgcctcctgaccaccaggctcagcccacccctccacctctctctcgatttctctctctccccctcagcatcttcccgctgagagtggtggggaagagccttgtcttcttagctgtcacctgccgaggcttctgggccactcaggccagtgcacccctgggcagagccccttaaagctgctgtcactagatgcccatggtccagggcctggtgggcgtgagaggataggtggcagggcagaaactgggcagccctgacttgatagcagcagggggagctcccaagctgccaagcccctgcctccagccttcctgagtttctctctcctgaaccctactctctcctttttgcttcctcagtttttatcaggctttctctgggggacagcagtctctgagcaccagggagcagttgccctcaggcctgtgcccagcatgccctcccctttttatacgaatgttttctaccagtgtgcttgggtttgccatgatgcgaggctgagttgctgtagcgtcttgattctctccctgggtctgcgttccctcccctgggcctgactgagcctgctcattgtttttccctttattacacaggacagccaggggaggaggggggcccagccctgggaggctggtgggaggcagggggcaggcctgcggatgcatgaaataatgttggcattattttttaattttttaaaaaataaatggtatcttatttaattgtcctgttccttcccactccccgcctcctaggatgttagcccaagctcagggtaggcccagggggctgggagaaatgaagccacccatggggactggggaccaggggccttcagcatggcttctaggttccctcctccccctaccccatctcctacctccacagtacagactgtccccaacttaacagtggttcaacttaaaccatgtttcaactttacaattggtctgttggggtattaaatgaatttgtgacttaggatattttcatttatgatgggtttatcaggaagtaaccccatggtaagttgaggcatatctgtatatatttaaacctaattaattcttgagctgaaaataaataaaccaggatggcagggaccaacccctaatccctccccagcggcaagcccctcttttcagagtgggcagagggttgcctatggtgggcactaggaatgaggtcccctgcctcgatgcgggtcctaggagaaaaagtcctacttttctgggtccccaggtgcagcacctcccggagactgtttctcccatggcctcctgagtgatgggccctgcctccctgtgcctcatcctcaggctggttggagcagagggtgggcaggagccccagcacagactggggggtgctcacagcagggccaccttgatgcaggctggaatgttatccctggggtgtgcttggaccccacctgctttctttctctcctgcccctcccctactctcactgtaatttatggaccctgcccgcctgcgtgttgtgtgtatgtcctgtgccttttctcactattgtttgggtgtgggagggggtggtttttcactgaaaaggggggtacacctatagctttcttgataacagaatattctgtaaacctaatgatgataactaatgaccgttatcgcagtcaccctata

SEQ ID NO: 304129 - DNA, 5101 bp, Homo sapiens
cgcccgggcgcaacgcaaacatggcggcgggtggcacccgtcggtgaggcggtgccgggcgggggttgtcgggtgtcatgggcggtggcgacggcaccgcccccgcgtctccctgagcgggacggcagggggggcttctgcgctgagccgggcgatggacgacagcggcgagctgggtggtctggagaccatggagaccctcacggagctgggcgacgagctgaccctgggagacatcgacgagatgctgcaatttgtcagtaatcaagtgggagagttccctgacttgttttcagaacagctgtgtagctcctttcctggcagtggtggtagtggtagcagcagcggcagcagtggcagcagcagcagcagcagcaatggcaggggcagcagcagcggagctgtggacccttcagtgcaacggtcattcacccaggtcacattaccttccttctctccctcggcggcctccccacaggctccaactctgcaagtcaaggtttctcccacctcagttcccaccacacccagggcaactcctattcttcagccccgcccccagccccagcctcaacctcaaactcagctgcaacaacagacggtaatgatcacgccaacattcagcaccactccgcagacgaggatcatccagcagcctttgatataccagaatgcagctactagctttcaagtccttcagcctcaagtccaaagcctggtgacatcctcccaggtacagccggtcaccattcagcagcaggtgcagacagtacaggcccagcgggtgctgacacaaacggccaatggcacgctgcagacccttgccccggctacggtgcagacagttgctgcgccacaggtgcagcaggtcccggtcctggtccagcctcagatcatcaagacagattcccttgttttgaccacactgaagacagatggcagccctgttatggctgcggtccagaacccggccctcaccgccctcaccacccctatccagacggctgcccttcaagtaccaaccctggtgggcagcagtgggaccattctgaccacaatgcctgtaatgatggggcaagagaaagtgcccattaagcaggtacctgggggagtcaagcagcttgagccccccaaagaaggagaaaggcggacaacccataatatcattgagaaacgatatcgctcctccatcaatgacaaaatcatcgaattgaaagacctggtcatggggacagacgccaagatgcacaagtctggcgttctgaggaaggccattgattacatcaaatacttgcagcaggtcaatcataaactgcgccaggagaacatggtgctgaagctggcaaatcaaaagaacaagcttctaaagggcatcgacctaggcagtctggtggacaatgaggtggacctgaagatcgaggactttaatcagaatgtccttctgatgtcccccccagcctctgactcagggtcccaggctggcttctctccctactccattgactctgagccaggaagccctctattggatgatgcaaaggtcaaagatgagccagactctcctcctgtggcgctgggcatggtagaccgctcacggattcttctgtgtgtcctcaccttcctgtgcctctcctttaaccccctgacttccctgctgcagtggggaggggcccacgactctgaccagcacccacactcaggctctggccgcagtgtcctgtcattcgagtcaggttctgggggctggtttgactggatgatgcctactcttctcttatggctggtaaatggtgtgattgtcctgagcgtctttgtgaagctgctggttcatggggagccagtgatccggccacactcgcgctcctcggtcaccttctggaggcaccggaaacaggcagatctggatctcgccagaggagattttgcagctgctgccggcaacctacaaacctgcctggcagttttgggccgggcactgcccacctcccgcctggacctggcctgcagcctctcctggaacgtgatccgctacagcctgcagaagctacgcctggtgcgctggctgctcaagaaagtcttccagtgccggcgggccacgccagccactgaggcaggctttgaagacgaagctaagaccagcgcccgggatgcggctctggcctatcaccggctgcaccagctgcacatcacagggaagcttcctgcaggatccgcctgttccgatgtacacatggcgttgtgtgccgtgaacctggctgaatgtgcagaggagaagatcccaccgagcacactggttgagatccatctgactgctgccatggggctcaagacccggtgtggaggcaagctgggcttcctggccagctacttcctcagccgagcccagagcctgtgtggccccgagcacagtgctgttcctgactccctgcgctggctctgccaccccctgggccagaagtttttcatggagcggagctggtctgtgaagtcagctgccaaggagagtctatactgtgcccagaggaacccagctgaccccattgcgcaggtccaccaggccttctgcaagaacctgctggagcgagctatagagtccttggtgaaacctcaggccaagaagaaggctggagaccaggaagaagagagctgtgaattctccagtgctctggagtacttgaaattacttcattcttttgtggactctgtgggggttatgagccccccactctccaggagctccgtgctcaagtccgccctgggtccagacatcatctgtcggtggtggacgtctgcaatcactgtggccatcagctggctccagggagacgatgcagctgtgcgctctcattttaccaaagtggaacgcatccccaaggccctggaagtgacagagagccccctggtgaaggccatcttccatgcctgcagagccatgcatgcctcactccctgggaaagcagatgggcagcagagttccttctgccattgcgagagggccagtggccacctatggagcagcctcaacgtcagtggggccacctctgaccctgccctcaaccacgtggtccagctgctcacctgtgacctgctactgtcgctacggacagcgctctggcaaaaacaggccagtgccagccaggctgtgggggagacctaccacgcgtcaggcgctgaactggcgggcttccaacgggacctgggcagcctgcgcaggctggcacacagcttccgcccagcataccgcaaggtgttcctgcatgaagccaccgtgcgcctgatggcaggagccagccccacccgcacccaccagctgctggaacacagcctgcggcggcgcaccacgcagagcaccaagcacggagaggtggatgcctggcccggccagcgagagcgggccaccgccatcctgctggcctgccgccacctgcccctctccttcctctcctccccgggccagcgggcagtgctgctggccgaagctgcccgcaccctggagaaggtgggcgaccggcgctcctgcaacgactgccagcagatgattgttaagctgggtggtggcactgccattgccgcctcctgaccaccaggctcagcccacccctccacctctctctcgatttctctctctccccctcagcatcttcccgctgagagtggtggggaagagccttgtcttcttagctgtcacctgccgaggcttctgggccactcaggccagtgcacccctgggcagagccccttaaagctgctgtcactagatgcccatggtccagggcctggtgggcgtgagaggataggtggcagggcagaaactgggcagccctgacttgatagcagcagggggagctcccaagctgccaagcccctgcctccagccttcctgagtttctctctcctgaaccctactctctcctttttgcttcctcagtttttatcaggctttctctgggggacagcagtctctgagcaccagggagcagttgccctcaggcctgtgcccagcatgccctcccctttttatacgaatgttttctaccagtgtgcttgggtttgccatgatgcgaggctgagttgctgtagcgtcttgattctctccctgggtctgcgttccctcccctgggcctgactgagcctgctcattgtttttccctttattacacaggacagccaggggaggaggggggcccagccctgggaggctggtgggaggcagggggcaggcctgcggatgcatgaaataatgttggcattattttttaattttttaaaaaataaatggtatcttatttaattgtcctgttccttcccactccccgcctcctaggatgttagcccaagctcagggtaggcccagggggctgggagaaatgaagccacccatggggactggggaccaggggccttcagcatggcttctaggttccctcctccccctaccccatctcctacctccacagtacagactgtccccaacttaacagtggttcaacttaaaccatgtttcaactttacaattggtctgttggggtattaaatgaatttgtgacttaggatattttcatttatgatgggtttatcaggaagtaaccccatggtaagttgaggcatatctgtatatatttaaacctaattaattcttgagctgaaaataaataaaccaggatggcagggaccaacccctaatccctccccagcggcaagcccctcttttcagagtgggcagagggttgcctatggtgggcactaggaatgaggtcccctgcctcgatgcgggtcctaggagaaaaagtcctacttttctgggtccccaggtgctcacagcagggccaccttgatgcaggctggaatgttatccctggggtgtgcttggaccccacctgctttctttctctcctgcccctcccctactctcactgtaatttatggaccctgcccgcctgcgtgttgtgtgtatgtcctgtgccttttctcactattgtttgggtgtgggagggggtggtttttcactgaaaaggggggtacacctatagctttcttgatgttcaatcaatcagtcactgtgtcccagacatattcaataaacacagattggtaccaccca

SEQ ID NO: 304130 - DNA, 5121 bp, Homo sapiens
tccggagcttatgtggttcttgcagagttcgagctgtatggaggcgccgagggagagaaggaaggtaatgtgactgggtgaatgaccgttgcactgaagggtccacagctccgttgtagtgccctgcattgctgctgcagatgctgcaatttgtcagtaatcaagtgggagagttccctgacttgttttcagaacagctgtgtagctcctttcctggcagtggtggtagtggtagcagcagcggcagcagtggcagcagcagcagcagcagcaatggcaggggcagcagcagcggagctgtggacccttcagtgcaacggtcattcacccaggtcacattaccttccttctctccctcggcggcctccccacaggctccaactctgcaagtcaaggtttctcccacctcagttcccaccacacccagggcaactcctattcttcagccccgcccccagccccagcctcaacctcaaactcagctgcaacaacagacggtaatgatcacgccaacattcagcaccactccgcagacgaggatcatccagcagcctttgatataccagaatgcagctactagctttcaagtccttcagcctcaagtccaaagcctggtgacatcctcccaggtacagccggtcaccattcagcagcaggtgcagacagtacaggcccagcgggtgctgacacaaacggccaatggcacgctgcagacccttgccccggctacggtgcagacagttgctgcgccacaggtgcagcaggtcccggtcctggtccagcctcagatcatcaagacagattcccttgttttgaccacactgaagacagatggcagccctgttatggctgcggtccagaacccggccctcaccgccctcaccacccctatccagacggctgcccttcaagtaccaaccctggtgggcagcagtgggaccattctgaccacaatgcctgtaatgatggggcaagagaaagtgcccattaagcaggtacctgggggagtcaagcagcttgagccccccaaagaaggagaaaggcggacaacccataatatcattgagaaacgatatcgctcctccatcaatgacaaaatcatcgaattgaaagacctggtcatggggacagacgccaagatgcacaagtctggcgttctgaggaaggccattgattacatcaaatacttgcagcaggtcaatcataaactgcgccaggagaacatggtgctgaagctggcaaatcaaaagaacaagcttctaaagggcatcgacctaggcagtctggtggacaatgaggtggacctgaagatcgaggactttaatcagaatgtccttctgatgtcccccccagcctctgactcagggtcccaggctggcttctctccctactccattgactctgagccaggaagccctctattggatgatgcaaaggtcaaagatgagccagactctcctcctgtggcgctgggcatggtagaccgctcacggattcttctgtgtgtcctcaccttcctgtgcctctcctttaaccccctgacttccctgctgcagtggggaggggcccacgactctgaccagcacccacactcaggctctggccgcagtgtcctgtcattcgagtcaggttctgggggctggtttgactggatgatgcctactcttctcttatggctggtaaatggtgtgattgtcctgagcgtctttgtgaagctgctggttcatggggagccagtgatccggccacactcgcgctcctcggtcaccttctggaggcaccggaaacaggcagatctggatctcgccagaggagattttgcagctgctgccggcaacctacaaacctgcctggcagttttgggccgggcactgcccacctcccgcctggacctggcctgcagcctctcctggaacgtgatccgctacagcctgcagaagctacgcctggtgcgctggctgctcaagaaagtcttccagtgccggcgggccacgccagccactgaggcaggctttgaagacgaagctaagaccagcgcccgggatgcggctctggcctatcaccggctgcaccagctgcacatcacagggaagcttcctgcaggatccgcctgttccgatgtacacatggcgttgtgtgccgtgaacctggctgaatgtgcagaggagaagatcccaccgagcacactggttgagatccatctgactgctgccatggggctcaagacccggtgtggaggcaagctgggcttcctggccagctacttcctcagccgagcccagagcctgtgtggccccgagcacagtgctgttcctgactccctgcgctggctctgccaccccctgggccagaagtttttcatggagcggagctggtctgtgaagtcagctgccaaggagagtctatactgtgcccagaggaacccagctgaccccattgcgcaggtccaccaggccttctgcaagaacctgctggagcgagctatagagtccttggtgaaacctcaggccaagaagaaggctggagaccaggaagaagagagctgtgaattctccagtgctctggagtacttgaaattacttcattcttttgtggactctgtgggggttatgagccccccactctccaggagctccgtgctcaagtccgccctgggtccagacatcatctgtcggtggtggacgtctgcaatcactgtggccatcagctggctccagggagacgatgcagctgtgcgctctcattttaccaaagtggaacgcatccccaaggccctggaagtgacagagagccccctggtgaaggccatcttccatgcctgcagagccatgcatgcctcactccctgggaaagcagatgggcagcagagttccttctgccattgcgagagggccagtggccacctatggagcagcctcaacgtcagtggggccacctctgaccctgccctcaaccacgtggtccagctgctcacctgtgacctgctactgtcgctacggacagcgctctggcaaaaacaggccagtgccagccaggctgtgggggagacctaccacgcgtcaggcgctgaactggcgggcttccaacgggacctgggcagcctgcgcaggctggcacacagcttccgcccagcataccgcaaggtgttcctgcatgaagccaccgtgcgcctgatggcaggagccagccccacccgcacccaccagctgctggaacacagcctgcggcggcgcaccacgcagagcaccaagcacggagaggtggatgcctggcccggccagcgagagcgggccaccgccatcctgctggcctgccgccacctgcccctctccttcctctcctccccgggccagcgggcagtgctgctggccgaagctgcccgcaccctggagaaggtgggcgaccggcgctcctgcaacgactgccagcagatgattgttaagctgggtggtggcactgccattgccgcctcctgaccaccaggctcagcccacccctccacctctctctcgatttctctctctccccctcagcatcttcccgctgagagtggtggggaagagccttgtcttcttagctgtcacctgccgaggcttctgggccactcaggccagtgcacccctgggcagagccccttaaagctgctgtcactagatgcccatggtccagggcctggtgggcgtgagaggataggtggcagggcagaaactgggcagccctgacttgatagcagcagggggagctcccaagctgccaagcccctgcctccagccttcctgagtttctctctcctgaaccctactctctcctttttgcttcctcagtttttatcaggctttctctgggggacagcagtctctgagcaccagggagcagttgccctcaggcctgtgcccagcatgccctcccctttttatacgaatgttttctaccagtgtgcttgggtttgccatgatgcgaggctgagttgctgtagcgtcttgattctctccctgggtctgcgttccctcccctgggcctgactgagcctgctcattgtttttccctttattacacaggacagccaggggaggaggggggcccagccctgggaggctggtgggaggcagggggcaggcctgcggatgcatgaaataatgttggcattattttttaattttttaaaaaataaatggtatcttatttaattgtcctgttccttcccactccccgcctcctaggatgttagcccaagctcagggtaggcccagggggctgggagaaatgaagccacccatggggactggggaccaggggccttcagcatggcttctaggttccctcctccccctaccccatctcctacctccacagtacagactgtccccaacttaacagtggttcaacttaaaccatgtttcaactttacaattggtctgttggggtattaaatgaatttgtgacttaggatattttcatttatgatgggtttatcaggaagtaaccccatggtaagttgaggcatatctgtatatatttaaacctaattaattcttgagctgaaaataaataaaccaggatggcagggaccaacccctaatccctccccagcggcaagcccctcttttcagagtgggcagagggttgcctatggtgggcactaggaatgaggtcccctgcctcgatgcgggtcctaggagaaaaagtcctacttttctgggtccccaggtgcagcacctcccggagactgtttctcccatggcctcctgagtgatgggccctgcctccctgtgcctcatcctcaggctggttggagcagagggtgggcaggagccccagcacagactggggggtgctcacagcagggccaccttgatgcaggctggaatgttatccctggggtgtgcttggaccccacctgctttctttctctcctgcccctcccctactctcactgtaatttatggaccctgcccgcctgcgtgttgtgtgtatgtcctgtgccttttctcactattgtttgggtgtgggagggggtggtttttcactgaaaaggggggtacacctatagctttcttgatgttcaatcaatcagtcactgtgtcccagacatattcaataaacacagattggtaccaccca

SEQ ID NO: 304131 - DNA, 4688 bp, Homo sapiens
ctgtgctagtatttgatgtaatcaatggccttcctcagtaccccagacttgtgcatcttggcgtctgtccccatgaccaggtctttcaattcgatgattttgtcattgatggaggagcgatatcgtttctcaatgatattatgggttgtccgcctttctccttctttggggggctcaagctgcttgatcctcccaggtacagccggtcaccattcagcagcaggtgcagacagtacaggcccagcgggtgctgacacaaacggccaatggcacgctgcagacccttgccccggctacggtgcagacagttgctgcgccacaggtgcagcaggtcccggtcctggtccagcctcagatcatcaagacagattcccttgttttgaccacactgaagacagatggcagccctgttatggctgcggtccagaacccggccctcaccgccctcaccacccctatccagacggctgcccttcaagtaccaaccctggtgggcagcagtgggaccattctgaccacaatgcctgtaatgatggggcaagagaaagtgcccattaagcaggtacctgggggagtcaagcagcttgagccccccaaagaaggagaaaggcggacaacccataatatcattgagaaacgatatcgctcctccatcaatgacaaaatcatcgaattgaaagacctggtcatggggacagacgccaagatgcacaagtctggcgttctgaggaaggccattgattacatcaaatacttgcagcaggtcaatcataaactgcgccaggagaacatggtgctgaagctggcaaatcaaaagaacaagcttctaaagggcatcgacctaggcagtctggtggacaatgaggtggacctgaagatcgaggactttaatcagaatgtccttctgatgtcccccccagcctctgactcagggtcccaggctggcttctctccctactccattgactctgagccaggaagccctctattggatgatgcaaaggtcaaagatgagccagactctcctcctgtggcgctgggcatggtagaccgctcacggattcttctgtgtgtcctcaccttcctgtgcctctcctttaaccccctgacttccctgctgcagtggggaggggcccacgactctgaccagcacccacactcaggctctggccgcagtgtcctgtcattcgagtcaggttctgggggctggtttgactggatgatgcctactcttctcttatggctggtaaatggtgtgattgtcctgagcgtctttgtgaagctgctggttcatggggagccagtgatccggccacactcgcgctcctcggtcaccttctggaggcaccggaaacaggcagatctggatctcgccagaggagattttgcagctgctgccggcaacctacaaacctgcctggcagttttgggccgggcactgcccacctcccgcctggacctggcctgcagcctctcctggaacgtgatccgctacagcctgcagaagctacgcctggtgcgctggctgctcaagaaagtcttccagtgccggcgggccacgccagccactgaggcaggctttgaagacgaagctaagaccagcgcccgggatgcggctctggcctatcaccggctgcaccagctgcacatcacagggaagcttcctgcaggatccgcctgttccgatgtacacatggcgttgtgtgccgtgaacctggctgaatgtgcagaggagaagatcccaccgagcacactggttgagatccatctgactgctgccatggggctcaagacccggtgtggaggcaagctgggcttcctggccagctacttcctcagccgagcccagagcctgtgtggccccgagcacagtgctgttcctgactccctgcgctggctctgccaccccctgggccagaagtttttcatggagcggagctggtctgtgaagtcagctgccaaggagagtctatactgtgcccagaggaacccagctgaccccattgcgcaggtccaccaggccttctgcaagaacctgctggagcgagctatagagtccttggtgaaacctcaggccaagaagaaggctggagaccaggaagaagagagctgtgaattctccagtgctctggagtacttgaaattacttcattcttttgtggactctgtgggggttatgagccccccactctccaggagctccgtgctcaagtccgccctgggtccagacatcatctgtcggtggtggacgtctgcaatcactgtggccatcagctggctccagggagacgatgcagctgtgcgctctcattttaccaaagtggaacgcatccccaaggccctggaagtgacagagagccccctggtgaaggccatcttccatgcctgcagagccatgcatgcctcactccctgggaaagcagatgggcagcagagttccttctgccattgcgagagggccagtggccacctatggagcagcctcaacgtcagtggggccacctctgaccctgccctcaaccacgtggtccagctgctcacctgtgacctgctactgtcgctacggacagcgctctggcaaaaacaggccagtgccagccaggctgtgggggagacctaccacgcgtcaggcgctgaactggcgggcttccaacgggacctgggcagcctgcgcaggctggcacacagcttccgcccagcataccgcaaggtgttcctgcatgaagccaccgtgcgcctgatggcaggagccagccccacccgcacccaccagctgctggaacacagcctgcggcggcgcaccacgcagagcaccaagcacggagaggtggatgcctggcccggccagcgagagcgggccaccgccatcctgctggcctgccgccacctgcccctctccttcctctcctccccgggccagcgggcagtgctgctggccgaagctgcccgcaccctggagaaggtgggcgaccggcgctcctgcaacgactgccagcagatgattgttaagctgggtggtggcactgccattgccgcctcctgaccaccaggctcagcccacccctccacctctctctcgatttctctctctccccctcagcatcttcccgctgagagtggtggggaagagccttgtcttcttagctgtcacctgccgaggcttctgggccactcaggccagtgcacccctgggcagagccccttaaagctgctgtcactagatgcccatggtccagggcctggtgggcgtgagaggataggtggcagggcagaaactgggcagccctgacttgatagcagcagggggagctcccaagctgccaagcccctgcctccagccttcctgagtttctctctcctgaaccctactctctcctttttgcttcctcagtttttatcaggctttctctgggggacagcagtctctgagcaccagggagcagttgccctcaggcctgtgcccagcatgccctcccctttttatacgaatgttttctaccagtgtgcttgggtttgccatgatgcgaggctgagttgctgtagcgtcttgattctctccctgggtctgcgttccctcccctgggcctgactgagcctgctcattgtttttccctttattacacaggacagccaggggaggaggggggcccagccctgggaggctggtgggaggcagggggcaggcctgcggatgcatgaaataatgttggcattattttttaattttttaaaaaataaatggtatcttatttaattgtcctgttccttcccactccccgcctcctaggatgttagcccaagctcagggtaggcccagggggctgggagaaatgaagccacccatggggactggggaccaggggccttcagcatggcttctaggttccctcctccccctaccccatctcctacctccacagtacagactgtccccaacttaacagtggttcaacttaaaccatgtttcaactttacaattggtctgttggggtattaaatgaatttgtgacttaggatattttcatttatgatgggtttatcaggaagtaaccccatggtaagttgaggcatatctgtatatatttaaacctaattaattcttgagctgaaaataaataaaccaggatggcagggaccaacccctaatccctccccagcggcaagcccctcttttcagagtgggcagagggttgcctatggtgggcactaggaatgaggtcccctgcctcgatgcgggtcctaggagaaaaagtcctacttttctgggtccccaggtgcagcacctcccggagactgtttctcccatggcctcctgagtgatgggccctgcctccctgtgcctcatcctcaggctggttggagcagagggtgggcaggagccccagcacagactggggggtgctcacagcagggccaccttgatgcaggctggaatgttatccctggggtgtgcttggaccccacctgctttctttctctcctgcccctcccctactctcactgtaatttatggaccctgcccgcctgcgtgttgtgtgtatgtcctgtgccttttctcactattgtttgggtgtgggagggggtggtttttcactgaaaaggggggtacacctatagctttcttgatgttcaatcaatcagtcactgtgtcccagacatattcaataaacacagattggtaccaccca

SEQ ID NO: 304132 - DNA, 4894 bp, Homo sapiens
  misc_feature (94)..(94): n is a, c, g, or t
tcccaagttagtcgggacgatgaggggatatgaaggagaagcaggcatcagaggagatgaggaggaagtaggcattgtcaccaatgactcctanatcaggaatctgaacgcagaaggccagcgatttgatggagggagtcacacccaaagcctcagtgcaaattctcttagcagtgccccctgctgtgccttggcaatcgtaaataaatcagatgtgaacgcaccacacaccctcacatatctgagttgcttactttggccaccccagccttcaactagttcccttaacccatcctctgcagagcccactccctctcatataaacacagaatgcacctaaatcaacttcatgtctcctgggtccttcagcctcaagtccaaagcctggtgacatcctcccaggtacagccggtcaccattcagcagcaggtgcagacagtacaggcccagcgggtgctgacacaaacggccaatggcacgctgcagacccttgccccggctacggtgcagacagttgctgcgccacaggtgcagcaggtcccggtcctggtccagcctcagatcatcaagacagattcccttgttttgaccacactgaagacagatggcagccctgttatggctgcggtccagaacccggccctcaccgccctcaccacccctatccagacggctgcccttcaagtaccaaccctggtgggcagcagtgggaccattctgaccacaatgcctgtaatgatggggcaagagaaagtgcccattaagcaggtacctgggggagtcaagcagcttgagccccccaaagaaggagaaaggcggacaacccataatatcattgagaaacgatatcgctcctccatcaatgacaaaatcatcgaattgaaagacctggtcatggggacagacgccaagatgcacaagtctggcgttctgaggaaggccattgattacatcaaatacttgcagcaggtcaatcataaactgcgccaggagaacatggtgctgaagctggcaaatcaaaagaacaagcttctaaagggcatcgacctaggcagtctggtggacaatgaggtggacctgaagatcgaggactttaatcagaatgtccttctgatgtcccccccagcctctgactcagggtcccaggctggcttctctccctactccattgactctgagccaggaagccctctattggatgatgcaaaggtcaaagatgagccagactctcctcctgtggcgctgggcatggtagaccgctcacggattcttctgtgtgtcctcaccttcctgtgcctctcctttaaccccctgacttccctgctgcagtggggaggggcccacgactctgaccagcacccacactcaggctctggccgcagtgtcctgtcattcgagtcaggttctgggggctggtttgactggatgatgcctactcttctcttatggctggtaaatggtgtgattgtcctgagcgtctttgtgaagctgctggttcatggggagccagtgatccggccacactcgcgctcctcggtcaccttctggaggcaccggaaacaggcagatctggatctcgccagaggagattttgcagctgctgccggcaacctacaaacctgcctggcagttttgggccgggcactgcccacctcccgcctggacctggcctgcagcctctcctggaacgtgatccgctacagcctgcagaagctacgcctggtgcgctggctgctcaagaaagtcttccagtgccggcgggccacgccagccactgaggcaggctttgaagacgaagctaagaccagcgcccgggatgcggctctggcctatcaccggctgcaccagctgcacatcacagggaagcttcctgcaggatccgcctgttccgatgtacacatggcgttgtgtgccgtgaacctggctgaatgtgcagaggagaagatcccaccgagcacactggttgagatccatctgactgctgccatggggctcaagacccggtgtggaggcaagctgggcttcctggccagctacttcctcagccgagcccagagcctgtgtggccccgagcacagtgctgttcctgactccctgcgctggctctgccaccccctgggccagaagtttttcatggagcggagctggtctgtgaagtcagctgccaaggagagtctatactgtgcccagaggaacccagctgaccccattgcgcaggtccaccaggccttctgcaagaacctgctggagcgagctatagagtccttggtgaaacctcaggccaagaagaaggctggagaccaggaagaagagagctgtgaattctccagtgctctggagtacttgaaattacttcattcttttgtggactctgtgggggttatgagccccccactctccaggagctccgtgctcaagtccgccctgggtccagacatcatctgtcggtggtggacgtctgcaatcactgtggccatcagctggctccagggagacgatgcagctgtgcgctctcattttaccaaagtggaacgcatccccaaggccctggaagtgacagagagccccctggtgaaggccatcttccatgcctgcagagccatgcatgcctcactccctgggaaagcagatgggcagcagagttccttctgccattgcgagagggccagtggccacctatggagcagcctcaacgtcagtggggccacctctgaccctgccctcaaccacgtggtccagctgctcacctgtgacctgctactgtcgctacggacagcgctctggcaaaaacaggccagtgccagccaggctgtgggggagacctaccacgcgtcaggcgctgaactggcgggcttccaacgggacctgggcagcctgcgcaggctggcacacagcttccgcccagcataccgcaaggtgttcctgcatgaagccaccgtgcgcctgatggcaggagccagccccacccgcacccaccagctgctggaacacagcctgcggcggcgcaccacgcagagcaccaagcacggagaggtggatgcctggcccggccagcgagagcgggccaccgccatcctgctggcctgccgccacctgcccctctccttcctctcctccccgggccagcgggcagtgctgctggccgaagctgcccgcaccctggagaaggtgggcgaccggcgctcctgcaacgactgccagcagatgattgttaagctgggtggtggcactgccattgccgcctcctgaccaccaggctcagcccacccctccacctctctctcgatttctctctctccccctcagcatcttcccgctgagagtggtggggaagagccttgtcttcttagctgtcacctgccgaggcttctgggccactcaggccagtgcacccctgggcagagccccttaaagctgctgtcactagatgcccatggtccagggcctggtgggcgtgagaggataggtggcagggcagaaactgggcagccctgacttgatagcagcagggggagctcccaagctgccaagcccctgcctccagccttcctgagtttctctctcctgaaccctactctctcctttttgcttcctcagtttttatcaggctttctctgggggacagcagtctctgagcaccagggagcagttgccctcaggcctgtgcccagcatgccctcccctttttatacgaatgttttctaccagtgtgcttgggtttgccatgatgcgaggctgagttgctgtagcgtcttgattctctccctgggtctgcgttccctcccctgggcctgactgagcctgctcattgtttttccctttattacacaggacagccaggggaggaggggggcccagccctgggaggctggtgggaggcagggggcaggcctgcggatgcatgaaataatgttggcattattttttaattttttaaaaaataaatggtatcttatttaattgtcctgttccttcccactccccgcctcctaggatgttagcccaagctcagggtaggcccagggggctgggagaaatgaagccacccatggggactggggaccaggggccttcagcatggcttctaggttccctcctccccctaccccatctcctacctccacagtacagactgtccccaacttaacagtggttcaacttaaaccatgtttcaactttacaattggtctgttggggtattaaatgaatttgtgacttaggatattttcatttatgatgggtttatcaggaagtaaccccatggtaagttgaggcatatctgtatatatttaaacctaattaattcttgagctgaaaataaataaaccaggatggcagggaccaacccctaatccctccccagcggcaagcccctcttttcagagtgggcagagggttgcctatggtgggcactaggaatgaggtcccctgcctcgatgcgggtcctaggagaaaaagtcctacttttctgggtccccaggtgcagcacctcccggagactgtttctcccatggcctcctgagtgatgggccctgcctccctgtgcctcatcctcaggctggttggagcagagggtgggcaggagccccagcacagactggggggtgctcacagcagggccaccttgatgcaggctggaatgttatccctggggtgtgcttggaccccacctgctttctttctctcctgcccctcccctactctcactgtaatttatggaccctgcccgcctgcgtgttgtgtgtatgtcctgtgccttttctcactattgtttgggtgtgggagggggtggtttttcactgaaaaggggggtacacctatagctttcttgatgttcaatcaatcagtcactgtgtcccagacatattcaataaacacagattggtaccaccca

SEQ ID NO: 304133 - DNA, 5325 bp, Homo sapiens
cgcccgggcgcaacgcaaacatggcggcgggtggcacccgtcggtgaggcggtgccgggcgggggttgtcgggtgtcatgggcggtggcgacggcaccgcccccgcgtctccctgagcgggacggcagggggggcttctgcgctgagccgggcgatggacgacagcggcgagctgggtggtctggagaccatggagaccctcacggagctgggcgacgagctgaccctgggagacatcgacgagatgctgcaatttgtcagtaatcaagtgggagagttccctgacttgttttcagaacagctgtgtagctcctttcctggcagtggtggtagtggtagcagcagcggcagcagtggcagcagcagcagcagcagcaatggcaggggcagcagcagcggagctgtggacccttcagtgcaacggtcattcacccaggtcacattaccttccttctctccctcggcggcctccccacaggctccaactctgcaagtcaaggtttctcccacctcagttcccaccacacccagggcaactcctattcttcagccccgcccccagccccagcctcaacctcaaactcagctgcaacaacagacggtaatgatcacgccaacattcagcaccactccgcagacgaggatcatccagcagcctttgatataccagaatgcagctactagctttcaagtccttcagcctcaagtccaaagcctggtgacatcctcccaggtacagccggtcaccattcagcagcaggtgcagacagtacaggcccagcgggtgctgacacaaacggccaatggcacgctgcagacccttgccccggctacggtgcagacagttgctgcgccacaggtgcagcaggtcccggtcctggtccagcctcagatcatcaagacagattcccttgttttgaccacactgaagacagatggcagccctgttatggctgcggtccagaacccggccctcaccgccctcaccacccctatccagacggctgcccttcaagtaccaaccctggtgggcagcagtgggaccattctgaccacaatgcctgtaatgatggggcaagagaaagtgcccattaagcaggtacctgggggagtcaagcagcttgagccccccaaagaaggagaaaggcggacaacccataatatcattgagaaacgatatcgctcctccatcaatgacaaaatcatcgaattgaaagacctggtcatggggacagacgccaagatgcacaagtctggcgttctgaggaaggccattgattacatcaaatacttgcagcaggtcaatcataaactgcgccaggagaacatggtgctgaagctggcaaatcaaaagaacaagcttctaaagggcatcgacctaggcagtctggtggacaatgaggtggacctgaagatcgaggactttaatcagaatgtccttctgatgtcccccccagcctctgactcagggtcccaggctggcttctctccctactccattgactctgagccaggaagccctctattggatgatgcaaaggtcaaagatgagccagactctcctcctgtggcgctgggcatggtagaccgctcacggattcttctgtgtgtcctcaccttcctgtgcctctcctttaaccccctgacttccctgctgcagtggggaggggcccacgactctgaccagcacccacactcaggctctggccgcagtgtcctgtcattcgagtcaggttctgggggctggtttgactggatgatgcctactcttctcttatggctggtaaatggtgtgattgtcctgagcgtctttgtgaagctgctggttcatggggagccagtgatccggccacactcgcgctcctcggtcaccttctggaggcaccggaaacaggcagatctggatctcgccagaggagtttacggaaaaaaatctggggcaactcacagcattgaggaagagttaaacatccacatttcaagaggaacaagaaccagaacactcctcagcagcaggagattttgcagctgctgccggcaacctacaaacctgcctggcagttttgggccgggcactgcccacctcccgcctggacctggcctgcagcctctcctggaacgtgatccgctacagcctgcagaagctacgcctggtgcgctggctgctcaagaaagtcttccagtgccggcgggccacgccagccactgaggcaggctttgaagacgaagctaagaccagcgcccgggatgcggctctggcctatcaccggctgcaccagctgcacatcacagggaagcttcctgcaggatccgcctgttccgatgtacacatggcgttgtgtgccgtgaacctggctgaatgtgcagaggagaagatcccaccgagcacactggttgagatccatctgactgctgccatggggctcaagacccggtgtggaggcaagctgggcttcctggccagctacttcctcagccgagcccagagcctgtgtggccccgagcacagtgctgttcctgactccctgcgctggctctgccaccccctgggccagaagtttttcatggagcggagctggtctgtgaagtcagctgccaaggagagtctatactgtgcccagaggaacccagctgaccccattgcgcaggtccaccaggccttctgcaagaacctgctggagcgagctatagagtccttggtgaaacctcaggccaagaagaaggctggagaccaggaagaagagagctgtgaattctccagtgctctggagtacttgaaattacttcattcttttgtggactctgtgggggttatgagccccccactctccaggagctccgtgctcaagtccgccctgggtccagacatcatctgtcggtggtggacgtctgcaatcactgtggccatcagctggctccagggagacgatgcagctgtgcgctctcattttaccaaagtggaacgcatccccaaggccctggaagtgacagagagccccctggtgaaggccatcttccatgcctgcagagccatgcatgcctcactccctgggaaagcagatgggcagcagagttccttctgccattgcgagagggccagtggccacctatggagcagcctcaacgtcagtggggccacctctgaccctgccctcaaccacgtggtccagctgctcacctgtgacctgctactgtcgctacggacagcgctctggcaaaaacaggccagtgccagccaggctgtgggggagacctaccacgcgtcaggcgctgaactggcgggcttccaacgggacctgggcagcctgcgcaggctggcacacagcttccgcccagcataccgcaaggtgttcctgcatgaagccaccgtgcgcctgatggcaggagccagccccacccgcacccaccagctgctggaacacagcctgcggcggcgcaccacgcagagcaccaagcacggagaggtggatgcctggcccggccagcgagagcgggccaccgccatcctgctggcctgccgccacctgcccctctccttcctctcctccccgggccagcgggcagtgctgctggccgaagctgcccgcaccctggagaaggtgggcgaccggcgctcctgcaacgactgccagcagatgattgttaagctgggtggtggcactgccattgccgcctcctgaccaccaggctcagcccacccctccacctctctctcgatttctctctctccccctcagcatcttcccgctgagagtggtggggaagagccttgtcttcttagctgtcacctgccgaggcttctgggccactcaggccagtgcacccctgggcagagccccttaaagctgctgtcactagatgcccatggtccagggcctggtgggcgtgagaggataggtggcagggcagaaactgggcagccctgacttgatagcagcagggggagctcccaagctgccaagcccctgcctccagccttcctgagtttctctctcctgaaccctactctctcctttttgcttcctcagtttttatcaggctttctctgggggacagcagtctctgagcaccagggagcagttgccctcaggcctgtgcccagcatgccctcccctttttatacgaatgttttctaccagtgtgcttgggtttgccatgatgcgaggctgagttgctgtagcgtcttgattctctccctgggtctgcgttccctcccctgggcctgactgagcctgctcattgtttttccctttattacacaggacagccaggggaggaggggggcccagccctgggaggctggtgggaggcagggggcaggcctgcggatgcatgaaataatgttggcattattttttaattttttaaaaaataaatggtatcttatttaattgtcctgttccttcccactccccgcctcctaggatgttagcccaagctcagggtaggcccagggggctgggagaaatgaagccacccatggggactggggaccaggggccttcagcatggcttctaggttccctcctccccctaccccatctcctacctccacagtacagactgtccccaacttaacagtggttcaacttaaaccatgtttcaactttacaattggtctgttggggtattaaatgaatttgtgacttaggatattttcatttatgatgggtttatcaggaagtaaccccatggtaagttgaggcatatctgtatatatttaaacctaattaattcttgagctgaaaataaataaaccaggatggcagggaccaacccctaatccctccccagcggcaagcccctcttttcagagtgggcagagggttgcctatggtgggcactaggaatgaggtcccctgcctcgatgcgggtcctaggagaaaaagtcctacttttctgggtccccaggtgcagcacctcccggagactgtttctcccatggcctcctgagtgatgggccctgcctccctgtgcctcatcctcaggctggttggagcagagggtgggcaggagccccagcacagactggggggtgctcacagcagggccaccttgatgcaggctggaatgttatccctggggtgtgcttggaccccacctgctttctttctctcctgcccctcccctactctcactgtaatttatggaccctgcccgcctgcgtgttgtgtgtatgtcctgtgccttttctcactattgtttgggtgtgggagggggtggtttttcactgaaaaggggggtacacctatagctttcttgatgttcaatcaatcagtcactgtgtcccagacatattcaataaacacagattggtaccaccca

SEQ ID NO: 304134 - DNA, 5316 bp, Homo sapiens
cgcccgggcgcaacgcaaacatggcggcgggtggcacccgtcggtgaggcggtgccgggcgggggttgtcgggtgtcatgggcggtggcgacggcaccgcccccgcgtctccctgagcgggacggcagggggggcttctgcgctgagccgggcgatggacgacagcggcgagctgggtggtctggagaccatggagaccctcacggagctgggcgacgagctgaccctgggagacatcgacgagatgctgcaatttgtcagtaatcaagtgggagagttccctgacttgttttcagaacagctgtgtagctcctttcctggcagtggtggtagtggtagcagcagcggcagcagtggcagcagcagcagcagcagcaatggcaggggcagcagcagcggagctgtggacccttcagtgcaacggtcattcacccaggtcacattaccttccttctctccctcggcggcctccccacaggctccaactctgcaagtcaaggtttctcccacctcagttcccaccacacccagggcaactcctattcttcagccccgcccccagccccagcctcaacctcaaactcagctgcaacaacagacggtaatgatcacgccaacattcagcaccactccgcagacgaggatcatccagcagcctttgatataccagaatgcagctactagctttcaagtccttcagcctcaagtccaaagcctggtgacatcctcccaggtacagccggtcaccattcagcagcaggtgcagacagtacaggcccagcgggtgctgacacaaacggccaatggcacgctgcagacccttgccccggctacggtgcagacagttgctgcgccacaggtgcagcaggtcccggtcctggtccagcctcagatcatcaagacagattcccttgttttgaccacactgaagacagatggcagccctgttatggctgcggtccagaacccggccctcaccgccctcaccacccctatccagacggctgcccttcaagtaccaaccctggtgggcagcagtgggaccattctgaccacaatgcctgtaatgatggggcaagagaaagtgcccattaagcaggtacctgggggagtcaagcagcttgagccccccaaagaaggagaaaggcggacaacccataatatcattgagaaacgatatcgctcctccatcaatgacaaaatcatcgaattgaaagacctggtcatggggacagacgccaagatgcacaagtctggcgttctgaggaaggccattgattacatcaaatacttgcagcaggtcaatcataaactgcgccaggagaacatggtgctgaagctggcaaatcaaaagaacagtaagtgtgctgagaaaaggcttgtcagccctggcccaggtggggctttgtaaaagcagatcattttcaccaggtggggttttctttgcagagcttctaaagggcatcgacctaggcagtctggtggacaatgaggtggacctgaagatcgaggactttaatcagaatgtccttctgatgtcccccccagcctctgactcagggtcccaggctggcttctctccctactccattgactctgagccaggaagccctctattggatgatgcaaaggtcaaagatgagccagactctcctcctgtggcgctgggcatggtagaccgctcacggattcttctgtgtgtcctcaccttcctgtgcctctcctttaaccccctgacttccctgctgcagtggggaggggcccacgactctgaccagcacccacactcaggctctggccgcagtgtcctgtcattcgagtcaggttctgggggctggtttgactggatgatgcctactcttctcttatggctggtaaatggtgtgattgtcctgagcgtctttgtgaagctgctggttcatggggagccagtgatccggccacactcgcgctcctcggtcaccttctggaggcaccggaaacaggcagatctggatctcgccagaggagattttgcagctgctgccggcaacctacaaacctgcctggcagttttgggccgggcactgcccacctcccgcctggacctggcctgcagcctctcctggaacgtgatccgctacagcctgcagaagctacgcctggtgcgctggctgctcaagaaagtcttccagtgccggcgggccacgccagccactgaggcaggctttgaagacgaagctaagaccagcgcccgggatgcggctctggcctatcaccggctgcaccagctgcacatcacagggaagcttcctgcaggatccgcctgttccgatgtacacatggcgttgtgtgccgtgaacctggctgaatgtgcagaggagaagatcccaccgagcacactggttgagatccatctgactgctgccatggggctcaagacccggtgtggaggcaagctgggcttcctggccagctacttcctcagccgagcccagagcctgtgtggccccgagcacagtgctgttcctgactccctgcgctggctctgccaccccctgggccagaagtttttcatggagcggagctggtctgtgaagtcagctgccaaggagagtctatactgtgcccagaggaacccagctgaccccattgcgcaggtccaccaggccttctgcaagaacctgctggagcgagctatagagtccttggtgaaacctcaggccaagaagaaggctggagaccaggaagaagagagctgtgaattctccagtgctctggagtacttgaaattacttcattcttttgtggactctgtgggggttatgagccccccactctccaggagctccgtgctcaagtccgccctgggtccagacatcatctgtcggtggtggacgtctgcaatcactgtggccatcagctggctccagggagacgatgcagctgtgcgctctcattttaccaaagtggaacgcatccccaaggccctggaagtgacagagagccccctggtgaaggccatcttccatgcctgcagagccatgcatgcctcactccctgggaaagcagatgggcagcagagttccttctgccattgcgagagggccagtggccacctatggagcagcctcaacgtcagtggggccacctctgaccctgccctcaaccacgtggtccagctgctcacctgtgacctgctactgtcgctacggacagcgctctggcaaaaacaggccagtgccagccaggctgtgggggagacctaccacgcgtcaggcgctgaactggcgggcttccaacgggacctgggcagcctgcgcaggctggcacacagcttccgcccagcataccgcaaggtgttcctgcatgaagccaccgtgcgcctgatggcaggagccagccccacccgcacccaccagctgctggaacacagcctgcggcggcgcaccacgcagagcaccaagcacggagaggtggatgcctggcccggccagcgagagcgggccaccgccatcctgctggcctgccgccacctgcccctctccttcctctcctccccgggccagcgggcagtgctgctggccgaagctgcccgcaccctggagaaggtgggcgaccggcgctcctgcaacgactgccagcagatgattgttaagctgggtggtggcactgccattgccgcctcctgaccaccaggctcagcccacccctccacctctctctcgatttctctctctccccctcagcatcttcccgctgagagtggtggggaagagccttgtcttcttagctgtcacctgccgaggcttctgggccactcaggccagtgcacccctgggcagagccccttaaagctgctgtcactagatgcccatggtccagggcctggtgggcgtgagaggataggtggcagggcagaaactgggcagccctgacttgatagcagcagggggagctcccaagctgccaagcccctgcctccagccttcctgagtttctctctcctgaaccctactctctcctttttgcttcctcagtttttatcaggctttctctgggggacagcagtctctgagcaccagggagcagttgccctcaggcctgtgcccagcatgccctcccctttttatacgaatgttttctaccagtgtgcttgggtttgccatgatgcgaggctgagttgctgtagcgtcttgattctctccctgggtctgcgttccctcccctgggcctgactgagcctgctcattgtttttccctttattacacaggacagccaggggaggaggggggcccagccctgggaggctggtgggaggcagggggcaggcctgcggatgcatgaaataatgttggcattattttttaattttttaaaaaataaatggtatcttatttaattgtcctgttccttcccactccccgcctcctaggatgttagcccaagctcagggtaggcccagggggctgggagaaatgaagccacccatggggactggggaccaggggccttcagcatggcttctaggttccctcctccccctaccccatctcctacctccacagtacagactgtccccaacttaacagtggttcaacttaaaccatgtttcaactttacaattggtctgttggggtattaaatgaatttgtgacttaggatattttcatttatgatgggtttatcaggaagtaaccccatggtaagttgaggcatatctgtatatatttaaacctaattaattcttgagctgaaaataaataaaccaggatggcagggaccaacccctaatccctccccagcggcaagcccctcttttcagagtgggcagagggttgcctatggtgggcactaggaatgaggtcccctgcctcgatgcgggtcctaggagaaaaagtcctacttttctgggtccccaggtgcagcacctcccggagactgtttctcccatggcctcctgagtgatgggccctgcctccctgtgcctcatcctcaggctggttggagcagagggtgggcaggagccccagcacagactggggggtgctcacagcagggccaccttgatgcaggctggaatgttatccctggggtgtgcttggaccccacctgctttctttctctcctgcccctcccctactctcactgtaatttatggaccctgcccgcctgcgtgttgtgtgtatgtcctgtgccttttctcactattgtttgggtgtgggagggggtggtttttcactgaaaaggggggtacacctatagctttcttgatgttcaatcaatcagtcactgtgtcccagacatattcaataaacacagattggtaccaccca

SEQ ID NO: 304135 - DNA, 5200 bp, Homo sapiens
cgcccgggcgcaacgcaaacatggcggcgggtggcacccgtcggtgaggcggtgccgggcgggggttgtcgggtgtcatgggcggtggcgacggcaccgcccccgcgtctccctgagcgggacggcagggggggcttctgcgctgagccgggcgatggacgacagcggcgagctgggtggtctggagaccatggagaccctcacggagctgggcgacgagctgaccctgggagacatcgacgagatgctgcaatttgtcagtaatcaagtgggagagttccctgacttgttttcagaacagctgtgtagctcctttcctggcagtggtggtagtggtagcagcagcggcagcagtggcagcagcagcagcagcagcaatggcaggggcagcagcagcggagctgtggacccttcagtgcaacggtcattcacccaggtcacattaccttccttctctccctcggcggcctccccacaggctccaactctgcaagtcaaggtttctcccacctcagttcccaccacacccagggcaactcctattcttcagccccgcccccagccccagcctcaacctcaaactcagctgcaacaacagacggtaatgatcacgccaacattcagcaccactccgcagacgaggatcatccagcagcctttgatataccagaatgcagctactagctttcaagtccttcagcctcaagtccaaagcctggtgacatcctcccaggtacagccggtcaccattcagcagcaggtgcagacagtacaggcccagcgggtgctgacacaaacggccaatggcacgctgcagacccttgccccggctacggtgcagacagttgctgcgccacaggtgcagcaggtcccggtcctggtccagcctcagatcatcaagacagattcccttgttttgaccacactgaagacagatggcagccctgttatggctgcggtccagaacccggccctcaccgccctcaccacccctatccagacggctgcccttcaagtaccaaccctggtgggcagcagtgggaccattctgaccacaatgcctgtaatgatggggcaagagaaagtgcccattaagcaggtacctgggggagtcaagcagcttgagccccccaaagaaggagaaaggcggacaacccataatatcattgagaaacgatatcgctcctccatcaatgacaaaatcatcgaattgaaagacctggtcatggggacagacgccaagatgcacaagtctggcgttctgaggaaggccattgattacatcaaatacttgcagcaggtcaatcataaactgcgccaggagaacatggtgctgaagctggcaaatcaaaagaacaagcttctaaagggcatcgacctaggcagtctggtggacaatgaggtggacctgaagatcgaggactttaatcagaatgtccttctgatgtcccccccagcctctgactcagggtcccaggctggcttctctccctactccattgactctgagccaggaagccctctattggatgatgcaaaggtcaaagatgagccagactctcctcctgtggcgctgggcatggtagaccgctcacggattcttctgtgtgtcctcaccttcctgtgcctctcctttaaccccctgacttccctgctgcagtggggaggggcccacgactctgaccagcacccacactcaggctctggccgcagtgtcctgtcattcgagtcaggttctgggggctggtttgactggatgatgcctactcttctcttatggctggtaaatggtgtgattgtcctgagcgtctttgtgaagctgctggttcatggggagccagtgatccggccacactcgcgctcctcggtcaccttctggaggcaccggaaacaggcagatctggatctcgccagaggagattttgcagctgctgccggcaacctacaaacctgcctggcagttttgggccgggcactgcccacctcccgcctggacctggcctgcagcctctcctggaacgtgatccgctacagcctgcagaagctacgcctggtgcgctggctgctcaagaaagtcttccagtgccggcgggccacgccagccactgaggcaggctttgaagacgaagctaagaccagcgcccgggatgcggctctggcctatcaccggctgcaccagctgcacatcacagggaagcttcctgcaggatccgcctgttccgatgtacacatggcgttgtgtgccgtgaacctggctgaatgtgcagaggagaagatcccaccgagcacactggttgagatccatctgactgctgccatggggctcaagacccggtgtggaggcaagctgggcttcctggccagctacttcctcagccgagcccagagcctgtgtggccccgagcacagtgctgttcctgactccctgcgctggctctgccaccccctgggccagaagtttttcatggagcggagctggtctgtgaagtcagctgccaaggagagtctatactgtgcccagaggaacccagctgaccccattgcgcaggtccaccaggccttctgcaagaacctgctggagcgagctatagagtccttggtgaaacctcaggccaagaagaaggctggagaccaggaagaagagagctgtgaattctccagtgctctggagtacttgaaattacttcattcttttgtggactctgtgggggttatgagccccccactctccaggagctccgtgctcaagtccgccctgggtccagacatcatctgtcggtggtggacgtctgcaatcactgtggccatcagctggctccagggagacgatgcagctgtgcgctctcattttaccaaagtggaacgcatccccaaggccctggaagtgacagagagccccctggtgaaggccatcttccatgcctgcagagccatgcatgcctcactccctgggaaagcagatgggcagcagagttccttctgccattgcgagagggccagtggccacctatggagcagcctcaacgtcagtggggccacctctgaccctgccctcaaccacgtggtccagctgctcacctgtgacctgctactgtcgctacggacagcgctctggcaaaaacaggccagtgccagccaggctgtgggggagacctaccacgcgtcaggcgctgaactggcgggcttccaacgggacctgggcagcctgcgcaggctggcacacagcttccgcccagcataccgcaaggtgttcctgcatgaagccaccgtgcgcctgatggcaggagccagccccacccgcacccaccagctgctggaacacagcctgcggcggcgcaccacgcagagcaccaagcacggagaggtggatgcctggcccggccagcgagagcgggccaccgccatcctgctggcctgccgccacctgcccctctccttcctctcctccccgaagctgcccgcaccctggagaaggtgggcgaccggcgctcctgcaacgactgccagcagatgattgttaagctgggtggtggcactgccattgccgcctcctgaccaccaggctcagcccacccctccacctctctctcgatttctctctctccccctcagcatcttcccgctgagagtggtggggaagagccttgtcttcttagctgtcacctgccgaggcttctgggccactcaggccagtgcacccctgggcagagccccttaaagctgctgtcactagatgcccatggtccagggcctggtgggcgtgagaggataggtggcagggcagaaactgggcagccctgacttgatagcagcagggggagctcccaagctgccaagcccctgcctccagccttcctgagtttctctctcctgaaccctactctctcctttttgcttcctcagtttttatcaggctttctctgggggacagcagtctctgagcaccagggagcagttgccctcaggcctgtgcccagcatgccctcccctttttatacgaatgttttctaccagtgtgcttgggtttgccatgatgcgaggctgagttgctgtagcgtcttgattctctccctgggtctgcgttccctcccctgggcctgactgagcctgctcattgtttttccctttattacacaggacagccaggggaggaggggggcccagccctgggaggctggtgggaggcagggggcaggcctgcggatgcatgaaataatgttggcattattttttaattttttaaaaaataaatggtatcttatttaattgtcctgttccttcccactccccgcctcctaggatgttagcccaagctcagggtaggcccagggggctgggagaaatgaagccacccatggggactggggaccaggggccttcagcatggcttctaggttccctcctccccctaccccatctcctacctccacagtacagactgtccccaacttaacagtggttcaacttaaaccatgtttcaactttacaattggtctgttggggtattaaatgaatttgtgacttaggatattttcatttatgatgggtttatcaggaagtaaccccatggtaagttgaggcatatctgtatatatttaaacctaattaattcttgagctgaaaataaataaaccaggatggcagggaccaacccctaatccctccccagcggcaagcccctcttttcagagtgggcagagggttgcctatggtgggcactaggaatgaggtcccctgcctcgatgcgggtcctaggagaaaaagtcctacttttctgggtccccaggtgcagcacctcccggagactgtttctcccatggcctcctgagtgatgggccctgcctccctgtgcctcatcctcaggctggttggagcagagggtgggcaggagccccagcacagactggggggtgctcacagcagggccaccttgatgcaggctggaatgttatccctggggtgtgcttggaccccacctgctttctttctctcctgcccctcccctactctcactgtaatttatggaccctgcccgcctgcgtgttgtgtgtatgtcctgtgccttttctcactattgtttgggtgtgggagggggtggtttttcactgaaaaggggggtacacctatagctttcttgatgttcaatcaatcagtcactgtgtcccagacatattcaataaacacagattggtaccaccca

SEQ ID NO: 304136 - DNA, 3809 bp, Homo sapiens
atttcaatgaaggggatggggcttaattgttacattagatggtccggtcgtcccgtacaccttaggcttctctccctactccattgactctgagccaggaagccctctattggatgatgcaaaggtcaaagatgagccagactctcctcctgtggcgctgggcatggtagaccgctcacggattcttctgtgtgtcctcaccttcctgtgcctctcctttaaccccctgacttccctgctgcagtggggaggggcccacgactctgaccagcacccacactcaggctctggccgcagtgtcctgtcattcgagtcaggttctgggggctggtttgactggatgatgcctactcttctcttatggctggtaaatggtgtgattgtcctgagcgtctttgtgaagctgctggttcatggggagccagtgatccggccacactcgcgctcctcggtcaccttctggaggcaccggaaacaggcagatctggatctcgccagaggagattttgcagctgctgccggcaacctacaaacctgcctggcagttttgggccgggcactgcccacctcccgcctggacctggcctgcagcctctcctggaacgtgatccgctacagcctgcagaagctacgcctggtgcgctggctgctcaagaaagtcttccagtgccggcgggccacgccagccactgaggcaggctttgaagacgaagctaagaccagcgcccgggatgcggctctggcctatcaccggctgcaccagctgcacatcacagggaagcttcctgcaggatccgcctgttccgatgtacacatggcgttgtgtgccgtgaacctggctgaatgtgcagaggagaagatcccaccgagcacactggttgagatccatctgactgctgccatggggctcaagacccggtgtggaggcaagctgggcttcctggccagctacttcctcagccgagcccagagcctgtgtggccccgagcacagtgctgttcctgactccctgcgctggctctgccaccccctgggccagaagtttttcatggagcggagctggtctgtgaagtcagctgccaaggagagtctatactgtgcccagaggaacccagctgaccccattgcgcaggtccaccaggccttctgcaagaacctgctggagcgagctatagagtccttggtgaaacctcaggccaagaagaaggctggagaccaggaagaagagagctgtgaattctccagtgctctggagtacttgaaattacttcattcttttgtggactctgtgggggttatgagccccccactctccaggagctccgtgctcaagtccgccctgggtccagacatcatctgtcggtggtggacgtctgcaatcactgtggccatcagctggctccagggagacgatgcagctgtgcgctctcattttaccaaagtggaacgcatccccaaggccctggaagtgacagagagccccctggtgaaggccatcttccatgcctgcagagccatgcatgcctcactccctgggaaagcagatgggcagcagagttccttctgccattgcgagagggccagtggccacctatggagcagcctcaacgtcagtggggccacctctgaccctgccctcaaccacgtggtccagctgctcacctgtgacctgctactgtcgctacggacagcgctctggcaaaaacaggccagtgccagccaggctgtgggggagacctaccacgcgtcaggcgctgaactggcgggcttccaacgggacctgggcagcctgcgcaggctggcacacagcttccgcccagcataccgcaaggtgttcctgcatgaagccaccgtgcgcctgatggcaggagccagccccacccgcacccaccagctgctggaacacagcctgcggcggcgcaccacgcagagcaccaagcacggagaggtggatgcctggcccggccagcgagagcgggccaccgccatcctgctggcctgccgccacctgcccctctccttcctctcctccccgggccagcgggcagtgctgctggccgaagctgcccgcaccctggagaaggtgggcgaccggcgctcctgcaacgactgccagcagatgattgttaagctgggtggtggcactgccattgccgcctcctgaccaccaggctcagcccacccctccacctctctctcgatttctctctctccccctcagcatcttcccgctgagagtggtggggaagagccttgtcttcttagctgtcacctgccgaggcttctgggccactcaggccagtgcacccctgggcagagccccttaaagctgctgtcactagatgcccatggtccagggcctggtgggcgtgagaggataggtggcagggcagaaactgggcagccctgacttgatagcagcagggggagctcccaagctgccaagcccctgcctccagccttcctgagtttctctctcctgaaccctactctctcctttttgcttcctcagtttttatcaggctttctctgggggacagcagtctctgagcaccagggagcagttgccctcaggcctgtgcccagcatgccctcccctttttatacgaatgttttctaccagtgtgcttgggtttgccatgatgcgaggctgagttgctgtagcgtcttgattctctccctgggtctgcgttccctcccctgggcctgactgagcctgctcattgtttttccctttattacacaggacagccaggggaggaggggggcccagccctgggaggctggtgggaggcagggggcaggcctgcggatgcatgaaataatgttggcattattttttaattttttaaaaaataaatggtatcttatttaattgtcctgttccttcccactccccgcctcctaggatgttagcccaagctcagggtaggcccagggggctgggagaaatgaagccacccatggggactggggaccaggggccttcagcatggcttctaggttccctcctccccctaccccatctcctacctccacagtacagactgtccccaacttaacagtggttcaacttaaaccatgtttcaactttacaattggtctgttggggtattaaatgaatttgtgacttaggatattttcatttatgatgggtttatcaggaagtaaccccatggtaagttgaggcatatctgtatatatttaaacctaattaattcttgagctgaaaataaataaaccaggatggcagggaccaacccctaatccctccccagcggcaagcccctcttttcagagtgggcagagggttgcctatggtgggcactaggaatgaggtcccctgcctcgatgcgggtcctaggagaaaaagtcctacttttctgggtccccaggtgcagcacctcccggagactgtttctcccatggcctcctgagtgatgggccctgcctccctgtgcctcatcctcaggctggttggagcagagggtgggcaggagccccagcacagactggggggtgctcacagcagggccaccttgatgcaggctggaatgttatccctggggtgtgcttggaccccacctgctttctttctctcctgcccctcccctactctcactgtaatttatggaccctgcccgcctgcgtgttgtgtgtatgtcctgtgccttttctcactattgtttgggtgtgggagggggtggtttttcactgaaaaggggggtacacctatagctttcttgatgttcaatcaatcagtcactgtgtcccagacatattcaataaacacagattggtaccaccca

SEQ ID NO: 304137 - DNA, 3817 bp, Homo sapiens
taatttcagtgctcgggccggggtgtaagttctacattaactggtccgtgcgtcctctgacattaaaaatggggcttctctccctactccattgactctgagccaggaagccctctattggatgatgcaaaggtcaaagatgagccagactctcctcctgtggcgctgggcatggtagaccgctcacggattcttctgtgtgtcctcaccttcctgtgcctctcctttaaccccctgacttccctgctgcagtggggaggggcccacgactctgaccagcacccacactcaggctctggccgcagtgtcctgtcattcgagtcaggttctgggggctggtttgactggatgatgcctactcttctcttatggctggtaaatggtgtgattgtcctgagcgtctttgtgaagctgctggttcatggggagccagtgatccggccacactcgcgctcctcggtcaccttctggaggcaccggaaacaggcagatctggatctcgccagaggagattttgcagctgctgccggcaacctacaaacctgcctggcagttttgggccgggcactgcccacctcccgcctggacctggcctgcagcctctcctggaacgtgatccgctacagcctgcagaagctacgcctggtgcgctggctgctcaagaaagtcttccagtgccggcgggccacgccagccactgaggcaggctttgaagacgaagctaagaccagcgcccgggatgcggctctggcctatcaccggctgcaccagctgcacatcacagggaagcttcctgcaggatccgcctgttccgatgtacacatggcgttgtgtgccgtgaacctggctgaatgtgcagaggagaagatcccaccgagcacactggttgagatccatctgactgctgccatggggctcaagacccggtgtggaggcaagctgggcttcctggccagctacttcctcagccgagcccagagcctgtgtggccccgagcacagtgctgttcctgactccctgcgctggctctgccaccccctgggccagaagtttttcatggagcggagctggtctgtgaagtcagctgccaaggagagtctatactgtgcccagaggaacccagctgaccccattgcgcaggtccaccaggccttctgcaagaacctgctggagcgagctatagagtccttggtgaaacctcaggccaagaagaaggctggagaccaggaagaagagagctgtgaattctccagtgctctggagtacttgaaattacttcattcttttgtggactctgtgggggttatgagccccccactctccaggagctccgtgctcaagtccgccctgggtccagacatcatctgtcggtggtggacgtctgcaatcactgtggccatcagctggctccagggagacgatgcagctgtgcgctctcattttaccaaagtggaacgcatccccaaggccctggaagtgacagagagccccctggtgaaggccatcttccatgcctgcagagccatgcatgcctcactccctgggaaagcagatgggcagcagagttccttctgccattgcgagagggccagtggccacctatggagcagcctcaacgtcagtggggccacctctgaccctgccctcaaccacgtggtccagctgctcacctgtgacctgctactgtcgctacggacagcgctctggcaaaaacaggccagtgccagccaggctgtgggggagacctaccacgcgtcaggcgctgaactggcgggcttccaacgggacctgggcagcctgcgcaggctggcacacagcttccgcccagcataccgcaaggtgttcctgcatgaagccaccgtgcgcctgatggcaggagccagccccacccgcacccaccagctgctggaacacagcctgcggcggcgcaccacgcagagcaccaagcacggagaggtggatgcctggcccggccagcgagagcgggccaccgccatcctgctggcctgccgccacctgcccctctccttcctctcctccccgggccagcgggcagtgctgctggccgaagctgcccgcaccctggagaaggtgggcgaccggcgctcctgcaacgactgccagcagatgattgttaagctgggtggtggcactgccattgccgcctcctgaccaccaggctcagcccacccctccacctctctctcgatttctctctctccccctcagcatcttcccgctgagagtggtggggaagagccttgtcttcttagctgtcacctgccgaggcttctgggccactcaggccagtgcacccctgggcagagccccttaaagctgctgtcactagatgcccatggtccagggcctggtgggcgtgagaggataggtggcagggcagaaactgggcagccctgacttgatagcagcagggggagctcccaagctgccaagcccctgcctccagccttcctgagtttctctctcctgaaccctactctctcctttttgcttcctcagtttttatcaggctttctctgggggacagcagtctctgagcaccagggagcagttgccctcaggcctgtgcccagcatgccctcccctttttatacgaatgttttctaccagtgtgcttgggtttgccatgatgcgaggctgagttgctgtagcgtcttgattctctccctgggtctgcgttccctcccctgggcctgactgagcctgctcattgtttttccctttattacacaggacagccaggggaggaggggggcccagccctgggaggctggtgggaggcagggggcaggcctgcggatgcatgaaataatgttggcattattttttaattttttaaaaaataaatggtatcttatttaattgtcctgttccttcccactccccgcctcctaggatgttagcccaagctcagggtaggcccagggggctgggagaaatgaagccacccatggggactggggaccaggggccttcagcatggcttctaggttccctcctccccctaccccatctcctacctccacagtacagactgtccccaacttaacagtggttcaacttaaaccatgtttcaactttacaattggtctgttggggtattaaatgaatttgtgacttaggatattttcatttatgatgggtttatcaggaagtaaccccatggtaagttgaggcatatctgtatatatttaaacctaattaattcttgagctgaaaataaataaaccaggatggcagggaccaacccctaatccctccccagcggcaagcccctcttttcagagtgggcagagggttgcctatggtgggcactaggaatgaggtcccctgcctcgatgcgggtcctaggagaaaaagtcctacttttctgggtccccaggtgcagcacctcccggagactgtttctcccatggcctcctgagtgatgggccctgcctccctgtgcctcatcctcaggctggttggagcagagggtgggcaggagccccagcacagactggggggtgctcacagcagggccaccttgatgcaggctggaatgttatccctggggtgtgcttggaccccacctgctttctttctctcctgcccctcccctactctcactgtaatttatggaccctgcccgcctgcgtgttgtgtgtatgtcctgtgccttttctcactattgtttgggtgtgggagggggtggtttttcactgaaaaggggggtacacctatagctttcttgatgttcaatcaatcagtcactgtgtcccagacatattcaataaacacagattggtaccaccca

SEQ ID NO: 304138 - DNA, 5171 bp, Homo sapiens
cgcccgggcgcaacgcaaacatggcggcgggtggcacccgtcggtgaggcggtgccgggcgggggttgtcgggtgtcatgggcggtggcgacggcaccgcccccgcgtctccctgagcgggacggcagggggggcttctgcgctgagccgggcgatggacgacagcggcgagctgggtggtctggagaccatggagaccctcacggagctgggcgacgagctgaccctgggagacatcgacgagatgctgcaatttgtcagtaatcaagtgggagagttccctgacttgttttcagaacagctgtgtagctcctttcctggcagtggtggtagtggtagcagcagcggcagcagtggcagcagcagcagcagcagcaatggcaggggcagcagcagcggagctgtggacccttcagtgcaacggtcattcacccaggtcacattaccttccttctctccctcggcggcctccccacaggctccaactctgcaagtcaaggtttctcccacctcagttcccaccacacccagggcaactcctattcttcagccccgcccccagccccagcctcaacctcaaactcagctgcaacaacagacggtaatgatcacgccaacattcagcaccactccgcagacgaggatcatccagcagcctttgatataccagaatgcagctactagctttcaagtccttcagcctcaagtccaaagcctggtgacatcctcccaggtacagccggtcaccattcagcagcaggtgcagacagtacaggcccagcgggtgctgacacaaacggccaatggcacgctgcagacccttgccccggctacggtgcagacagttgctgcgccacaggtgcagcaggtcccggtcctggtccagcctcagatcatcaagacagattcccttgttttgaccacactgaagacagatggcagccctgttatggctgcggtccagaacccggccctcaccgccctcaccacccctatccagacggctgcccttcaagtaccaaccctggtgggcagcagtgggaccattctgaccacaatgcctgtaatgatggggcaagagaaagtgcccattaagcaggtacctgggggagtcaagcagcttgagccccccaaagaaggagaaaggcggacaacccataatatcattgagaaacgatatcgctcctccatcaatgacaaaatcatcgaattgaaagacctggtcatggggacagacgccaagatgcacaagtctggcgttctgaggaaggccattgattacatcaaatacttgcagcaggtcaatcataaactgcgccaggagaacatggtgctgaagctggcaaatcaaaagaacaagcttctaaagggcatcgacctaggcagtctggtggacaatgaggtggacctgaagatcgaggactttaatcagaatgtccttctgatgtcccccccagcctctgactcagggtcccaggctggcttctctccctactccattgactctgagccaggaagccctctattggatgatgcaaaggtcaaagatgagccagactctcctcctgtggcgctgggcatggtagaccgctcacggattcttctgtgtgtcctcaccttcctgtgcctctcctttaaccccctgacttccctgctgcagtggggaggggcccacgactctgaccagcacccacactcaggctctggccgcagtgtcctgtcattcgagtcaggttctgggggctggtttgactggatgatgcctactcttctcttatggctggtaaatggtgtgattgtcctgagcgtctttgtgaagctgctggttcatggggagccagtgatccggccacactcgcgctcctcggtcaccttctggaggcaccggaaacaggcagatctggatctcgccagaggagattttgcagctgctgccggcaacctacaaacctgcctggcagttttgggccgggcactgcccacctcccgcctggacctggcctgcagcctctcctggaacgtgatccgctacagcctgcagaagctacgcctggtgcgctggctgctcaagaaagtcttccagtgccggcgggccacgccagccactgaggcaggctttgaagacgaagctaagaccagcgcccgggatgcggctctggcctatcaccggctgcaccagctgcacatcacagggaagcttcctgcaggatccgcctgttccgatgtacacatggcgttgtgtgccgtgaacctggctgaatgtgcagaggagaagatcccaccgagcacactggttgagatccatctgactgctgccatggggctcaagacccggtgtggaggcaagctgggcttcctggccagctacttcctcagccgagcccagagcctgtgtggccccgagcacagtgctgttcctgactccctgcgctggctctgccaccccctgggccagaagtttttcatggagcggagctggtctgtgaagtcagctgccaaggagagtctatactgtgcccagaggaacccagctgaccccattgcgcaggtccaccaggccttctgcaagaacctgctggagcgagctatagagtccttggtgaaacctcaggccaagaagaaggctggagaccaggaagaagagagctgtgaattctccagtgctctggagtacttgaaattacttcattcttttgtggactctgtgggggttatgagccccccactctccaggagctccgtgctcaagtccgccctgggtccagacatcatctgtcggtggtggacgtctgcaatcactgtggccatcagctggctccagggagacgatgcagctgtgcgctctcattttaccaaagtggaacgcatccccaaggccctggaagtgacagagagccccctggtgaaggccatcttccatgcctgcagagccatgcatgcctcactccctgggaaagcagatgggcagcagagttccttctgccattgcgagagggccagtggccacctatggagcagcctcaacgtcagtggggccacctctgaccctgccctcaaccacgtggtccagctgctcacctgtgacctgctactgtcgctacggacagcgctctggcaaaaacaggccagtgccagccaggctgtgggggagacctaccacgcgtcaggcgctgaactggcgggcttccaacgggacctgggcagcctgcgcaggctggcacacagcttccgcccagcataccgcaaggtgttcctgcatgaagccaccgtgcgcctgatggcaggagccagccccacccgcacccaccagctgctggaacacagcctgcggcggcgcaccacgcagagcaccaagcacggagaggtggatgcctggcccggccagcgagagcgggccaccgccatcctgctggcctgccgccacctgcccctctccttcctctcctccccgggccagcgggcagtgctgctggccgaagctgcccgcaccctggagaaggtgggcgaccggcgctcctgcaacgactgccagcagatgattgttaagctgggtggtggcactgccattgccgcctcctgaccaccaggctcagcccacccctccacctctctctcgatttctctctctccccctcagcatcttcccgctgagagtggtggggaagagccttgtcttcttagctgtcacctgccgaggcttctgggccactcaggccagtgcacccctgggcagagccccttaaagctgctgtcactagatgcccatggtccagggcctggtgggcgtgagaggataggtggcagggcagaaactgggcagccctgacttgatagcagcagggggagctcccaagctgccaagcccctgcctccagccttcctgagtttctctctcctgaaccctactctctcctttttgcttcctcagtttttatcaggctttctctgggggacagcagtctctgagcaccagggagcagttgccctcaggcctgtgcccagcatgccctcccctttttatacgaatgttttctaccagtgtgcttgggtttgccatgatgcgaggctgagttgctgtagcgtcttgattctctccctgggtctgcgttccctcccctgggcctgactgagcctgctcattgtttttccctttattacacaggacagccaggggaggaggggggcccagccctgggaggctggtgggaggcagggggcaggcctgcggatgcatgaaataatgttggcattattttttaattttttaaaagatgttagcccaagctcagggtaggcccagggggctgggagaaatgaagccacccatggggactggggaccaggggccttcagcatggcttctaggttccctcctccccctaccccatctcctacctccacagtacagactgtccccaacttaacagtggttcaacttaaaccatgtttcaactttacaattggtctgttggggtattaaatgaatttgtgacttaggatattttcatttatgatgggtttatcaggaagtaaccccatggtaagttgaggcatatctgtatatatttaaacctaattaattcttgagctgaaaataaataaaccaggatggcagggaccaacccctaatccctccccagcggcaagcccctcttttcagagtgggcagagggttgcctatggtgggcactaggaatgaggtcccctgcctcgatgcgggtcctaggagaaaaagtcctacttttctgggtccccaggtgcagcacctcccggagactgtttctcccatggcctcctgagtgatgggccctgcctccctgtgcctcatcctcaggctggttggagcagagggtgggcaggagccccagcacagactggggggtgctcacagcagggccaccttgatgcaggctggaatgttatccctggggtgtgcttggaccccacctgctttctttctctcctgcccctcccctactctcactgtaatttatggaccctgcccgcctgcgtgttgtgtgtatgtcctgtgccttttctcactattgtttgggtgtgggagggggtggtttttcactgaaaaggggggtacacctatagctttcttgatgttcaatcaatcagtcactgtgtcccagacatattcaataaacacagattggtaccaccca

SEQ ID NO: 304139 - DNA, 3990 bp, Homo sapiens
acctgggcatggctggaccactatggcaggagaaggaccctgtgtacaaacttcttggcttggctaccaggtcccaaagggcttttatagtgggcccccacctgcttgcttctgatagggactggcataagttccattttagaagtaacaaggcaagcccaagttcagtcagaatgagcaaaacaaatcagggacccacactactctaaataccctggggtggaggggtggtacctatttgaaggaggatatcgtgttttttatctgaggttgcaaaaccaatgcctcaaccctttcaaaacaaagatttttatggcactcagctccataatgagaagggctacagtcattagccctgtttagattatagaattatttgccctttcttctgaaaatgaggtagaagactctttcctgtgatagtgctggggtctgtcaggtgcctggctgctccgcaaggcctttcctagcagactctgctgagacgctccttcttaggttctgggggctggtttgactggatgatgcctactcttctcttatggctggtaaatggtgtgattgtcctgagcgtctttgtgaagctgctggttcatggggagccagtgatccggccacactcgcgctcctcggtcaccttctggaggcaccggaaacaggcagatctggatctcgccagaggagattttgcagctgctgccggcaacctacaaacctgcctggcagttttgggccgggcactgcccacctcccgcctggacctggcctgcagcctctcctggaacgtgatccgctacagcctgcagaagctacgcctggtgcgctggctgctcaagaaagtcttccagtgccggcgggccacgccagccactgaggcaggctttgaagacgaagctaagaccagcgcccgggatgcggctctggcctatcaccggctgcaccagctgcacatcacagggaagcttcctgcaggatccgcctgttccgatgtacacatggcgttgtgtgccgtgaacctggctgaatgtgcagaggagaagatcccaccgagcacactggttgagatccatctgactgctgccatggggctcaagacccggtgtggaggcaagctgggcttcctggccagctacttcctcagccgagcccagagcctgtgtggccccgagcacagtgctgttcctgactccctgcgctggctctgccaccccctgggccagaagtttttcatggagcggagctggtctgtgaagtcagctgccaaggagagtctatactgtgcccagaggaacccagctgaccccattgcgcaggtccaccaggccttctgcaagaacctgctggagcgagctatagagtccttggtgaaacctcaggccaagaagaaggctggagaccaggaagaagagagctgtgaattctccagtgctctggagtacttgaaattacttcattcttttgtggactctgtgggggttatgagccccccactctccaggagctccgtgctcaagtccgccctgggtccagacatcatctgtcggtggtggacgtctgcaatcactgtggccatcagctggctccagggagacgatgcagctgtgcgctctcattttaccaaagtggaacgcatccccaaggccctggaagtgacagagagccccctggtgaaggccatcttccatgcctgcagagccatgcatgcctcactccctgggaaagcagatgggcagcagagttccttctgccattgcgagagggccagtggccacctatggagcagcctcaacgtcagtggggccacctctgaccctgccctcaaccacgtggtccagctgctcacctgtgacctgctactgtcgctacggacagcgctctggcaaaaacaggccagtgccagccaggctgtgggggagacctaccacgcgtcaggcgctgaactggcgggcttccaacgggacctgggcagcctgcgcaggctggcacacagcttccgcccagcataccgcaaggtgttcctgcatgaagccaccgtgcgcctgatggcaggagccagccccacccgcacccaccagctgctggaacacagcctgcggcggcgcaccacgcagagcaccaagcacggagaggtggatgcctggcccggccagcgagagcgggccaccgccatcctgctggcctgccgccacctgcccctctccttcctctcctccccgggccagcgggcagtgctgctggccgaagctgcccgcaccctggagaaggtgggcgaccggcgctcctgcaacgactgccagcagatgattgttaagctgggtggtggcactgccattgccgcctcctgaccaccaggctcagcccacccctccacctctctctcgatttctctctctccccctcagcatcttcccgctgagagtggtggggaagagccttgtcttcttagctgtcacctgccgaggcttctgggccactcaggccagtgcacccctgggcagagccccttaaagctgctgtcactagatgcccatggtccagggcctggtgggcgtgagaggataggtggcagggcagaaactgggcagccctgacttgatagcagcagggggagctcccaagctgccaagcccctgcctccagccttcctgagtttctctctcctgaaccctactctctcctttttgcttcctcagtttttatcaggctttctctgggggacagcagtctctgagcaccagggagcagttgccctcaggcctgtgcccagcatgccctcccctttttatacgaatgttttctaccagtgtgcttgggtttgccatgatgcgaggctgagttgctgtagcgtcttgattctctccctgggtctgcgttccctcccctgggcctgactgagcctgctcattgtttttccctttattacacaggacagccaggggaggaggggggcccagccctgggaggctggtgggaggcagggggcaggcctgcggatgcatgaaataatgttggcattattttttaattttttaaaaaataaatggtatcttatttaattgtcctgttccttcccactccccgcctcctaggatgttagcccaagctcagggtaggcccagggggctgggagaaatgaagccacccatggggactggggaccaggggccttcagcatggcttctaggttccctcctccccctaccccatctcctacctccacagtacagactgtccccaacttaacagtggttcaacttaaaccatgtttcaactttacaattggtctgttggggtattaaatgaatttgtgacttaggatattttcatttatgatgggtttatcaggaagtaaccccatggtaagttgaggcatatctgtatatatttaaacctaattaattcttgagctgaaaataaataaaccaggatggcagggaccaacccctaatccctccccagcggcaagcccctcttttcagagtgggcagagggttgcctatggtgggcactaggaatgaggtcccctgcctcgatgcgggtcctaggagaaaaagtcctacttttctgggtccccaggtgcagcacctcccggagactgtttctcccatggcctcctgagtgatgggccctgcctccctgtgcctcatcctcaggctggttggagcagagggtgggcaggagccccagcacagactggggggtgctcacagcagggccaccttgatgcaggctggaatgttatccctggggtgtgcttggaccccacctgctttctttctctcctgcccctcccctactctcactgtaatttatggaccctgcccgcctgcgtgttgtgtgtatgtcctgtgccttttctcactattgtttgggtgtgggagggggtggtttttcactgaaaaggggggtacacctatagctttcttgatgttcaatcaatcagtcactgtgtcccagacatattcaataaacacagattggtaccaccca

SEQ ID NO: 304140 - DNA, 3560 bp, Homo sapiens
aaaaagtgctactctgagggaactctgaccagcatttgctcatagaacaaacgcacgcagtacaatctcaatcgagtaaaaagtctgtaaggaaatacctcagaatgtcagcagggattcttcctgggggatgagattataggtggttttgttttactttcttgtagctttctgaagtttccctcgtttttatgagtgtgcactaattcctctgataattgggggcagggggagtagaagtctatatcaaggagattttgcagctgctgccggcaacctacaaacctgcctggcagttttgggccgggcactgcccacctcccgcctggacctggcctgcagcctctcctggaacgtgatccgctacagcctgcagaagctacgcctggtgcgctggctgctcaagaaagtcttccagtgccggcgggccacgccagccactgaggcaggctttgaagacgaagctaagaccagcgcccgggatgcggctctggcctatcaccggctgcaccagctgcacatcacagggaagcttcctgcaggatccgcctgttccgatgtacacatggcgttgtgtgccgtgaacctggctgaatgtgcagaggagaagatcccaccgagcacactggttgagatccatctgactgctgccatggggctcaagacccggtgtggaggcaagctgggcttcctggccagctacttcctcagccgagcccagagcctgtgtggccccgagcacagtgctgttcctgactccctgcgctggctctgccaccccctgggccagaagtttttcatggagcggagctggtctgtgaagtcagctgccaaggagagtctatactgtgcccagaggaacccagctgaccccattgcgcaggtccaccaggccttctgcaagaacctgctggagcgagctatagagtccttggtgaaacctcaggccaagaagaaggctggagaccaggaagaagagagctgtgaattctccagtgctctggagtacttgaaattacttcattcttttgtggactctgtgggggttatgagccccccactctccaggagctccgtgctcaagtccgccctgggtccagacatcatctgtcggtggtggacgtctgcaatcactgtggccatcagctggctccagggagacgatgcagctgtgcgctctcattttaccaaagtggaacgcatccccaaggccctggaagtgacagagagccccctggtgaaggccatcttccatgcctgcagagccatgcatgcctcactccctgggaaagcagatgggcagcagagttccttctgccattgcgagagggccagtggccacctatggagcagcctcaacgtcagtggggccacctctgaccctgccctcaaccacgtggtccagctgctcacctgtgacctgctactgtcgctacggacagcgctctggcaaaaacaggccagtgccagccaggctgtgggggagacctaccacgcgtcaggcgctgaactggcgggcttccaacgggacctgggcagcctgcgcaggctggcacacagcttccgcccagcataccgcaaggtgttcctgcatgaagccaccgtgcgcctgatggcaggagccagccccacccgcacccaccagctgctggaacacagcctgcggcggcgcaccacgcagagcaccaagcacggagaggtggatgcctggcccggccagcgagagcgggccaccgccatcctgctggcctgccgccacctgcccctctccttcctctcctccccgggccagcgggcagtgctgctggccgaagctgcccgcaccctggagaaggtgggcgaccggcgctcctgcaacgactgccagcagatgattgttaagctgggtggtggcactgccattgccgcctcctgaccaccaggctcagcccacccctccacctctctctcgatttctctctctccccctcagcatcttcccgctgagagtggtggggaagagccttgtcttcttagctgtcacctgccgaggcttctgggccactcaggccagtgcacccctgggcagagccccttaaagctgctgtcactagatgcccatggtccagggcctggtgggcgtgagaggataggtggcagggcagaaactgggcagccctgacttgatagcagcagggggagctcccaagctgccaagcccctgcctccagccttcctgagtttctctctcctgaaccctactctctcctttttgcttcctcagtttttatcaggctttctctgggggacagcagtctctgagcaccagggagcagttgccctcaggcctgtgcccagcatgccctcccctttttatacgaatgttttctaccagtgtgcttgggtttgccatgatgcgaggctgagttgctgtagcgtcttgattctctccctgggtctgcgttccctcccctgggcctgactgagcctgctcattgtttttccctttattacacaggacagccaggggaggaggggggcccagccctgggaggctggtgggaggcagggggcaggcctgcggatgcatgaaataatgttggcattattttttaattttttaaaaaataaatggtatcttatttaattgtcctgttccttcccactccccgcctcctaggatgttagcccaagctcagggtaggcccagggggctgggagaaatgaagccacccatggggactggggaccaggggccttcagcatggcttctaggttccctcctccccctaccccatctcctacctccacagtacagactgtccccaacttaacagtggttcaacttaaaccatgtttcaactttacaattggtctgttggggtattaaatgaatttgtgacttaggatattttcatttatgatgggtttatcaggaagtaaccccatggtaagttgaggcatatctgtatatatttaaacctaattaattcttgagctgaaaataaataaaccaggatggcagggaccaacccctaatccctccccagcggcaagcccctcttttcagagtgggcagagggttgcctatggtgggcactaggaatgaggtcccctgcctcgatgcgggtcctaggagaaaaagtcctacttttctgggtccccaggtgcagcacctcccggagactgtttctcccatggcctcctgagtgatgggccctgcctccctgtgcctcatcctcaggctggttggagcagagggtgggcaggagccccagcacagactggggggtgctcacagcagggccaccttgatgcaggctggaatgttatccctggggtgtgcttggaccccacctgctttctttctctcctgcccctcccctactctcactgtaatttatggaccctgcccgcctgcgtgttgtgtgtatgtcctgtgccttttctcactattgtttgggtgtgggagggggtggtttttcactgaaaaggggggtacacctatagctttcttgatgttcaatcaatcagtcactgtgtcccagacatattcaataaacacagattggtaccaccca

SEQ ID NO: 304141 - DNA, 5594 bp, Homo sapiens
cgcccgggcgcaacgcaaacatggcggcgggtggcacccgtcggtgaggcggtgccgggcgggggttgtcgggtgtcatgggcggtggcgacggcaccgcccccgcgtctccctgagcgggacggcagggggggcttctgcgctgagccgggcgatggacgacagcggcgagctgggtggtctggagaccatggagaccctcacggagctgggcgacgagctgaccctgggagacatcgacgagatgctgcaatttgtcagtaatcaagtgggagagttccctgacttgttttcagaacagctgtgtagctcctttcctggcagtggtggtagtggtagcagcagcggcagcagtggcagcagcagcagcagcagcaatggcaggggcagcagcagcggagctgtggacccttcagtgcaacggtcattcacccaggtcacattaccttccttctctccctcggcggcctccccacaggctccaactctgcaagtcaaggtttctcccacctcagttcccaccacacccagggcaactcctattcttcagccccgcccccagccccagcctcaacctcaaactcagctgcaacaacagacggtaatgatcacgccaacattcagcaccactccgcagacgaggatcatccagcagcctttgatataccagaatgcagctactagctttcaagtccttcagcctcaagtccaaagcctggtgacatcctcccaggtacagccggtcaccattcagcagcaggtgcagacagtacaggcccagcgggtgctgacacaaacggccaatggcacgctgcagacccttgccccggctacggtgcagacagttgctgcgccacaggtgcagcaggtcccggtcctggtccagcctcagatcatcaagacagattcccttgttttgaccacactgaagacagatggcagccctgttatggctgcggtccagaacccggccctcaccgccctcaccacccctatccagacggctgcccttcaagtaccaaccctggtgggcagcagtgggaccattctgaccacaatgcctgtaatgatggggcaagagaaagtgcccattaagcaggtacctgggggagtcaagcagcttgagccccccaaagaaggagaaaggcggacaacccataatatcattgagaaacgatatcgctcctccatcaatgacaaaatcatcgaattgaaagacctggtcatggggacagacgccaagatgcacaagtctggcgttctgaggaaggccattgattacatcaaatacttgcagcaggtcaatcataaactgcgccaggagaacatggtgctgaagctggcaaatcaaaagaacaagcttctaaagggcatcgacctaggcagtctggtggacaatgaggtggacctgaagatcgaggactttaatcagaatgtccttctgatgtcccccccagcctctgactcagggtcccaggctggcttctctccctactccattgactctgagccaggaagccctctattggatgatgcaaaggtcaaagatgagccagactctcctcctgtggcgctgggcatggtagaccgctcacggattcttctgtgtgtcctcaccttcctgtgcctctcctttaaccccctgacttccctgctgcagtggggaggggcccacgactctgaccagcacccacactcaggctctggccgcagtgtcctgtcattcgagtcaggttctgggggctggtttgactggatgatgcctactcttctcttatggctggtaaatggtgtgattgtcctgagcgtctttgtgaagctgctggttcatggggagccagtgatccggccacactcgcgctcctcggtcaccttctggaggcaccggaaacaggcagatctggatctcgccagaggagattttgcagctgctgccggcaacctacaaacctgcctggcagttttgggccgggcactgcccacctcccgcctggacctggcctgcagcctctcctggaacgtgatccgctacagcctgcagaagctacgcctggtgcgctggctgctcaagaaagtcttccagtgccggcgggccacgccagccactgaggcaggctttgaagacgaagctaagaccagcgcccgggatgcggctctggcctatcaccggctgcaccagctgcacatcacagggaagcttcctgcaggatccgcctgttccgatgtacacatggcgttgtgtgccgtgaacctggctgaatgtgcagaggagaagatcccaccgagcacactggttgagatccatctgactgctgccatggggctcaagacccggtgtggaggcaagctgggcttcctggccagctacttcctcagccgagcccagagcctgtgtggccccgagcacagtgctgttcctgactccctgcgctggctctgccaccccctgggccagaagtttttcatggagcggagctggtctgtgaagtcagctgccaaggagagtctatactgtgcccagaggaacccagctgaccccattgcgcaggtccaccaggccttctgcaagaacctgctggagcgagctatagagtccttggtgaaacctcaggccaagaagaaggctggagaccaggaagaagagagctgtgaattctccagtgctctggagtacttgaaattacttcattcttttgtggactctgtgggggttatgagccccccactctccaggagctccgtgctcaagtccgccctgggtccagacatcatctgtcggtggtggacgtctgcaatcactgtggccatcagctggctccagggagacgatgcagctgtgcgctctcattttaccaaagtggaacgcatccccaaggccctggaagtgacagaccacctccacccccaccatcaaccctggcaactttgtcctgtaactaaaatagcctttagcacatggcataaccggagagcttttgacattcctctttggagattcatgtctgcgtcttgggggcattcggcactagtgatgggcagccctgcctgctgactccccggctgtttctaattggatctgagtattctaagagaaactgtaaaatgctccaagacagaaaggccccacgaggtcctatccttagagccaaggctgtagcatttcctatcaagcagacccttaaccggcgcacaggaaggagctgagaagacagcagacgtgatggtgaagcctgtgtctctgacttccagcattgaatgaaggagccccctggtgaaggccatcttccatgcctgcagagccatgcatgcctcactccctgggaaagcagatgggcagcagagttccttctgccattgcgagagggccagtggccacctatggagcagcctcaacgtcagtggggccacctctgaccctgccctcaaccacgtggtccagctgctcacctgtgacctgctactgtcgctacggacagcgctctggcaaaaacaggccagtgccagccaggctgtgggggagacctaccacgcgtcaggcgctgaactggcgggcttccaacgggacctgggcagcctgcgcaggctggcacacagcttccgcccagcataccgcaaggtgttcctgcatgaagccaccgtgcgcctgatggcaggagccagccccacccgcacccaccagctgctggaacacagcctgcggcggcgcaccacgcagagcaccaagcacggagaggtggatgcctggcccggccagcgagagcgggccaccgccatcctgctggcctgccgccacctgcccctctccttcctctcctccccgggccagcgggcagtgctgctggccgaagctgcccgcaccctggagaaggtgggcgaccggcgctcctgcaacgactgccagcagatgattgttaagctgggtggtggcactgccattgccgcctcctgaccaccaggctcagcccacccctccacctctctctcgatttctctctctccccctcagcatcttcccgctgagagtggtggggaagagccttgtcttcttagctgtcacctgccgaggcttctgggccactcaggccagtgcacccctgggcagagccccttaaagctgctgtcactagatgcccatggtccagggcctggtgggcgtgagaggataggtggcagggcagaaactgggcagccctgacttgatagcagcagggggagctcccaagctgccaagcccctgcctccagccttcctgagtttctctctcctgaaccctactctctcctttttgcttcctcagtttttatcaggctttctctgggggacagcagtctctgagcaccagggagcagttgccctcaggcctgtgcccagcatgccctcccctttttatacgaatgttttctaccagtgtgcttgggtttgccatgatgcgaggctgagttgctgtagcgtcttgattctctccctgggtctgcgttccctcccctgggcctgactgagcctgctcattgtttttccctttattacacaggacagccaggggaggaggggggcccagccctgggaggctggtgggaggcagggggcaggcctgcggatgcatgaaataatgttggcattattttttaattttttaaaaaataaatggtatcttatttaattgtcctgttccttcccactccccgcctcctaggatgttagcccaagctcagggtaggcccagggggctgggagaaatgaagccacccatggggactggggaccaggggccttcagcatggcttctaggttccctcctccccctaccccatctcctacctccacagtacagactgtccccaacttaacagtggttcaacttaaaccatgtttcaactttacaattggtctgttggggtattaaatgaatttgtgacttaggatattttcatttatgatgggtttatcaggaagtaaccccatggtaagttgaggcatatctgtatatatttaaacctaattaattcttgagctgaaaataaataaaccaggatggcagggaccaacccctaatccctccccagcggcaagcccctcttttcagagtgggcagagggttgcctatggtgggcactaggaatgaggtcccctgcctcgatgcgggtcctaggagaaaaagtcctacttttctgggtccccaggtgcagcacctcccggagactgtttctcccatggcctcctgagtgatgggccctgcctccctgtgcctcatcctcaggctggttggagcagagggtgggcaggagccccagcacagactggggggtgctcacagcagggccaccttgatgcaggctggaatgttatccctggggtgtgcttggaccccacctgctttctttctctcctgcccctcccctactctcactgtaatttatggaccctgcccgcctgcgtgttgtgtgtatgtcctgtgccttttctcactattgtttgggtgtgggagggggtggtttttcactgaaaaggggggtacacctatagctttcttgatgttcaatcaatcagtcactgtgtcccagacatattcaataaacacagattggtaccaccca

SEQ ID NO: 304142 - DNA, 5197 bp, Homo sapiens
cgcccgggcgcaacgcaaacatggcggcgggtggcacccgtcggtgaggcggtgccgggcgggggttgtcgggtgtcatgggcggtggcgacggcaccgcccccgcgtctccctgagcgggacggcagggggggcttctgcgctgagccgggcgatggacgacagcggcgagctgggtggtctggagaccatggagaccctcacggagctgggcgacgagctgaccctgggagacatcgacgagatgctgcaatttgtcagtaatcaagtgggagagttccctgacttgttttcagaacagctgtgtagctcctttcctggcagtggtggtagtggtagcagcagcggcagcagtggcagcagcagcagcagcagcaatggcaggggcagcagcagcggagctgtggacccttcagtgcaacggtcattcacccaggtcacattaccttccttctctccctcggcggcctccccacaggctccaactctgcaagtcaaggtttctcccacctcagttcccaccacacccagggcaactcctattcttcagccccgcccccagccccagcctcaacctcaaactcagctgcaacaacagacggtaatgatcacgccaacattcagcaccactccgcagacgaggatcatccagcagcctttgatataccagaatgcagctactagctttcaagtccttcagcctcaagtccaaagcctggtgacatcctcccaggtacagccggtcaccattcagcagcaggtgcagacagtacaggcccagcgggtgctgacacaaacggccaatggcacgctgcagacccttgccccggctacggtgcagacagttgctgcgccacaggtgcagcaggtcccggtcctggtccagcctcagatcatcaagacagattcccttgttttgaccacactgaagacagatggcagccctgttatggctgcggtccagaacccggccctcaccgccctcaccacccctatccagacggctgcccttcaagtaccaaccctggtgggcagcagtgggaccattctgaccacaatgcctgtaatgatggggcaagagaaagtgcccattaagcaggtacctgggggagtcaagcagcttgagccccccaaagaaggagaaaggcggacaacccataatatcattgagaaacgatatcgctcctccatcaatgacaaaatcatcgaattgaaagacctggtcatggggacagacgccaagatgcacaagtctggcgttctgaggaaggccattgattacatcaaatacttgcagcaggtcaatcataaactgcgccaggagaacatggtgctgaagctggcaaatcaaaagaacaagcttctaaagggcatcgacctaggcagtctggtggacaatgaggtggacctgaagatcgaggactttaatcagaatgtccttctgatgtcccccccagcctctgactcagggtcccaggctggcttctctccctactccattgactctgagccaggaagccctctattggatgatgcaaaggtcaaagatgagccagactctcctcctgtggcgctgggcatggtagaccgctcacggattcttctgtgtgtcctcaccttcctgtgcctctcctttaaccccctgacttccctgctgcagtggggaggggcccacgactctgaccagcacccacactcaggctctggccgcagtgtcctgtcattcgagtcaggttctgggggctggtttgactggatgatgcctactcttctcttatggctggtaaatggtgtgattgtcctgagcgtctttgtgaagctgctggttcatggggagccagtgatccggccacactcgcgctcctcggtcaccttctggaggcaccggaaacaggcagatctggatctcgccagaggagattttgcagctgctgccggcaacctacaaacctgcctggcagttttgggccgggcactgcccacctcccgcctggacctggcctgcagcctctcctggaacgtgatccgctacagcctgcagaagctacgcctggtgcgctggctgctcaagaaagtcttccagtgccggcgggccacgccagccactgaggcaggctttgaagacgaagctaagaccagcgcccgggatgcggctctggcctatcaccggctgcaccagctgcacatcacagggaagcttcctgcaggatccgcctgttccgatgtacacatggcgttgtgtgccgtgaacctggctgaatgtgcagaggagaagatcccaccgagcacactggttgagatccatctgactgctgccatggggctcaagacccggtgtggaggcaagctgggcttcctggccagctacttcctcagccgagcccagagcctgtgtggccccgagcacagtgctgttcctgactccctgcgctggctctgccaccccctgggccagaagtttttcatggagcggagctggtctgtgaagtcagctgccaaggagagtctatactgtgcccagaggaacccagctgaccccattgcgcaggtccaccaggccttctgcaagaacctgctggagcgagctatagagtccttggtgaaacctcaggccaagaagaaggctggagaccaggaagaagagagctgtgaattctccagtgctctggagtacttgaaattacttcattcttttgtggactctgtgggggttatgagccccccactctccaggagctccgtgctcaagtccgccctgggtccagacatcatctgtcggtggtggacgtctgcaatcactgtggccatcagctggctccagggagacgatgcagctgtgcgctctcattttaccaaagtggaacgcatccccaaggccctggaagtgacagagcctgcagagccatgcatgcctcactccctgggaaagcagatgggcagcagagttccttctgccattgcgagagggccagtggccacctatggagcagcctcaacgtcagtggggccacctctgaccctgccctcaaccacgtggtccagctgctcacctgtgacctgctactgtcgctacggacagcgctctggcaaaaacaggccagtgccagccaggctgtgggggagacctaccacgcgtcaggcgctgaactggcgggcttccaacgggacctgggcagcctgcgcaggctggcacacagcttccgcccagcataccgcaaggtgttcctgcatgaagccaccgtgcgcctgatggcaggagccagccccacccgcacccaccagctgctggaacacagcctgcggcggcgcaccacgcagagcaccaagcacggagaggtggatgcctggcccggccagcgagagcgggccaccgccatcctgctggcctgccgccacctgcccctctccttcctctcctccccgggccagcgggcagtgctgctggccgaagctgcccgcaccctggagaaggtgggcgaccggcgctcctgcaacgactgccagcagatgattgttaagctgggtggtggcactgccattgccgcctcctgaccaccaggctcagcccacccctccacctctctctcgatttctctctctccccctcagcatcttcccgctgagagtggtggggaagagccttgtcttcttagctgtcacctgccgaggcttctgggccactcaggccagtgcacccctgggcagagccccttaaagctgctgtcactagatgcccatggtccagggcctggtgggcgtgagaggataggtggcagggcagaaactgggcagccctgacttgatagcagcagggggagctcccaagctgccaagcccctgcctccagccttcctgagtttctctctcctgaaccctactctctcctttttgcttcctcagtttttatcaggctttctctgggggacagcagtctctgagcaccagggagcagttgccctcaggcctgtgcccagcatgccctcccctttttatacgaatgttttctaccagtgtgcttgggtttgccatgatgcgaggctgagttgctgtagcgtcttgattctctccctgggtctgcgttccctcccctgggcctgactgagcctgctcattgtttttccctttattacacaggacagccaggggaggaggggggcccagccctgggaggctggtgggaggcagggggcaggcctgcggatgcatgaaataatgttggcattattttttaattttttaaaaaataaatggtatcttatttaattgtcctgttccttcccactccccgcctcctaggatgttagcccaagctcagggtaggcccagggggctgggagaaatgaagccacccatggggactggggaccaggggccttcagcatggcttctaggttccctcctccccctaccccatctcctacctccacagtacagactgtccccaacttaacagtggttcaacttaaaccatgtttcaactttacaattggtctgttggggtattaaatgaatttgtgacttaggatattttcatttatgatgggtttatcaggaagtaaccccatggtaagttgaggcatatctgtatatatttaaacctaattaattcttgagctgaaaataaataaaccaggatggcagggaccaacccctaatccctccccagcggcaagcccctcttttcagagtgggcagagggttgcctatggtgggcactaggaatgaggtcccctgcctcgatgcgggtcctaggagaaaaagtcctacttttctgggtccccaggtgcagcacctcccggagactgtttctcccatggcctcctgagtgatgggccctgcctccctgtgcctcatcctcaggctggttggagcagagggtgggcaggagccccagcacagactggggggtgctcacagcagggccaccttgatgcaggctggaatgttatccctggggtgtgcttggaccccacctgctttctttctctcctgcccctcccctactctcactgtaatttatggaccctgcccgcctgcgtgttgtgtgtatgtcctgtgccttttctcactattgtttgggtgtgggagggggtggtttttcactgaaaaggggggtacacctatagctttcttgatgttcaatcaatcagtcactgtgtcccagacatattcaataaacacagattggtaccaccca

SEQ ID NO: 304143 - DNA, 5167 bp, Homo sapiens
cgcccgggcgcaacgcaaacatggcggcgggtggcacccgtcggtgaggcggtgccgggcgggggttgtcgggtgtcatgggcggtggcgacggcaccgcccccgcgtctccctgagcgggacggcagggggggcttctgcgctgagccgggcgatggacgacagcggcgagctgggtggtctggagaccatggagaccctcacggagctgggcgacgagctgaccctgggagacatcgacgagatgctgcaatttgtcagtaatcaagtgggagagttccctgacttgttttcagaacagctgtgtagctcctttcctggcagtggtggtagtggtagcagcagcggcagcagtggcagcagcagcagcagcagcaatggcaggggcagcagcagcggagctgtggacccttcagtgcaacggtcattcacccaggtcacattaccttccttctctccctcggcggcctccccacaggctccaactctgcaagtcaaggtttctcccacctcagttcccaccacacccagggcaactcctattcttcagccccgcccccagccccagcctcaacctcaaactcagctgcaacaacagacggtaatgatcacgccaacattcagcaccactccgcagacgaggatcatccagcagcctttgatataccagaatgcagctactagctttcaagtccttcagcctcaagtccaaagcctggtgacatcctcccaggtacagccggtcaccattcagcagcaggtgcagacagtacaggcccagcgggtgctgacacaaacggccaatggcacgctgcagacccttgccccggctacggtgcagacagttgctgcgccacaggtgcagcaggtcccggtcctggtccagcctcagatcatcaagacagattcccttgttttgaccacactgaagacagatggcagccctgttatggctgcggtccagaacccggccctcaccgccctcaccacccctatccagacggctgcccttcaagtaccaaccctggtgggcagcagtgggaccattctgaccacaatgcctgtaatgatggggcaagagaaagtgcccattaagcaggtacctgggggagtcaagcagcttgagccccccaaagaaggagaaaggcggacaacccataatatcattgagaaacgatatcgctcctccatcaatgacaaaatcatcgaattgaaagacctggtcatggggacagacgccaagatgcacaagtctggcgttctgaggaaggccattgattacatcaaatacttgcagcaggtcaatcataaactgcgccaggagaacatggtgctgaagctggcaaatcaaaagaacaagcttctaaagggcatcgacctaggcagtctggtggacaatgaggtggacctgaagatcgaggactttaatcagaatgtccttctgatgtcccccccagcctctgactcagggtcccaggctggcttctctccctactccattgactctgagccaggaagccctctattggatgatgcaaaggtcaaagatgagccagactctcctcctgtggcgctgggcatggtagaccgctcacggattcttctgtgtgtcctcaccttcctgtgcctctcctttaaccccctgacttccctgctgcagtggggaggggcccacgactctgaccagcacccacactcaggctctggccgcagtgtcctgtcattcgagtcaggttctgggggctggtttgactggatgatgcctactcttctcttatggctggtaaatggtgtgattgtcctgagcgtctttgtgaagctgctggttcatggggagccagtgatccggccacactcgcgctcctcggtcaccttctggaggcaccggaaacaggcagatctggatctcgccagaggagattttgcagctgctgccggcaacctacaaacctgcctggcagttttgggccgggcactgcccacctcccgcctggacctggcctgcagcctctcctggaacgtgatccgctacagcctgcagaagctacgcctggtgcgctggctgctcaagaaagtcttccagtgccggcgggccacgccagccactgaggcaggctttgaagacgaagctaagaccagcgcccgggatgcggctctggcctatcaccggctgcaccagctgcacatcacagggaagcttcctgcaggatccgcctgttccgatgtacacatggcgttgtgtgccgtgaacctggctgaatgtgcagaggagaagatcccaccgagcacactggttgagatccatctgactgctgccatggggctcaagacccggtgtggaggcaagctgggcttcctggccagctacttcctcagccgagcccagagcctgtgtggccccgagcacagtgctgttcctgactccctgcgctggctctgccaccccctgggccagaagtttttcatggagcggagctggtctgtgaagtcagctgccaaggagagtctatactgtgcccagaggaacccagctgaccccattgcgcaggtccaccaggccttctgcaagaacctgctggagcgagctatagagtccttggtgaaacctcaggccaagaagaaggctggagaccaggaagaagagagctgtgaattctccagtgctctggagtacttgaaattacttcattcttttgtggactctgtgggggttatgagccccccactctccaggagctccgtgctcaagtccgccctgggtccagacatcatctgtcggtggtggacgtctgcaatcactgtggccatcagctggctccagggagacgatgcagctgtgcgctctcattttaccaaagtggaacgcatccccaaggccctggaagtgacagagagccccctggtgaaggccatcttccatgcctgcagagccatgcatgcctcactccctgggaaagcagatgggcagcagagttccttctgccattgcgagagggccagtggccacctatggagcagcctcaacgtcagtggggccacctctgaccctgccctcaaccacgtggtccagctgctcacctgtgacctgctactgtcgctacggacagcgctctggcaaaaacaggccagtgccagccaggctgtgggggagacctaccacgcgtcaggcgctgaactggcgggcttccagtgttcctgcatgaagccaccgtgcgcctgatggcaggagccagccccacccgcacccaccagctgctggaacacagcctgcggcggcgcaccacgcagagcaccaagcacggagaggtggatgcctggcccggccagcgagagcgggccaccgccatcctgctggcctgccgccacctgcccctctccttcctctcctccccgggccagcgggcagtgctgctggccgaagctgcccgcaccctggagaaggtgggcgaccggcgctcctgcaacgactgccagcagatgattgttaagctgggtggtggcactgccattgccgcctcctgaccaccaggctcagcccacccctccacctctctctcgatttctctctctccccctcagcatcttcccgctgagagtggtggggaagagccttgtcttcttagctgtcacctgccgaggcttctgggccactcaggccagtgcacccctgggcagagccccttaaagctgctgtcactagatgcccatggtccagggcctggtgggcgtgagaggataggtggcagggcagaaactgggcagccctgacttgatagcagcagggggagctcccaagctgccaagcccctgcctccagccttcctgagtttctctctcctgaaccctactctctcctttttgcttcctcagtttttatcaggctttctctgggggacagcagtctctgagcaccagggagcagttgccctcaggcctgtgcccagcatgccctcccctttttatacgaatgttttctaccagtgtgcttgggtttgccatgatgcgaggctgagttgctgtagcgtcttgattctctccctgggtctgcgttccctcccctgggcctgactgagcctgctcattgtttttccctttattacacaggacagccaggggaggaggggggcccagccctgggaggctggtgggaggcagggggcaggcctgcggatgcatgaaataatgttggcattattttttaattttttaaaaaataaatggtatcttatttaattgtcctgttccttcccactccccgcctcctaggatgttagcccaagctcagggtaggcccagggggctgggagaaatgaagccacccatggggactggggaccaggggccttcagcatggcttctaggttccctcctccccctaccccatctcctacctccacagtacagactgtccccaacttaacagtggttcaacttaaaccatgtttcaactttacaattggtctgttggggtattaaatgaatttgtgacttaggatattttcatttatgatgggtttatcaggaagtaaccccatggtaagttgaggcatatctgtatatatttaaacctaattaattcttgagctgaaaataaataaaccaggatggcagggaccaacccctaatccctccccagcggcaagcccctcttttcagagtgggcagagggttgcctatggtgggcactaggaatgaggtcccctgcctcgatgcgggtcctaggagaaaaagtcctacttttctgggtccccaggtgcagcacctcccggagactgtttctcccatggcctcctgagtgatgggccctgcctccctgtgcctcatcctcaggctggttggagcagagggtgggcaggagccccagcacagactggggggtgctcacagcagggccaccttgatgcaggctggaatgttatccctggggtgtgcttggaccccacctgctttctttctctcctgcccctcccctactctcactgtaatttatggaccctgcccgcctgcgtgttgtgtgtatgtcctgtgccttttctcactattgtttgggtgtgggagggggtggtttttcactgaaaaggggggtacacctatagctttcttgatgttcaatcaatcagtcactgtgtcccagacatattcaataaacacagattggtaccaccca

SEQ ID NO: 304144 - DNA, 2471 bp, Homo sapiens
cacagatattatcagtcggtcccgttgtatttcatcacgaggatcgtgttggcatttctggctccagggagacgatgcagctgtgcgctctcattttaccaaagtggaacgcatccccaaggccctggaagtgacagagagccccctggtgaaggccatcttccatgcctgcagagccatgcatgcctcactccctgggaaagcagatgggcagcagagttccttctgccattgcgagagggccagtggccacctatggagcagcctcaacgtcagtggggccacctctgaccctgccctcaaccacgtggtccagctgctcacctgtgacctgctactgtcgctacggacagcgctctggcaaaaacaggccagtgccagccaggctgtgggggagacctaccacgcgtcaggcgctgaactggcgggcttccaacgggacctgggcagcctgcgcaggctggcacacagcttccgcccagcataccgcaaggtgttcctgcatgaagccaccgtgcgcctgatggcaggagccagccccacccgcacccaccagctgctggaacacagcctgcggcggcgcaccacgcagagcaccaagcacggagaggtggatgcctggcccggccagcgagagcgggccaccgccatcctgctggcctgccgccacctgcccctctccttcctctcctccccgggccagcgggcagtgctgctggccgaagctgcccgcaccctggagaaggtgggcgaccggcgctcctgcaacgactgccagcagatgattgttaagctgggtggtggcactgccattgccgcctcctgaccaccaggctcagcccacccctccacctctctctcgatttctctctctccccctcagcatcttcccgctgagagtggtggggaagagccttgtcttcttagctgtcacctgccgaggcttctgggccactcaggccagtgcacccctgggcagagccccttaaagctgctgtcactagatgcccatggtccagggcctggtgggcgtgagaggataggtggcagggcagaaactgggcagccctgacttgatagcagcagggggagctcccaagctgccaagcccctgcctccagccttcctgagtttctctctcctgaaccctactctctcctttttgcttcctcagtttttatcaggctttctctgggggacagcagtctctgagcaccagggagcagttgccctcaggcctgtgcccagcatgccctcccctttttatacgaatgttttctaccagtgtgcttgggtttgccatgatgcgaggctgagttgctgtagcgtcttgattctctccctgggtctgcgttccctcccctgggcctgactgagcctgctcattgtttttccctttattacacaggacagccaggggaggaggggggcccagccctgggaggctggtgggaggcagggggcaggcctgcggatgcatgaaataatgttggcattattttttaattttttaaaaaataaatggtatcttatttaattgtcctgttccttcccactccccgcctcctaggatgttagcccaagctcagggtaggcccagggggctgggagaaatgaagccacccatggggactggggaccaggggccttcagcatggcttctaggttccctcctccccctaccccatctcctacctccacagtacagactgtccccaacttaacagtggttcaacttaaaccatgtttcaactttacaattggtctgttggggtattaaatgaatttgtgacttaggatattttcatttatgatgggtttatcaggaagtaaccccatggtaagttgaggcatatctgtatatatttaaacctaattaattcttgagctgaaaataaataaaccaggatggcagggaccaacccctaatccctccccagcggcaagcccctcttttcagagtgggcagagggttgcctatggtgggcactaggaatgaggtcccctgcctcgatgcgggtcctaggagaaaaagtcctacttttctgggtccccaggtgcagcacctcccggagactgtttctcccatggcctcctgagtgatgggccctgcctccctgtgcctcatcctcaggctggttggagcagagggtgggcaggagccccagcacagactggggggtgctcacagcagggccaccttgatgcaggctggaatgttatccctggggtgtgcttggaccccacctgctttctttctctcctgcccctcccctactctcactgtaatttatggaccctgcccgcctgcgtgttgtgtgtatgtcctgtgccttttctcactattgtttgggtgtgggagggggtggtttttcactgaaaaggggggtacacctatagctttcttgatgttcaatcaatcagtcactgtgtcccagacatattcaataaacacagattggtaccaccca

SEQ ID NO: 304145 - DNA, 4469 bp, Homo sapiens
cgcccgggcgcaacgcaaacatggcggcgggtggcacccgtcggtgaggcggtgccgggcgggggttgtcgggtgtcatgggcggtggcgacggcaccgcccccgcgtctccctgagcgggacggcagggggggcttctgcgctgagccgggcgatggacgacagcggcgagctgggtggtctggagaccatggagaccctcacggagctgggcgacgagctgaccctgggagacatcgacgagatgctgcaatttgtcagtaatcaagtgggagagttccctgacttgttttcagaacagctgtgtagctcctttcctggcagtggtggtagtggtagcagcagcggcagcagtggcagcagcagcagcagcagcaatggcaggggcagcagcagcggagctgtggacccttcagtgcaacggtcattcacccaggtcacattaccttccttctctccctcggcggcctccccacaggctccaactctgcaagtcaaggtttctcccacctcagttcccaccacacccagggcaactcctattcttcagccccgcccccagccccagcctcaacctcaaactcagctgcaacaacagacggtaatgatcacgccaacattcagcaccactccgcagacgaggatcatccagcagcctttgatataccagaatgcagctactagctttcaagtccttcagcctcaagtccaaagcctggtgacatcctcccaggtacagccggtcaccattcagcagcaggtgcagacagtacaggcccagcgggtgctgacacaaacggccaatggcacgctgcagacccttgccccggctacggtgcagacagttgctgcgccacaggtgcagcaggtcccggtcctggtccagcctcagatcatcaagacagattcccttgttttgaccacactgaagacagatggcagccctgttatggctgcggtccagaacccggccctcaccgccctcaccacccctatccagacggctgcccttcaagtaccaaccctggtgggcagcagtgggaccattctgaccacaatgcctgtaatgatggggcaagagaaagtgcccattaagcaggtacctgggggagtcaagcagcttgagccccccaaagaaggagaaaggcggacaacccataatatcattgagaaacgatatcgctcctccatcaatgacaaaatcatcgaattgaaagacctggtcatggggacagacgccaagatgcacaagtctggcgttctgaggaaggccattgattacatcaaatacttgcagcaggtcaatcataaactgcgccaggagaacatggtgctgaagctggcaaatcaaaagaacaagcttctaaagggcatcgacctaggcagtctggtggacaatgaggtggacctgaagatcgaggactttaatcagaatgtccttctgatgtcccccccagcctctgactcagggtcccaggctggcttctctccctactccattgactctgagccaggaagccctctattggatgatgcaaaggtcaaagatgagccagactctcctcctgtggcgctgggcatggtagaccgctcacggattcttctgtgtgtcctcaccttcctgtgcctctcctttaaccccctgacttccctgctgcagtggggaggggcccacgactctgaccagcacccacactcaggctctggccgcagtgtcctgtcattcgagtcaggttctgggggctggtttgactggatgatgcctactcttctcttatggctggtaaatggtgtgattgtcctgagcgtctttgtgaagctgctggttcatggggagccagtgatccggccacactcgcgctcctcggtcaccttctggaggcaccggaaacaggcagatctggatctcgccagaggagattttgcagctgctgccggcaacctacaaacctgcctggcagttttgggccgggcactgcccacctcccgcctggacctggcctgcagcctctcctggaacgtgatccgctacagcctgcagaagctacgcctggtgcgctggctgctcaagaaagtcttccagtgccggcgggccacgccagccactgaggcaggctttgaagacgaagctaagaccagcgcccgggatgcggctctggcctatcaccggctgcaccagctgcacatcacagggaagcttcctgcaggatccgcctgttccgatgtacacatggcgttgtgtgccgtgaacctggctgaatgtgcagaggagaagatcccaccgagcacactggttgagatccatctgactgctgccatggggctcaagacccggtgtggaggcaagctgggcttcctggccagctacttcctcagccgagcccagagcctgtgtggccccgagcacagtgctgttcctgactccctgcgctggctctgccaccccctgggccagaagtttttcatggagcggagctggtctgtgaagtcagctgccaaggagagtctatactgtgcccagaggaacccagctgaccccattgcgcaggtccaccaggccttctgcaagaacctgctggagcgagctatagagtccttggtgaaacctcaggccaagaagaaggctggagaccaggaagaagagagctgtgaattctccagtgctctggagtacttgaaattacttcattcttttgtggactctgtgggggttatgagccccccactctccaggagctccgtgctcaagtccgccctgggtccagacatcatctgtcggtggtggacgtctgcaatcactgtggccatcagctggctccagggagacgatgcagctgtgcgctctcattttaccaaagtggaacgcatccccaaggccctggaagtgacagagagccccctggtgaaggccatcttccatgcctgcagagccatgcatgcctcactccctgggaaagcagatgggcagcagagttccttctgccattgcgagagggccagtggccacctatggagcagcctcaacgtcagtggggccacctctgaccctgccctcaaccacgtggtccagctgctcacctgtgacctgctactgtcgctacggacagcgctctggcaaaaacaggccagtgccagccaggctgtgggggagacctaccacgcgtcaggcgctgaactggcgggcttccaacgggacctgggcagcctgcgcaggctggcacacagcttccgcccagcataccgcaaggtgttcctgcatgaagccaccgtgcgcctgatggcaggagccagccccacccgcacccaccagctgagttgctgtagcgtcttgattctctccctgggtctgcgttccctcccctgggcctgactgagcctgctcattgtttttccctttattacacaggacagccaggggaggaggggggcccagccctgggaggctggtgggaggcagggggcaggcctgcggatgcatgaaataatgttggcattattttttaattttttaaaaaataaatggtatcttatttaattgtcctgttccttcccactccccgcctcctaggatgttagcccaagctcagggtaggcccagggggctgggagaaatgaagccacccatggggactggggaccaggggccttcagcatggcttctaggttccctcctccccctaccccatctcctacctccacagtacagactgtccccaacttaacagtggttcaacttaaaccatgtttcaactttacaattggtctgttggggtattaaatgaatttgtgacttaggatattttcatttatgatgggtttatcaggaagtaaccccatggtaagttgaggcatatctgtatatatttaaacctaattaattcttgagctgaaaataaataaaccaggatggcagggaccaacccctaatccctccccagcggcaagcccctcttttcagagtgggcagagggttgcctatggtgggcactaggaatgaggtcccctgcctcgatgcgggtcctaggagaaaaagtcctacttttctgggtccccaggtgcagcacctcccggagactgtttctcccatggcctcctgagtgatgggccctgcctccctgtgcctcatcctcaggctggttggagcagagggtgggcaggagccccagcacagactggggggtgctcacagcagggccaccttgatgcaggctggaatgttatccctggggtgtgcttggaccccacctgctttctttctctcctgcccctcccctactctcactgtaatttatggaccctgcccgcctgcgtgttgtgtgtatgtcctgtgccttttctcactattgtttgggtgtgggagggggtggtttttcactgaaaaggggggtacacctatagctttcttgatgttcaatcaatcagtcactgtgtcccagacatattcaataaacacagattggtaccaccca

SEQ ID NO: 304146 - DNA, 4233 bp, Homo sapiens
cgcccgggcgcaacgcaaacatggcggcgggtggcacccgtcggtgaggcggtgccgggcgggggttgtcgggtgtcatgggcggtggcgacggcaccgcccccgcgtctccctgagcgggacggcagggggggcttctgcgctgagccgggcgatggacgacagcggcgagctgggtggtctggagaccatggagaccctcacggagctgggcgacgagctgaccctgggagacatcgacgagatgctgcaatttgtcagtaatcaagtgggagagttccctgacttgttttcagaacagctgtgtagctcctttcctggcagtggtggtagtggtagcagcagcggcagcagtggcagcagcagcagcagcagcaatggcaggggcagcagcagcggagctgtggacccttcagtgcaacggtcattcacccaggtcacattaccttccttctctccctcggcggcctccccacaggctccaactctgcaagtcaaggtttctcccacctcagttcccaccacacccagggcaactcctattcttcagccccgcccccagccccagcctcaacctcaaactcagctgcaacaacagacggtaatgatcacgccaacattcagcaccactccgcagacgaggatcatccagcagcctttgatataccagaatgcagctactagctttcaagtccttcagcctcaagtccaaagcctggtgacatcctcccaggtacagccggtcaccattcagcagcaggtgcagacagtacaggcccagcgggtgctgacacaaacggccaatggcacgctgcagacccttgccccggctacggtgcagacagttgctgcgccacaggtgcagcaggtcccggtcctggtccagcctcagatcatcaagacagattcccttgttttgaccacactgaagacagatggcagccctgttatggctgcggtccagaacccggccctcaccgccctcaccacccctatccagacggctgcccttcaagtaccaaccctggtgggcagcagtgggaccattctgaccacaatgcctgtaatgatggggcaagagaaagtgcccattaagcaggtacctgggggagtcaagcagcttgagccccccaaagaaggagaaaggcggacaacccataatatcattgagaaacgatatcgctcctccatcaatgacaaaatcatcgaattgaaagacctggtcatggggacagacgccaagatgcacaagtctggcgttctgaggaaggccattgattacatcaaatacttgcagcaggtcaatcataaactgcgccaggagaacatggtgctgaagctggcaaatcaaaagaacaagcttctaaagggcatcgacctaggcagtctggtggacaatgaggtggacctgaagatcgaggactttaatcagaatgtccttctgatgtcccccccagcctctgactcagggtcccaggctggcttctctccctactccattgactctgagccaggaagccctctattggatgatgcaaaggtcaaagatgagccagactctcctcctgtggcgctgggcatggtagaccgctcacggattcttctgtgtgtcctcaccttcctgtgcctctcctttaaccccctgacttccctgctgcagtggggaggggcccacgactctgaccagcacccacactcaggctctggccgcagtgtcctgtcattcgagtcaggttctgggggctggtttgactggatgatgcctactcttctcttatggctggtaaatggtgtgattgtcctgagcgtctttgtgaagctgctggttcatggggagccagtgatccggccacactcgcgctcctcggtcaccttctggaggcaccggaaacaggcagatctggatctcgccagaggagattttgcagctgctgccggcaacctacaaacctgcctggcagttttgggccgggcactgcccacctcccgcctggacctggcctgcagcctctcctggaacgtgatccgctacagcctgcagaagctacgcctggtgcgctggctgctcaagaaagtcttccagtgccggcgggccacgccagccactgaggcaggctttgaagacgaagctaagaccagcgcccgggatgcggctctggcctatcaccggctgcaccagctgcacatcacagggaagcttcctgcaggatccgcctgttccgatgtacacatggcgttgtgtgccgtgaacctggctgaatgtgcagaggagaagatcccaccgagcacactggttgagatccatctgactgctgccatggggctcaagacccggtgtggaggcaagctgggcttcctggccagctacttcctcagccgagcccagagcctgtgtggccccgagcacagtgctgttcctgactccctgcgctggctctgccaccccctgggccagaagtttttcatggagcggagctggtctgtgaagtcagctgccaaggagagtctatactgtgcccagaggaacccagctgaccccattgcgcaggtccaccaggccttctgcaagaacctgctggagcgagctatagagtccttggtgaaacctcaggccaagaagaaggctggagaccaggaagaagagagctgtgaattctccagtgctctggagtacttgaaattacttcattcttttgtggactctgtgggggttatgagccccccactctccaggagctccgtgctcaagtccgccctgggtccagacatcatctgtcggtggtggacgtctgcaatcactgtggccatcagctggctccagggagacgatgcagctgtgcgctctcattttaccaaagtggaacgcatccccaaggccctggaagtgacagagagccccctggtgaaggccatcttccatctttttgcttcctcagtttttatcaggctttctctgggggacagcagtctctgagcaccagggagcagttgccctcaggcctgtgcccagcatgccctcccctttttatacgaatgttttctaccagtgtgcttgggtttgccatgatgcgaggctgagttgctgtagcgtcttgattctctccctgggtctgcgttccctcccctgggcctgactgagcctgctcattgtttttccctttattacacaggacagccaggggaggaggggggcccagccctgggaggctggtgggaggcagggggcaggcctgcggatgcatgaaataatgttggcattattttttaattttttaaaaaataaatggtatcttatttaattgtcctgttccttcccactccccgcctcctaggatgttagcccaagctcagggtaggcccagggggctgggagaaatgaagccacccatggggactggggaccaggggccttcagcatggcttctaggttccctcctccccctaccccatctcctacctccacagtacagactgtccccaacttaacagtggttcaacttaaaccatgtttcaactttacaattggtctgttggggtattaaatgaatttgtgacttaggatattttcatttatgatgggtttatcaggaagtaaccccatggtaagttgaggcatatctgtatatatttaaacctaattaattcttgagctgaaaataaataaaccaggatggcagggaccaacccctaatccctccccagcggcaagcccctcttttcagagtgggcagagggttgcctatggtgggcactaggaatgaggtcccctgcctcgatgcgggtcctaggagaaaaagtcctacttttctgggtccccaggtgcagcacctcccggagactgtttctcccatggcctcctgagtgatgggccctgcctccctgtgcctcatcctcaggctggttggagcagagggtgggcaggagccccagcacagactggggggtgctcacagcagggccaccttgatgcaggctggaatgttatccctggggtgtgcttggaccccacctgctttctttctctcctgcccctcccctactctcactgtaatttatggaccctgcccgcctgcgtgttgtgtgtatgtcctgtgccttttctcactattgtttgggtgtgggagggggtggtttttcactgaaaaggggggtacacctatagctttcttgatgttcaatcaatcagtcactgtgtcccagacatattcaataaacacagattggtaccaccca

SEQ ID NO: 304147 - DNA, 2362 bp, Homo sapiens
cgcttcctctagcatgactgctacacgctccctggtgaaacaattctttaggcttcataagtcatgctgtgcatgctgtcacgtgtgcgagctcagtagtcgtaagtacgttccttctgccattgcgagagggccagtggccacctatggagcagcctcaacgtcagtggggccacctctgaccctgccctcaaccacgtggtccagctgctcacctgtgacctgctactgtcgctacggacagcgctctggcaaaaacaggccagtgccagccaggctgtgggggagacctaccacgcgtcaggcgctgaactggcgggcttccaacgggacctgggcagcctgcgcaggctggcacacagcttccgcccagcataccgcaaggtgttcctgcatgaagccaccgtgcgcctgatggcaggagccagccccacccgcacccaccagctgctggaacacagcctgcggcggcgcaccacgcagagcaccaagcacggagaggtggatgcctggcccggccagcgagagcgggccaccgccatcctgctggcctgccgccacctgcccctctccttcctctcctccccgggccagcgggcagtgctgctggccgaagctgcccgcaccctggagaaggtgggcgaccggcgctcctgcaacgactgccagcagatgattgttaagctgggtggtggcactgccattgccgcctcctgaccaccaggctcagcccacccctccacctctctctcgatttctctctctccccctcagcatcttcccgctgagagtggtggggaagagccttgtcttcttagctgtcacctgccgaggcttctgggccactcaggccagtgcacccctgggcagagccccttaaagctgctgtcactagatgcccatggtccagggcctggtgggcgtgagaggataggtggcagggcagaaactgggcagccctgacttgatagcagcagggggagctcccaagctgccaagcccctgcctccagccttcctgagtttctctctcctgaaccctactctctcctttttgcttcctcagtttttatcaggctttctctgggggacagcagtctctgagcaccagggagcagttgccctcaggcctgtgcccagcatgccctcccctttttatacgaatgttttctaccagtgtgcttgggtttgccatgatgcgaggctgagttgctgtagcgtcttgattctctccctgggtctgcgttccctcccctgggcctgactgagcctgctcattgtttttccctttattacacaggacagccaggggaggaggggggcccagccctgggaggctggtgggaggcagggggcaggcctgcggatgcatgaaataatgttggcattattttttaattttttaaaaaataaatggtatcttatttaattgtcctgttccttcccactccccgcctcctaggatgttagcccaagctcagggtaggcccagggggctgggagaaatgaagccacccatggggactggggaccaggggccttcagcatggcttctaggttccctcctccccctaccccatctcctacctccacagtacagactgtccccaacttaacagtggttcaacttaaaccatgtttcaactttacaattggtctgttggggtattaaatgaatttgtgacttaggatattttcatttatgatgggtttatcaggaagtaaccccatggtaagttgaggcatatctgtatatatttaaacctaattaattcttgagctgaaaataaataaaccaggatggcagggaccaacccctaatccctccccagcggcaagcccctcttttcagagtgggcagagggttgcctatggtgggcactaggaatgaggtcccctgcctcgatgcgggtcctaggagaaaaagtcctacttttctgggtccccaggtgcagcacctcccggagactgtttctcccatggcctcctgagtgatgggccctgcctccctgtgcctcatcctcaggctggttggagcagagggtgggcaggagccccagcacagactggggggtgctcacagcagggccaccttgatgcaggctggaatgttatccctggggtgtgcttggaccccacctgctttctttctctcctgcccctcccctactctcactgtaatttatggaccctgcccgcctgcgtgttgtgtgtatgtcctgtgccttttctcactattgtttgggtgtgggagggggtggtttttcactgaaaaggggggtacacctatagctttcttgatgttcaatcaatcagtcactgtgtcccagacatattcaataaacacagattggtaccaccca

SEQ ID NO: 304148 - DNA, 2673 bp, Homo sapiens
  misc_feature (366)..(366): n is a, c, g, or t
atgtactcgttgttcggctgttgttactaccaacttgttgtgttgctttcgtggctgtgtctactattgcgttatcttctttttgtgtctgactgaagcttgctccccctctaagtacctctgtggttggctctcctctggcttcttctctctctcggtggggttcctccccgtggtttttctctctgcgactaagtgctccctgagcccctctttccgtactgttgcccgtgtgcacaaaaaacacctgtggcccaaacgtcaccgaaacatctgccccttgcgaaccagctcatcaaacttcatcctgaatctcctcgccactgcagccacgtttgtagaccagggaagagagacttgattcangcgctcataaatcacacggaggtgtgtcataacctgggaccggatctgacggctttcttgggatccaaccatgcgcacatgctcgaaatgctttagggtgtgctgtctgtccttctgttctgcgcggacatacttctttagctgtggtccagctgctcacctgtgacctgctactgtcgctacggacagcgctctggcaaaaacaggccagtgccagccaggctgtgggggagacctaccacgcgtcaggcgctgaactggcgggcttccaacgggacctgggcagcctgcgcaggctggcacacagcttccgcccagcataccgcaaggtgttcctgcatgaagccaccgtgcgcctgatggcaggagccagccccacccgcacccaccagctgctggaacacagcctgcggcggcgcaccacgcagagcaccaagcacggagaggtggatgcctggcccggccagcgagagcgggccaccgccatcctgctggcctgccgccacctgcccctctccttcctctcctccccgggccagcgggcagtgctgctggccgaagctgcccgcaccctggagaaggtgggcgaccggcgctcctgcaacgactgccagcagatgattgttaagctgggtggtggcactgccattgccgcctcctgaccaccaggctcagcccacccctccacctctctctcgatttctctctctccccctcagcatcttcccgctgagagtggtggggaagagccttgtcttcttagctgtcacctgccgaggcttctgggccactcaggccagtgcacccctgggcagagccccttaaagctgctgtcactagatgcccatggtccagggcctggtgggcgtgagaggataggtggcagggcagaaactgggcagccctgacttgatagcagcagggggagctcccaagctgccaagcccctgcctccagccttcctgagtttctctctcctgaaccctactctctcctttttgcttcctcagtttttatcaggctttctctgggggacagcagtctctgagcaccagggagcagttgccctcaggcctgtgcccagcatgccctcccctttttatacgaatgttttctaccagtgtgcttgggtttgccatgatgcgaggctgagttgctgtagcgtcttgattctctccctgggtctgcgttccctcccctgggcctgactgagcctgctcattgtttttccctttattacacaggacagccaggggaggaggggggcccagccctgggaggctggtgggaggcagggggcaggcctgcggatgcatgaaataatgttggcattattttttaattttttaaaaaataaatggtatcttatttaattgtcctgttccttcccactccccgcctcctaggatgttagcccaagctcagggtaggcccagggggctgggagaaatgaagccacccatggggactggggaccaggggccttcagcatggcttctaggttccctcctccccctaccccatctcctacctccacagtacagactgtccccaacttaacagtggttcaacttaaaccatgtttcaactttacaattggtctgttggggtattaaatgaatttgtgacttaggatattttcatttatgatgggtttatcaggaagtaaccccatggtaagttgaggcatatctgtatatatttaaacctaattaattcttgagctgaaaataaataaaccaggatggcagggaccaacccctaatccctccccagcggcaagcccctcttttcagagtgggcagagggttgcctatggtgggcactaggaatgaggtcccctgcctcgatgcgggtcctaggagaaaaagtcctacttttctgggtccccaggtgcagcacctcccggagactgtttctcccatggcctcctgagtgatgggccctgcctccctgtgcctcatcctcaggctggttggagcagagggtgggcaggagccccagcacagactggggggtgctcacagcagggccaccttgatgcaggctggaatgttatccctggggtgtgcttggaccccacctgctttctttctctcctgcccctcccctactctcactgtaatttatggaccctgcccgcctgcgtgttgtgtgtatgtcctgtgccttttctcactattgtttgggtgtgggagggggtggtttttcactgaaaaggggggtacacctatagctttcttgatgttcaatcaatcagtcactgtgtcccagacatattcaataaacacagattggtaccaccca

SEQ ID NO: 304149 - DNA, 1936 bp, Homo sapiens
ttccattctgctgctccctgctgagagcccatcagcggctccccattgcctaccaggaccagaatccacttggcagcactgaagaccctccctgaagactgagatataaaggcatcaaaaagagcttgagattttaagaaatgacagacctcagccttgcccttcacccaccagtggctcatacctaagcgctgcagactttacccgcacacctctagactctcttcctttctaaagatacggaaagaggataccaaacctctctggtaccagcccaactgtccctcctgaccaccaggctcagcccacccctccacctctctctcgatttctctctctccccctcagcatcttcccgctgagagtggtggggaagagccttgtcttcttagctgtcacctgccgaggcttctgggccactcaggccagtgcacccctgggcagagccccttaaagctgctgtcactagatgcccatggtccagggcctggtgggcgtgagaggataggtggcagggcagaaactgggcagccctgacttgatagcagcagggggagctcccaagctgccaagcccctgcctccagccttcctgagtttctctctcctgaaccctactctctcctttttgcttcctcagtttttatcaggctttctctgggggacagcagtctctgagcaccagggagcagttgccctcaggcctgtgcccagcatgccctcccctttttatacgaatgttttctaccagtgtgcttgggtttgccatgatgcgaggctgagttgctgtagcgtcttgattctctccctgggtctgcgttccctcccctgggcctgactgagcctgctcattgtttttccctttattacacaggacagccaggggaggaggggggcccagccctgggaggctggtgggaggcagggggcaggcctgcggatgcatgaaataatgttggcattattttttaattttttaaaaaataaatggtatcttatttaattgtcctgttccttcccactccccgcctcctaggatgttagcccaagctcagggtaggcccagggggctgggagaaatgaagccacccatggggactggggaccaggggccttcagcatggcttctaggttccctcctccccctaccccatctcctacctccacagtacagactgtccccaacttaacagtggttcaacttaaaccatgtttcaactttacaattggtctgttggggtattaaatgaatttgtgacttaggatattttcatttatgatgggtttatcaggaagtaaccccatggtaagttgaggcatatctgtatatatttaaacctaattaattcttgagctgaaaataaataaaccaggatggcagggaccaacccctaatccctccccagcggcaagcccctcttttcagagtgggcagagggttgcctatggtgggcactaggaatgaggtcccctgcctcgatgcgggtcctaggagaaaaagtcctacttttctgggtccccaggtgcagcacctcccggagactgtttctcccatggcctcctgagtgatgggccctgcctccctgtgcctcatcctcaggctggttggagcagagggtgggcaggagccccagcacagactggggggtgctcacagcagggccaccttgatgcaggctggaatgttatccctggggtgtgcttggaccccacctgctttctttctctcctgcccctcccctactctcactgtaatttatggaccctgcccgcctgcgtgttgtgtgtatgtcctgtgccttttctcactattgtttgggtgtgggagggggtggtttttcactgaaaaggggggtacacctatagctttcttgatgttcaatcaatcagtcactgtgtcccagacatattcaataaacacagattggtaccaccca

SEQ ID NO: 304150 - DNA, 3125 bp, Homo sapiens
cgcccgggcgcaacgcaaacatggcggcgggtggcacccgtcggtgaggcggtgccgggcgggggttgtcgggtgtcatgggcggtggcgacggcaccgcccccgcgtctccctgagcgggacggcagggggggcttctgcgctgagccgggcgatggacgacagcggcgagctgggtggtctggagaccatggagaccctcacggagctgggcgacgagctgaccctgggagacatcgacgagatgctgcaatttgtcagtaatcaagtgggagagttccctgacttgttttcagaacagctgtgtagctcctttcctggcagtggtggtagtggtagcagcagcggcagcagtggcagcagcagcagcagcagcaatggcaggggcagcagcagcggagctgtggacccttcagtgcaacggtcattcacccaggtcacattaccttccttctctccctcggcggcctccccacaggctccaactctgcaagtcaaggtttctcccacctcagttcccaccacacccagggcaactcctattcttcagccccgcccccagccccagcctcaacctcaaactcagctgcaacaacagacggtaatgatcacgccaacattcagcaccactccgcagacgaggatcatccagcagcctttgatataccagaatgcagctactagctttcaagtccttcagcctcaagtccaaagcctggtgacatcctcccaggtacagccggtcaccattcagcagcaggtgcagacagtacaggcccagcgggtgctgacacaaacggccaatggcacgctgcagacccttgccccggctacggtgcagacagttgctgcgccacaggtgcagcaggtcccggtcctggtccagcctcagatcatcaagacagattcccttgttttgaccacactgaagacagatggcagccctgttatggctgcggtccagaacccggccctcaccgccctcaccacccctatccagacggctgcccttcaagtaccaaccctggtgggcagcagtgggaccattctgaccacaatgcctgtaatgatggggcaagagaaagtgcccattaagcaggtacctgggggagtcaagcagcttgagccccccaaagaaggagaaaggcggacaacccataatatcattgagaaacgatatcgctcctccatcaatgacaaaatcatcgaattgaaagacctggtcatggggacagacgccaagatgcacaagtctggcgttctgaggaaggccattgattacatcaaatacttgcagcaggtcaatcataaactgcgccaggagaacatggtgctgaagctggcaaatcaaaagaacaagcttctaaagggcatcgacctaggcagtctggtggacaatgaggtggacctgaagatcgaggactttaatcagaatgtccttctgatgtcccccccagcctctgactcagggtcccaggctggcttctctccctactccattgactctgagccaggaagccctctattggatgatgcaaaggtcaaagatgagccagactctcctcctgtggcgctgggcatggtagaccgctcacggattcttctgtgtgtcctcaccttcctgtgcctctcctttaaccccctgacttccctgctgcagtggggaggggcccacgactctgaccagcacccacactcaggctctggccgcagtgtcctgtcattcgagtcaggttctgggggctggtttgactggatgatgcctactcttctcttatggctggtaaatggtgtgattgtcctgagcgtctttgtgaagctgctggttcatggggagccagtgatccggccacactcgcgctcctcggtcaccttctggaggcaccggaaacaggcagatctggatctcgccagaggagattttgcagctgctgccggcaacctacaaacctgcctggcagttttgggccgggcactgcccacctcccgcctggacctggcctgcagcctctcctggaacgtgatccgctacagcctgcagaagctacgcctggtgcgctggctgctcaagaaagtcttccagtgccggcgggccacgccagccactgaggcaggctttgaagacgaagctaagaccagcgcccgggatgcggctctggcctatcaccggctgcaccagctgcacatcacagggaagcttcctgcaggatccgcctgttccgatgtacacatggcgttgtgtgccgtgaacctggctgaatgtgcagaggagaagatcccaccgagcacactggttgagatccatctgactgctgccatggggctcaagacccggtgtggaggcaagctgggcttcctggccagctacttcctcagccgagcccagagcctgtgtggccccgagcacagtgctgttcctgactccctgcgctggctctgccaccccctgggccagaagtttttcatggagcggagctggtctgtgaagtcagctgccaaggagagtctatactgtgcccagaggaacccagctgaccccattgcgcaggtccaccaggccttctgcaagaacctgctggagcgagctatagagtccttggtgaaacctcaggccaagaagaaggctggagaccaggaagaagagagctgtgaattctccagtgctctggagtacttgaaattacttcattcttttgtggactctgtgggggttatgagccccccactctccaggagctccgtgctcaagtccgccctgggtccagacatcatctgtcggtggtggacgtctgcaatcactgtggccatcagctggctccagggagacgatgcagctgtgcgctctcattttaccaaagtggaacgcatccccaaggccctggaagtgacagagagccccctggtgaaggccatcttccatgcctgcagagccatgcatgcctcactccctgggaaagcagatgggcagcagagttccttctgccattgcgagagggccagtggccacctatggagcagcctcaacgtcagtggggccacctctgaccctgccctcaaccacgtggcagctgccaacaagaagcattagaacaaaccatgctgggttaataaattgcctcattcgt

SEQ ID NO: 304151 - DNA, 3210 bp, Homo sapiens
cgcccgggcgcaacgcaaacatggcggcgggtggcacccgtcggtgaggcggtgccgggcgggggttgtcgggtgtcatgggcggtggcgacggcaccgcccccgcgtctccctgagcgggacggcagggggggcttctgcgctgagccgggcgatggacgacagcggcgagctgggtggtctggagaccatggagaccctcacggagctgggcgacgagctgaccctgggagacatcgacgagatgctgcaatttgtcagtaatcaagtgggagagttccctgacttgttttcagaacagctgtgtagctcctttcctggcagtggtggtagtggtagcagcagcggcagcagtggcagcagcagcagcagcagcaatggcaggggcagcagcagcggagctgtggacccttcagtgcaacggtcattcacccaggtcacattaccttccttctctccctcggcggcctccccacaggctccaactctgcaagtcaaggtttctcccacctcagttcccaccacacccagggcaactcctattcttcagccccgcccccagccccagcctcaacctcaaactcagctgcaacaacagacggtaatgatcacgccaacattcagcaccactccgcagacgaggatcatccagcagcctttgatataccagaatgcagctactagctttcaagtccttcagcctcaagtccaaagcctggtgacatcctcccaggtacagccggtcaccattcagcagcaggtgcagacagtacaggcccagcgggtgctgacacaaacggccaatggcacgctgcagacccttgccccggctacggtgcagacagttgctgcgccacaggtgcagcaggtcccggtcctggtccagcctcagatcatcaagacagattcccttgttttgaccacactgaagacagatggcagccctgttatggctgcggtccagaacccggccctcaccgccctcaccacccctatccagacggctgcccttcaagtaccaaccctggtgggcagcagtgggaccattctgaccacaatgcctgtaatgatggggcaagagaaagtgcccattaagcaggtacctgggggagtcaagcagcttgagccccccaaagaaggagaaaggcggacaacccataatatcattgagaaacgatatcgctcctccatcaatgacaaaatcatcgaattgaaagacctggtcatggggacagacgccaagatgcacaagtctggcgttctgaggaaggccattgattacatcaaatacttgcagcaggtcaatcataaactgcgccaggagaacatggtgctgaagctggcaaatcaaaagaacaagcttctaaagggcatcgacctaggcagtctggtggacaatgaggtggacctgaagatcgaggactttaatcagaatgtccttctgatgtcccccccagcctctgactcagggtcccaggctggcttctctccctactccattgactctgagccaggaagccctctattggatgatgcaaaggtcaaagatgagccagactctcctcctgtggcgctgggcatggtagaccgctcacggattcttctgtgtgtcctcaccttcctgtgcctctcctttaaccccctgacttccctgctgcagtggggaggggcccacgactctgaccagcacccacactcaggctctggccgcagtgtcctgtcattcgagtcaggttctgggggctggtttgactggatgatgcctactcttctcttatggctggtaaatggtgtgattgtcctgagcgtctttgtgaagctgctggttcatggggagccagtgatccggccacactcgcgctcctcggtcaccttctggaggcaccggaaacaggcagatctggatctcgccagaggagattttgcagctgctgccggcaacctacaaacctgcctggcagttttgggccgggcactgcccacctcccgcctggacctggcctgcagcctctcctggaacgtgatccgctacagcctgcagaagctacgcctggtgcgctggctgctcaagaaagtcttccagtgccggcgggccacgccagccactgaggcaggctttgaagacgaagctaagaccagcgcccgggatgcggctctggcctatcaccggctgcaccagctgcacatcacagggaagcttcctgcaggatccgcctgttccgatgtacacatggcgttgtgtgccgtgaacctggctgaatgtgcagaggagaagatcccaccgagcacactggttgagatccatctgactgctgccatggggctcaagacccggtgtggaggcaagctgggcttcctggccagctacttcctcagccgagcccagagcctgtgtggccccgagcacagtgctgttcctgactccctgcgctggctctgccaccccctgggccagaagtttttcatggagcggagctggtctgtgaagtcagctgccaaggagagtctatactgtgcccagaggaacccagctgaccccattgcgcaggtccaccaggccttctgcaagaacctgctggagcgagctatagagtccttggtgaaacctcaggccaagaagaaggctggagaccaggaagaagagagctgtgaattctccagtgctctggagtacttgaaattacttcattcttttgtggactctgtgggggttatgagccccccactctccaggagctccgtgctcaagtccgccctgggtccagacatcatctgtcggtggtggacgtctgcaatcactgtggccatcagctggctccagggagacgatgcagctgtgcgctctcattttaccaaagtggaacgcatccccaaggccctggaagtgacagagtgcgtaaccctccttggccactcacttgcttctctccaggggaatcttgtttgagttagcaggagcaaactggactgggtgggcgtgttggggtgaagggtcaggactgcatgacaggtgggcggctagaaaagtcgggggtgagggcaccatggagaactcaagttgggccagcaggtcctctgtgcaagtgtcctgctctgcacaacacgacagttgtcccagcagctgtcagcactgtgtccgggtcctcctccctgcagccttcatggcgccacaggctgaaaagaagagacgagagcagtgtggcccccagc

SEQ ID NO: 304152 - DNA, 3467 bp, Homo sapiens
cgcccgggcgcaacgcaaacatggcggcgggtggcacccgtcggtgaggcggtgccgggcgggggttgtcgggtgtcatgggcggtggcgacggcaccgcccccgcgtctccctgagcgggacggcagggggggcttctgcgctgagccgggcgatggacgacagcggcgagctgggtggtctggagaccatggagaccctcacggagctgggcgacgagctgaccctgggagacatcgacgagatgctgcaatttgtcagtaatcaagtgggagagttccctgacttgttttcagaacagctgtgtagctcctttcctggcagtggtggtagtggtagcagcagcggcagcagtggcagcagcagcagcagcagcaatggcaggggcagcagcagcggagctgtggacccttcagtgcaacggtcattcacccaggtcacattaccttccttctctccctcggcggcctccccacaggctccaactctgcaagtcaaggtttctcccacctcagttcccaccacacccagggcaactcctattcttcagccccgcccccagccccagcctcaacctcaaactcagctgcaacaacagacggtaatgatcacgccaacattcagcaccactccgcagacgaggatcatccagcagcctttgatataccagaatgcagctactagctttcaagtccttcagcctcaagtccaaagcctggtgacatcctcccaggtacagccggtcaccattcagcagcaggtgcagacagtacaggcccagcgggtgctgacacaaacggccaatggcacgctgcagacccttgccccggctacggtgcagacagttgctgcgccacaggtgcagcaggtcccggtcctggtccagcctcagatcatcaagacagattcccttgttttgaccacactgaagacagatggcagccctgttatggctgcggtccagaacccggccctcaccgccctcaccacccctatccagacggctgcccttcaagtaccaaccctggtgggcagcagtgggaccattctgaccacaatgcctgtaatgatggggcaagagaaagtgcccattaagcaggtacctgggggagtcaagcagcttgagccccccaaagaaggagaaaggcggacaacccataatatcattgagaaacgatatcgctcctccatcaatgacaaaatcatcgaattgaaagacctggtcatggggacagacgccaagatgcacaagtctggcgttctgaggaaggccattgattacatcaaatacttgcagcaggtcaatcataaactgcgccaggagaacatggtgctgaagctggcaaatcaaaagaacaagcttctaaagggcatcgacctaggcagtctggtggacaatgaggtggacctgaagatcgaggactttaatcagaatgtccttctgatgtcccccccagcctctgactcagggtcccaggctggcttctctccctactccattgactctgagccaggaagccctctattggatgatgcaaaggtcaaagatgagccagactctcctcctgtggcgctgggcatggtagaccgctcacggattcttctgtgtgtcctcaccttcctgtgcctctcctttaaccccctgacttccctgctgcagtggggaggggcccacgactctgaccagcacccacactcaggctctggccgcagtgtcctgtcattcgagtcaggttctgggggctggtttgactggatgatgcctactcttctcttatggctggtaaatggtgtgattgtcctgagcgtctttgtgaagctgctggttcatggggagccagtgatccggccacactcgcgctcctcggtcaccttctggaggcaccggaaacaggcagatctggatctcgccagaggagattttgcagctgctgccggcaacctacaaacctgcctggcagttttgggccgggcactgcccacctcccgcctggacctggcctgcagcctctcctggaacgtgatccgctacagcctgcagaagctacgcctggtgcgctggctgctcaagaaagtcttccagtgccggcgggccacgccagccactgaggcaggctttgaagacgaagctaagaccagcgcccgggatgcggctctggcctatcaccggctgcaccagctgcacatcacagggaagcttcctgcaggatccgcctgttccgatgtacacatggcgttgtgtgccgtgaacctggctgaatgtgcagaggagaagatcccaccgagcacactggttgagatccatctgactgctgccatggggctcaagacccggtgtggaggcaagctgggcttcctggccagctacttcctcagccgagcccagagcctgtgtggccccgagcacagtgctgttcctgactccctgcgctggctctgccaccccctgggccagaagtttttcatggagcggagctggtctgtgaagtcagctgccaaggagagtctatactgtgcccagaggaacccagctgaccccattgcgcaggtccaccaggccttctgcaagaacctgctggagcgagctatagagtccttggtgaaacctcaggccaagaagaaggctggagaccaggaagaagagagctgtgaattctccagtgctctggagtacttgaaattacttcattcttttgtggactctgtgggggttatgagccccccactctccaggagctccgtgctcaagtccgccctgggtccagacatcatctgtcggtggtggacgtctgcaatcactgtggccatcagctggctccagggagacgatgcagctgtgcgctctcattttaccaaagtggaacgcatccccaaggccctggaagtgacagaccacctccacccccaccatcaaccctggcaactttgtcctgtaactaaaatagcctttagcacatggcataaccggagagcttttgacattcctctttggagattcatgtctgcgtcttgggggcattcggcactagtgatgggcagccctgcctgctgactccccggctgtttctaattggatctgagtattctaagagaaactgtaaaatgctccaagacagaaaggccccacgaggtcctatccttagagccaaggctgtagcatttcctatcaagcagacccttaaccggcgcacaggaaggagctgagaagagtgagtatacacaggcttgaagtcctttgttccctgaagtagatgtgacaccctaatttcattgaagtagccccatttgtaagcactctgactaggtaagcacccagcccggtatagcattccacctgtatgtgtgtctcccccagtcgatgtgcctgaggacactgagactcagcaggtaagttgtccaaagtcacctcgctccagagcagcagagcttccatggacagccaagacacccctgcaggcactgctgcc

SEQ ID NO: 304153 - DNA, 2881 bp, Homo sapiens
cgcccgggcgcaacgcaaacatggcggcgggtggcacccgtcggtgaggcggtgccgggcgggggttgtcgggtgtcatgggcggtggcgacggcaccgcccccgcgtctccctgagcgggacggcagggggggcttctgcgctgagccgggcgatggacgacagcggcgagctgggtggtctggagaccatggagaccctcacggagctgggcgacgagctgaccctgggagacatcgacgagatgctgcaatttgtcagtaatcaagtgggagagttccctgacttgttttcagaacagctgtgtagctcctttcctggcagtggtggtagtggtagcagcagcggcagcagtggcagcagcagcagcagcagcaatggcaggggcagcagcagcggagctgtggacccttcagtgcaacggtcattcacccaggtcacattaccttccttctctccctcggcggcctccccacaggctccaactctgcaagtcaaggtttctcccacctcagttcccaccacacccagggcaactcctattcttcagccccgcccccagccccagcctcaacctcaaactcagctgcaacaacagacggtaatgatcacgccaacattcagcaccactccgcagacgaggatcatccagcagcctttgatataccagaatgcagctactagctttcaagtccttcagcctcaagtccaaagcctggtgacatcctcccaggtacagccggtcaccattcagcagcaggtgcagacagtacaggcccagcgggtgctgacacaaacggccaatggcacgctgcagacccttgccccggctacggtgcagacagttgctgcgccacaggtgcagcaggtcccggtcctggtccagcctcagatcatcaagacagattcccttgttttgaccacactgaagacagatggcagccctgttatggctgcggtccagaacccggccctcaccgccctcaccacccctatccagacggctgcccttcaagtaccaaccctggtgggcagcagtgggaccattctgaccacaatgcctgtaatgatggggcaagagaaagtgcccattaagcaggtacctgggggagtcaagcagcttgagccccccaaagaaggagaaaggcggacaacccataatatcattgagaaacgatatcgctcctccatcaatgacaaaatcatcgaattgaaagacctggtcatggggacagacgccaagatgcacaagtctggcgttctgaggaaggccattgattacatcaaatacttgcagcaggtcaatcataaactgcgccaggagaacatggtgctgaagctggcaaatcaaaagaacaagcttctaaagggcatcgacctaggcagtctggtggacaatgaggtggacctgaagatcgaggactttaatcagaatgtccttctgatgtcccccccagcctctgactcagggtcccaggctggcttctctccctactccattgactctgagccaggaagccctctattggatgatgcaaaggtcaaagatgagccagactctcctcctgtggcgctgggcatggtagaccgctcacggattcttctgtgtgtcctcaccttcctgtgcctctcctttaaccccctgacttccctgctgcagtggggaggggcccacgactctgaccagcacccacactcaggctctggccgcagtgtcctgtcattcgagtcaggttctgggggctggtttgactggatgatgcctactcttctcttatggctggtaaatggtgtgattgtcctgagcgtctttgtgaagctgctggttcatggggagccagtgatccggccacactcgcgctcctcggtcaccttctggaggcaccggaaacaggcagatctggatctcgccagaggagattttgcagctgctgccggcaacctacaaacctgcctggcagttttgggccgggcactgcccacctcccgcctggacctggcctgcagcctctcctggaacgtgatccgctacagcctgcagaagctacgcctggtgcgctggctgctcaagaaagtcttccagtgccggcgggccacgccagccactgaggcaggctttgaagacgaagctaagaccagcgcccgggatgcggctctggcctatcaccggctgcaccagctgcacatcacagggaagcttcctgcaggatccgcctgttccgatgtacacatggcgttgtgtgccgtgaacctggctgaatgtgcagaggagaagatcccaccgagcacactggttgagatccatctgactgctgccatggggctcaagacccggtgtggaggcaagctgggcttcctggccgtgagtacccttcggttcccttctgtaaacctcccctgagcacttacctagccaggagttaagatgcagaagcagttatgaacccccttccccatcaggtgctgcccacctggaggggtaggcaggcattcattcagtcgctcatttcaccaggactcccagcaaccgataaaacagaccaaaattcctccccttgtggccttaataccataagccttgtaggcaggacattttggtcccctgaggtaatatgaggtaatatgaagattggttcagcaatagcagagctactgtacttgggggttaatatgcaacttttctgttcttcaagtggtcataaaaattcttagaatcccctggttatgtctcatggttctttcatttactcagaaggtatttattgggcatcttgtgttgatcacagcactgtgaatccagaaataaaagccagtgcctttgccaagctacagagttaaagaaaagaaaaatgaaatgaataaaagtaaaagaaaacctgtg

SEQ ID NO: 304154 - DNA, 1754 bp, Homo sapiens
cgcccgggcgcaacgcaaacatggcggcgggtggcacccgtcggtgaggcggtgccgggcgggggttgtcgggtgtcatgggcggtggcgacggcaccgcccccgcgtctccctgagcgggacggcagggggggcttctgcgctgagccgggcgatggacgacagcggcgagctgggtggtctggagaccatggagaccctcacggagctgggcgacgagctgaccctgggagacatcgacgagatgctgcaatttgtcagtaatcaagtgggagagttccctgacttgttttcagaacagctgtgtagctcctttcctggcagtggtggtagtggtagcagcagcggcagcagtggcagcagcagcagcagcagcaatggcaggggcagcagcagcggagctgtggacccttcagtgcaacggtcattcacccaggtcacattaccttccttctctccctcggcggcctccccacaggctccaactctgcaagtcaaggtttctcccacctcagttcccaccacacccagggcaactcctattcttcagccccgcccccagccccagcctcaacctcaaactcagctgcaacaacagacggtaatgatcacgccaacattcagcaccactccgcagacgaggatcatccagcagcctttgatataccagaatgcagctactagctttcaagtccttcagcctcaagtccaaagcctggtgacatcctcccaggtacagccggtcaccattcagcagcaggtgcagacagtacaggcccagcgggtgctgacacaaacggccaatggcacgctgcagacccttgccccggctacggtgcagacagttgctgcgccacaggtgcagcaggtcccggtcctggtccagcctcagatcatcaagacagattcccttgttttgaccacactgaagacagatggcagccctgttatggctgcggtccagaacccggccctcaccgccctcaccacccctatccagacggctgcccttcaagtaccaaccctggtgggcagcagtgggaccattctgaccacaatgcctgtaatgatggggcaagagaaagtgcccattaagcaggtacctgggggagtcaagcagcttgagccccccaaagaaggagaaaggcggacaacccataatatcattgagaaacgatatcgctcctccatcaatgacaaaatcatcgaattgaaagacctggtcatggggacagacgccaagatgcacaagtctggcgttctgaggaaggccattgattacatcaaatacttgcagcaggtcaatcataaactgcgccaggagaacatggtgctgaagctggcaaatcaaaagaacaagcttctaaagggcatcgacctaggcagtctggtggacaatgaggtggacctgaagatcgaggactttaatcagaatgtccttctgatgtcccccccagcctctgactcagggtcccaggctggcttctctccctactccattgactctgagccaggaagccctctattggatgatgcaaaggtcaaagatgagccagactctcctcctgtggcgctgggcatggtagaccgctcacggattcttctgtgtgtcctcaccttcctgtgcctctcctttaaccccctgacttccctgctgcagtggggaggggcccacgactctgaccagcacccacactcaggctctggccgcagtgtcctgtcattcgagtcaggtaggtggaggccccttgccc

SEQ ID NO: 304155 - DNA, 1483 bp, Homo sapiens
cgcccgggcgcaacgcaaacatggcggcgggtggcacccgtcggtgaggcggtgccgggcgggggttgtcgggtgtcatgggcggtggcgacggcaccgcccccgcgtctccctgagcgggacggcagggggggcttctgcgctgagccgggcgatggacgacagcggcgagctgggtggtctggagaccatggagaccctcacggagctgggcgacgagctgaccctgggagacatcgacgagatgctgcaatttgtcagtaatcaagtgggagagttccctgacttgttttcagaacagctgtgtagctcctttcctggcagtggtggtagtggtagcagcagcggcagcagtggcagcagcagcagcagcagcaatggcaggggcagcagcagcggagctgtggacccttcagtgcaacggtcattcacccaggtcacattaccttccttctctccctcggcggcctccccacaggctccaactctgcaagtcaaggtttctcccacctcagttcccaccacacccagggcaactcctattcttcagccccgcccccagccccagcctcaacctcaaactcagctgcaacaacagacggtaatgatcacgccaacattcagcaccactccgcagacgaggatcatccagcagcctttgatataccagaatgcagctactagctttcaagtccttcagcctcaagtccaaagcctggtgacatcctcccaggtacagccggtcaccattcagcagcaggtgcagacagtacaggcccagcgggtgctgacacaaacggccaatggcacgctgcagacccttgccccggctacggtgcagacagttgctgcgccacaggtgcagcaggtcccggtcctggtccagcctcagatcatcaagacagattcccttgttttgaccacactgaagacagatggcagccctgttatggctgcggtccagaacccggccctcaccgccctcaccacccctatccagacggctgcccttcaagtaccaaccctggtgggcagcagtgggaccattctgaccacaatgcctgtaatgatggggcaagagaaagtgcccattaagcaggtacctgggggagtcaagcagcttgagccccccaaagaaggagaaaggctggttggagcagagggtgggcaggagccccagcacagactggggggtgctcacagcagggccaccttgatgcaggctggaatgttatccctggggtgtgcttggaccccacctgctttctttctctcctgcccctcccctactctcactgtaatttatggaccctgcccgcctgcgtgttgtgtgtatgtcctgtgccttttctcactattgtttgggtgtgggagggggtggtttttcactgaaaaggggggtacacctatagctttcttgatgttcaatcaatcagtcactgtgtcccagacatattcaataaacacagattggtaccaccca

SEQ ID NO: 304156 - DNA, 1809 bp, Homo sapiens
cgcccgggcgcaacgcaaacatggcggcgggtggcacccgtcggtgaggcggtgccgggcgggggttgtcgggtgtcatgggcggtggcgacggcaccgcccccgcgtctccctgagcgggacggcagggggggcttctgcgctgagccgggcgatggacgacagcggcgagctgggtggtctggagaccatggagaccctcacggagctgggcgacgagctgaccctgggagacatcgacgagatgctgcaatttgtcagtaatcaagtgggagagttccctgacttgttttcagaacagctgtgtagctcctttcctggcagtggtggtagtggtagcagcagcggcagcagtggcagcagcagcagcagcagcaatggcaggggcagcagcagcggagctgtggacccttcagtgcaacggtcattcacccaggtcacattaccttccttctctccctcggcggcctccccacaggctccaactctgcaagtcaaggtttctcccacctcagttcccaccacacccagggcaactcctattcttcagccccgcccccagccccagcctcaacctcaaactcagctgcaacaacagacggtaatgatcacgccaacattcagcaccactccgcagacgaggatcatccagcagcctttgatataccagaatgcagctactagctttcaagtccttcagcctcaagtccaaagcctggtgacatcctcccaggtacagccggtcaccattcagcagcaggtgcagacagtacaggcccagcgggtgctgacacaaacggccaatggcacgctgcagacccttgccccggctacggtgcagacagttgctgcgccacaggtgcagcaggtcccggtcctggtccagcctcagatcatcaagacagattcccttgttttgaccacactgaagacagatggcagccctgttatggctgcggtccagaacccggccctcaccgccctcaccacccctatccagacggctgcccttcaagtaccaaccctggtgggcagcagtgggaccattctgaccacaatgcctgtaatgatggggcaagagaaagtgcccattaagcaggtacctgggggagtcaagcagcttgagccccccaaagaaggagaaaggcggacaacccataatatcattgagaaacgatatcgctcctccatcaatgacaaaatcatcgaattgaaagacctggtcatggggacagacgccaaggtgggtgccaagcaaaattgtgttttatgttccaccatctcccctctacctgtttttgcctcaggagcctagagaagtcccaggctcaaggtaagtgaatacaagaccgagttagaggtgcttttttattaaagcatcttggtgtcatgtcaagattataaaatattaaaaaacataagggactggtgagggttgataaggcagtgacccgctgagacctttgactcctttggctatgctctgcagtgatggggactccactgtcagaggcagagaaagatgcctgccactcagtagttccagatacaggactgtgtgtaccttggagtcagctgatggcatagttttagctgtgtttaggggttaccttttaaggaaaagaaagaaaaaagaggttgagtctttgaccagcaacacatagaggaaactgatgttccaaatgtttctggtgtttcagtgtatgtgtcttctagaaagtaggagattttatttttaaaacctatctatgtttaaaccctattttgaaagaaaatttcattttcctgcctaccatcgtcggtagctgt

SEQ ID NO: 304157 - DNA, 1789 bp, Homo sapiens
  misc_feature (1747)..(1747): n is a, c, g, or t
  misc_feature (1753)..(1753): n is a, c, g, or t
  misc_feature (1767)..(1767): n is a, c, g, or t
  misc_feature (1769)..(1769): n is a, c, g, or t
cgcccgggcgcaacgcaaacatggcggcgggtggcacccgtcggtgaggcggtgccgggcgggggttgtcgggtgtcatgggcggtggcgacggcaccgcccccgcgtctccctgagcgggacggcagggggggcttctgcgctgagccgggcgatggacgacagcggcgagctgggtggtctggagaccatggagaccctcacggagctgggcgacgagctgaccctgggagacatcgacgagatgctgcaatttgtcagtaatcaagtgggagagttccctgacttgttttcagaacagctgtgtagctcctttcctggcagtggtggtagtggtagcagcagcggcagcagtggcagcagcagcagcagcagcaatggcaggggcagcagcagcggagctgtggacccttcagtgcaacggtcattcacccaggtcacattaccttccttctctccctcggcggcctccccacaggctccaactctgcaagtcaaggtttctcccacctcagttcccaccacacccagggcaactcctattcttcagccccgcccccagccccagcctcaacctcaaactcagctgcaacaacagacggtaatgatcacgccaacattcagcaccactccgcagacgaggatcatccagcagcctttgatataccagaatgcagctactagctttcaagtccttcagcctcaagtccaaagcctggtgacatcctcccaggtacagccggtcaccattcagcagcaggtgcagacagtacaggcccagcgggtgctgacacaaacggccaatggcacgctgcagacccttgccccggctacggtgcagacagttgctgcgccacaggtgcagcaggtcccggtcctggtccagcctcagatcatcaagacagattcccttgttttgaccacactgaagacagatggcagccctgttatggctgcggtccagaacccggccctcaccgccctcaccacccctatccagacggctgcccttcaagtaccaaccctggtgggcagcagtgggaccattctgaccacaatgcctgtaatgatggggcaagagaaagtgcccattaagcaggtacctgggggagtcaagcagcttgagccccccaaagaaggagaaaggcggacaacccataatatcattgagaaacgatatcgctcctccatcaatgacaaaatcatcgaattgaaagacctggtcatggggacagacgccaaggtgggtgccaagcaaaattgtgttttatgttccaccatctcccctctacctgtttttgcctcaggagcctagagaagtcccaggctcaaggtaagtgaatacaagaccgagttagaggtgcttttttattaaagcatcttggtgtcatgtcaagattataaaatattaaaaaacataagggactggtgagggttgataaggcagtgacccgctgagacctttgactcctttggctatgctctgcagtgatggggactccactgtcagaggcagagaaagatgcctgccactcagtagttccagatacaggactgtgtgtaccttggagtcagctgatggcatagttttagctgtgtttaggggttaccttttaaggaaaagaaagaaaaaagaggttgagtctttgaccagcaacacatagaggaaactgatgttccaaatgtttctggtgtttcagtgtatgtgtctttcaaaatagggtttaaacatagataggttttaaanataaantctccgtcgagcgncngcgaatgtagtagtagtagc

SEQ ID NO: 304158 - DNA, 562 bp, Homo sapiens
cacctaaggtcaggagttcgagacccacctatcaatatggtgaaaccctgtctctactaaaattacaaaaattagccgggcatggtgccgtgcacctatagtcccagctactcaggaggctgaggcgggagaatcgcttgaacccaggaggcagaggttgaagtaagacaagttcgcgccactgcactccatccagcgtgggcgatagaggaagactccgtctcaaaaagaaaaaagaaagaaaatgagagaaagggcctggaggtgagtgtgaggagggaaaagaacatcaaacagataaagtcctgtcctgttgtcctgggaccttgggcagccatcttggcccagatgatccccacaagaaagaggtaagggtttcctgacccatttctgccatggtcttaggaaagtcattgagttttcatgccttagtttcttaagcaagtttgaaagttcactttttggatagcaataaaattactccttttcttttgttcacagagatgctgcaatttgtcagtaatcaagtgggagagttccctgacttgttttcagaacagct

SEQ ID NO: 304159 - DNA, 473 bp, Homo sapiens
taacaaagggatcattctgctgtgtacctgtccctattctagaccctggtgggcagcagtgggaccattctgaccacaatgcctgtaatgatggggcaagagaaagtgcccattaagcaggtacctgggggagtcaagcagcttgagccccccaaagaaggagaaaggcggacaacccataatatcattgagaaacgatatcgctcctccatcaatgacaaaatcatcgaattgaaagacctggtcatggggacagacgccaaggtgggtgccaagcaaaattgtgttttatgttccaccatctcccctctacctgtttttgcctcaggagcctagagaagtcccaggctcaaggtaagtgaatacaagaccgagttagaggtgcttttttattaaagcatcttggtgtcatgtcaagattataaaatattaaaaaacataagggactggtgagggttgataaggcagtgacc

SEQ ID NO: 304160 - DNA, 1160 bp, Homo sapiens
gtatttttagtagagacggggtttctccatgttggccaagctggtctcaaactcctgacctcaggtgacccacctgcctcagcctcccaaagtgctggaattaagaggtgtgagccaccacacctggcctacagcagatttatttcagtagctgaaatagttaaaacataatgattccaaaggctgagaagcatgcagaaaaaattgaatctttattgctgatgggaatataaaactgtataccacattggaaaataatttggcaatttcttttaaagctaaacacacacatacagttagttaggcttagcaattgctgtcatggcctatttcatagaaatgaaaatttatgtgtagaccaaacctgcacttgactgttcacagaaattttatttgtaatagtcagaacctggaaacaactcacatgttattcaccaggtaaacagttaaataagtctgttatttccgtattgtgtaatacaactcaaaaattaaaaggaataaactactactatacaaataagccttagatgattctcaattctgaaggaaaaacccatttcaagttgtaacataatgcttatttttatgtatcttaatgtgatgaagttaaatagtttagagaacattgttcgtattcatctgttagggatggtagaagttagggttgtatgtgattataagactagtggaagggatacgtttttaatgatggatgagttctgcattctgattcatgcagtggttacaaaaatgtatacatgtgataaaatgtcatgtaaatgtgcacatttcaccaatgacaatgtgctggttgtgatattgtacaatgttaatggaaaatatcaccactggggaaaattgagtggtatgtgtaaacggtactatatttgcagcattttgtgagtctttattttaacataatatgtaaatatgtaaagcaactagaagaatggttttaatacaggagagtaacagcttataagcaagagaaagaaaaatgataaataatgtgaacacttaccaaaggaagggtggaacagagaaataaaggacagggaaaattatctgggatgattcctaaattccaatatttggatggaactatacagaattttaatatatctggaaaataaactgaaaatattaacggatccaca

SEQ ID NO: 304161 - DNA, 692 bp, Homo sapiens
aaaaacacaagatttccttatgcgttttttgtgacctcctctgaatctataattaaattaaaagatttttttaagaagtctctattatacctgaagcccaagaagtaagctgagttaagaatgtttttcaagttccttgggtatttttcaacatagatgaaggtgctctaaatcttattgtcttccttctatttattctgagttgcttatagaatagaatgtgtttttaaaacccctgaaaaaggttggcaatctagtgtgtccgtagagagaataatacaatcttggcacataggggatgcctaaagcttatatattctttgatttgagtttataaggacagttacttttttccaagcaatatttaaaactgaatcttccctgagtcaccttaacttttaaatggaggtcaggctccctggttggaaatagcatgttttataattgtgtactgttaagttctacaaggtaaaactctaccacattggaacaggaatgaccaaaagaagacaaaagtaaagaagaaaacaagcaatccgcagtttaatgaaatcttttattttgagttttgttttacgtaaatgttaacattaaatatgtaatatttaatgctagttgatttcttttttcaaaccacagtcatagtaatcattttatcaattaatgcagataagcctttctctcctgaaagc

SEQ ID NO: 304162 - DNA, 650 bp, Homo sapiens
aaaaacacaagatttccttatgcgttttttgtgacctcctctgaatctataattaaattaaaagatttttttaagaagtctctattatacctgaagcccaagaagtaagctgagttaagaatgtttttcaagttccttgggtatttttcaacatagatgaaggtgctctaaatcttattgtcttccttctatttattctgagttgcttatagaatagaatgtgtttttaaaacccctgaaaaaggttggcaatctagtgtgtccgtagagagaataatacaatcttggcacataggggatgcctaaagcttatatattctttgatttgagtttataaggacagttacttttttccaagcaatatttaaaactgaatcttccctgagtcaccttaacttttaaatggaggtcaggctccctggttggaaatagcatgttttataattgtgtactgttaagttctacaaggtaaaactctaccacattggaacaggaatgaccaaaagaagacaaaagtaaagaagttttgttttacgtaaatgttaacattaaatatgtaatatttaatgctagttgatttcttttttcaaaccacagtcatagtaatcattttatcaattaatgcagataagcctttctctcctgaaagc

SEQ ID NO: 304163 - DNA, 5577 bp, Homo sapiens
atggcggcggcggcgcctgctgctgcggcggcttcttccgaggcgccagcggcgagtgcgactgcagagcccgaggccggggaccaggacagtcgcgaggttcgagtgttgcagagcctgcggggcaagatctgtgaagcaaaaaatttattgccatatcttggaccccacaaaatgagagattgtttctgtaccataaatttggaccaggaagaagtttatcgtacccaagttgtggaaaaatctttaagcccatttttcagtgaagaattttactttgagattccaagaactttccagtatttgtctttctatgtttatgataagaatgttttacaaagagatctccgtataggaaaagtagccatcaaaaaagaagacttgtgtaatcacagtggcaaagaaacttggttttcattacagcctgttgactccaattcagaggttcagggtaaagttcaccttgaattaaaactgaatgaactgataacggagaatggaactgtatgccagcagcttgttgtacacatcaaggcatgccatgggttgcctctcataaatggccaaagctgtgacccttatgcaacagtttctctagtgggcccttctaggaatgaccaaaagaagacaaaagtaaagaagaaaacaagcaatccgcagtttaatgaaatcttttattttgaggtaaccagatccagtagttacaccagaaagtcccagttccaggtagaagaggaggacattgaaaagctagaaatcaggatcgacttgtggaacaatggaaacctagtccaagatgttttcctaggtgagattaaggttcctgtgaacgtattaagaactgattcctctcatcaagcctggtacttgctacagccaagagacaatggaaacaagtcatccaaaactgatgacctggggtctcttcgattaaatatatgttatacagaagactacgtgcttccttcagagtactatggtcctttgaaaactttgctgctaaaatcaccagatgttcaaccaatatctgcctcagctgcttacattttgagtgaaatatgtcgagataaaaatgatgctgttttgccccttgtacgactgctgctgcaccatgataaacttgttccttttgccactgctgtggctgaattagacttgaaggatacacaagatgcaaacacaatttttagaggaaattccctggctacccgatgtctggatgagatgatgaaaatagtgggagggcactacctgaaagtaacattaaaacctattcttgatgagatatgtgactcctcaaaatcctgtgaaatcgatcctattaaattgaaagagggagataatgtagaaaataataaggagaatctgcgctactatgtagacaagttattcaatacaattgtaaaatcaagtatgagctgccccactgtaatgtgtgatatcttttattctctaaggcagatggctactcagagatttcctaatgaccctcatgttcagtattctgcagtgagcagctttgtatttcttcgtttctttgctgtagccgtagtatcacctcatacttttcatttgcgacctcatcatccagatgcacagacaattagaacattaactctcatctcaaaaactatacaaactttgggaagctgggggagtctgtccaaaagcaagtcaagtttcaaagagacattcatgtgtgaatttttcaaaatgtttcaagaagaaggatatattatagcagttaaaaagttcttggatgaaatttcatctactgaaactaaagagtccagtggtacgagtgagcctgtgcacctgaaagaaggtgagatgtataaaagagctcaaggaagaactcggattggaaaaaagaattttaagaaacgatggttctgcttaacaagcagagagctcacctaccacaaacagccaggcaaagatgcaatctacacaatcccagtaaaaaacattcttgctgtggaaaaactggaagagagctctttcaacaagaaaaatatgttccaagtaatacatacggagaaaccactctatgtccaggcaaataactgtgtagaagctaatgaatggatagacgtactctgcagggtgagccgatgcaatcaaaacaggctcagtttttatcatccctctgtgtatctaaacggaaattggctctgctgtcaggagactggtgaaaacactctcggctgcaagccatgtactgcaggtgtccctgcagacatccaaatagatattgatgaagacagagaaacagaaagaatttattccctttttaccctcagtttacttaagctgcagaagatggaagaggcttgtggaactattgcagtctatcaaggaccacagaaagagcctgatgattattctaactttgtaatcgaggattctgtaacaacctttaagacaattcagcaaataaaaagcataattgagaagctggatgaacctcatgaaaaatataggaagaaaagatccagtagtgcaaaatatgggagcaaggaaaatccaattgttgggaaagcatcttagagtttaacagattggttcagaagaactggaaaatattatttttcttggagcttttcaattcatcatgtattttgttcatggtatttaagaatgagcatccgcttcaatgtcatctgcctccacattgtatttaatatttaataattgaaattaattgtttgggaatcctggtattgatgtattactagagaatttaaagcccaagattcccttcatacctgtgtgaccaaatccatgtttctgcaacttctttttaatcgaaagaatcttcctagaaaagctttgtaacaaagggagaactcctccgtagcaagaaaccatctcttcttgtaacactctgttctgtggacttgttttcactaccatcagtgcctgctctatactgccaacattgtgttttactagaaaattccaattcatgacagttcagagcttttcatttagttcatgtagaccctcccactttaaaaaaagaaaaaaaataagaagtgtttttcctttggtccatcagtcattacaggttccattcaagacagtgatagaaactttagaaaactgccagagcatacttgaaagttggtagatccttttgcctaaagatgtaaacaaaactcaagacagaaggaatcagggaatatgtgctattgtgtgcatcttgtttacatttgggatcagtgatggcaaaagaagtaatgagaccactgaaattgttttcattgttttaaataccaggtactcattttcttgatttgaaagtttaacatgacttctaaggacatctcttcaaaaagaaagtaaacagggaatgaaggtggtgggaaaatcacttcacttcacccactatttcatgttgtaataagggccaccataaggatgccctcctcatagtgttcggttctgatcttcctcgagaacagtcacttggcgcactttaataatctggactgctccagatttgactttagatactccatggtatctagtctttatgatcagttgaatgatcagtgtttaagtctaaaaataatgctttcctgaaaatgtttatatttcattgctgtttccttattgcctgctagccaaatggaatttgggcaagcaactctttgaagacttttttaccctagaaatttacttttgtcctaaaaaccctaactgtaaataagcagtcgaagcaagttgccaccttgaagttgagggatacactttgcttcatcagtattaaaaaccatggtactcttattttgtcttttttaattcaaaacattttctaaatgtggtactttgaaccttggagtatttacatgtttctgttcaaaactgtgacttattaatgtaagtctgctagtagtactttttttgtctgagcataagctatatttcaagatatactttgccaattttgttattggtgggtaatcatttttaaattatattgttattaggtaattatttttaaagactactggcatacaatcaaagttgttccataaaagaatataactgagcaatgtatttctctaaatgacttgtaaaaatcaatgaattatgtttaagtctgcattatggtaggttattactcccagctcattttaaagacaagtttgaaagagtcctttaaattttataagcttgtagattccataaactacactgatttatacatttgaaagaatttagccatttaataaatttcttattctcaaattgcatttagattaaaattccttttaagagtgtctgaaatgtctgcctgcgaagaacatgtaaacattgccagataccagtcattattctttagtggctttttagtcctctgcttttttttttaaggcaaaagaaatatgcatctagcatttctaataccaaatccccaattgtgattgttttaaagatcatggtatgatcacagggaccaaggctgtgtgcatatataactctggatttgaaaggaggagagttcagccatctagttcttttcttcacatgacacttttaaacagccagtttgactggaattaaccaacttggcacagcctaaaaaaggagtaatgtgaaattaaattatttttctttgaaagtcttttgaaataagagaccatgtaagtaggaccctaagacaaccaaggaatttgcttccagggccctcattcctctgctgttacttacaaatgttttaatttttactacctgatattctttctctaccttttccacatttgaaaatatacaaggcagctcacttcatcctaaaaacctaaaaactccaggaaggaaagaaaaggatgatatggggaaatttgccataaatgccggttctggttcttagtttagccatttccatcagttgaaattgtggtgtgatctgttgcttgtttcgttgttgttttgtttttgtgtagctttgttttttaatattcatttaataagatgatgggcaatagcaaacatttttactcccaggaatataatttatcaaattgaactattttatttgccaaagaaacttgtttttaatatcacgggtaatgggtaagtgtgaaaactaggcttttttttatgaaacaaaaaaaggtgacgaataatatggcttttgtttctgtttctgaagcctgatttcatttatgccaggttttgaaaaacagatctttttcttaagtgaaagcacctttaatttgctctaacggtacatcctgtaaagacagaattctgcatagccttttaggtgtttttacagtatgtgaaaaatacaagactcattctagagttaaattaccaatcttggttgatattatctgcttccatttttattaatttggaaattaatatgttgctagtaaatattggtttttacagtacccagtttgaaaatgtaagttatcaaaacttaatgtagtgaatttgtgtaaccatgttgtattgttgagaatgtatttttatttaaattttattttcttatcaagagtattataaaaattaacttttgtaactgtcgcttggaaataactcaaataaattacaagaagc

SEQ ID NO: 304164 - DNA, 5611 bp, Homo sapiens
atggcggcggcggcgcctgctgctgcggcggcttcttccgaggcgccagcggcgagtgcgactgcagagcccgaggccggggaccaggacagtcgcgaggttcgagtgttgcagagcctgcggggcaagatctgtgaagcaaaaaatttattgccatatcttggaccccacaaaatgagagattgtttctgtaccataaatttggaccaggaagaagtttatcgtacccaagttgtggaaaaatctttaagcccatttttcagtgaagaattttactttgagattccaagaactttccagtatttgtctttctatgtttatgataagaatgttttacaaagagatctccgtataggaaaagtagccatcaaaaaagaagacttgtgtaatcacagtggcaaagaaacttggttttcattacagcctgttgactccaattcagaggttcagggtaaagttcaccttgaattaaaactgaatgaactgataacggagaatggaactgtatgccagcagcttgttgtacacatcaaggcatgccatgggttgcctctcataaatggccaaagctgtgacccttatgcaacagtttctctagtgggcccttctaggaatgaccaaaagaagacaaaagtaaagaagaaaacaagcaatccgcagtttaatgaaatcttttattttgaggtaaccagatccagtagttacaccagaaagtcccagttccaggtagaagaggaggacattgaaaagctagaaatcaggatcgacttgtggaacaatggaaacctagtccaagatgttttcctaggtgagattaaggttcctgtgaacgtattaagaactgattcctctcatcaagcctggtacttgctacagccaagagacaatggaaacaagtcatccaaaactgatgacctggggtctcttcgattaaatatatgttatacagaagactacgtgcttccttcagagtactatggtcctttgaaaactttgctgctaaaatcaccagatgttcaaccaatatctgcctcagctgcttacattttgagtgaaatatgtcgagataaaaatgatgctgttttgccccttgtacgactgctgctgcaccatgataaacttgttccttttgccactgctgtggctgaattagacttgaaggatacacaagatgcaaacacaatttttagaggaaattccctggctacccgatgtctggatgagatgatgaaaatagtgggagggcactacctgaaagtaacattaaaacctattcttgatgagatatgtgactcctcaaaatcctgtgaaatcgatcctattaaattgaaagagggagataatgtagaaaataataaggagaatctgcgctactatgtagacaagttattcaatacaattgtaaaatcaagtatgagctgccccactgtaatgtgtgatatcttttattctctaaggcagatggctactcagagatttcctaatgaccctcatgttcagtattctgcagtgagcagctttgtatttcttcgtttctttgctgtagccgtagtatcacctcatacttttcatttgcgacctcatcatccagatgcacagacaattagaacattaactctcatctcaaaaactatacaaactttgggaagctgggggagtctgtccaaaagcaagtcaagtttcaaagagacattcatgtgtgaatttttcaaaatgtttcaagaagaaggatatattatagcagttaaaaagttcttggatgaaatttcatctactgaaactaaagagtccagtggtacgagtgagcctgtgcacctgaaagaaggtgagatgtataaaagagctcaaggaagaactcggattggaaaaaagaattttaagaaacgatggttctgcttaacaagcagagagctcacctaccacaaacagccaggcaaagatgcaatctacacaatcccagtaaaaaacattcttgctgtggaaaaactggaagagagctctttcaacaagaaaaatatgttccaagtaatacatacggagaaaccactctatgtccaggcaaataactgtgtagaagctaatgaatggatagacgtactctgcagggtgagccgatgcaatcaaaacaggctcagtttttatcatccctctgtgtatctaaacggaaattggctctgctgtcaggagactggtgaaaacactctcggctgcaagccatgtactgcaggtgtccctgcagacatccaaatagatattgatgaagacagagaaacagaaagaatttattccctttttaccctcagtttacttaagctgcagaagatggaagaggcttgtggaactattgcagtctatcaaggaccacagaaagagcctgatgattattctaactttgtaatcgaggattctgtaacaacctttaagacaattcagcaaataaaaagcataattgagaagctggatgaacctcatgaaaaatataggaagaaaagatccagtagtgcaaaatatgggagcaaggaaaatccaattgttgggaaagcatcttagagtttaacagattggttcagaagaactggaaaatattatttttcttggagcttttcaattcatcatgtattttgttcatggtatttaagaatgagcatccgcttcaatgtcatctgcctccacattgtatttaatatttaataattgaaattaattgtttgggaatcctggtattgatgtattactagagaatttaaagcccaagattcccttcatacctgtgtgaccaaatccatgtttctgcaacttctttttaatcgaaagaatcttcctagaaaagctttgtaacaaagggagaactcctccgtagcaagaaaccatctcttcttgtaacactctgttctgtggacttgttttcactaccatcagtgcctgctctatactgccaacattgtgttttactagaaaattccaattcatgacagttcagagcttttcatttagttcatgtagaccctcccactttaaaaaaagaaaaaaaataagaagtgtttttcctttggtccatcagtcattacaggttccattcaagacagtgatagaaactttagaaaactgccagagcatacttgaaagttggtagatccttttgcctaaagatgtaaacaaaactcaagacagaaggaatcagggaatatgtgctattgtgtgcatcttgtttacatttgggatcagtgatggcaaaagaagtaatgagaccactgaaattgttttcattgttttaaataccaggtactcattttcttgatttgaaagtttaacatgacttctaaggacatctcttcaaaaagaaagtaaacagggaatgaaggtggtgggaaaatcacttcacttcacccactatttcatgttgtaataagggccaccataaggatgccctcctcatagtgttcggttctgatcttcctcgagaacagtcacttggcgcactttaataatctggactgctccagatttgactttagatactccatggtatctagtctttatgatcagttgaatgatcagtgtttaagtctaaaaataatgctttcctgaaaatgtttatatttcattgctgtttccttattgcctgctagccaaatggaatttgggcaagcaactctttgaagacttttttaccctagaaatttacttttgtcctaaaaaccctaactgtaaataagcagtcgaagcaagttgccaccttgaagttgagggatacactttgcttcatcagtattaaaaaccatggtactcttattttgtcttttttaattcaaaacattttctaaatgtggtactttgaaccttggagtatttacatgtttctgttcaaaactgtgacttattaatgtaagtctgctagtagtactttttttgtctgagcataagctatatttcaagatatactttgccaattttgttattggtgggtaatcatttttaaattatattgttattaggtaattatttttaaagactactggcatacaatcaaagttgttccataaaagaatataactgagcaatgtatttctctaaatgacttgtaaaaatcaatgaattatgtttaagtctgcattatggtaggttattactcccagctcattttaaagacaagtttgaaagagtcctttaaattttataagcttgtagattccataaactacactgatttatacatttgaaagaatttagccatttaataaatttcttattctcaaattgcatttagattaaaattccttttaagagtgtctgaaatgtctgcctgcgaagaacatgtaaacattgccagataccagtcattattctttagtggctttttagtcctctgcttttttttttaaggcaaaagaaatatgcatctagcatttctaataccaaatccccaattgtgattgttttaaagatcatggtatgatcacagggaccaaggctgtgtgcatatataactctggatttgaaaggaggagagttcagccatctagttcttttcttcacatgacacttttaaacagccagtttgactggaattaaccaacttggcacagcctaaaaaaggagtaatgtgaaattaaattatttttctttgaaagtcttttgaaataagagaccatgtaagtaggaccctaagacaaccaaggaatttgcttccagggccctcattcctctgctgttacttacaaatgttttaatttttactacctgatattctttctctaccttttccacatttgaaaatatacaaggcagctcacttcatcctaaaaacctaaaaactccaggaaggaaagaaaaggatgatatggggaaatttgccataaatgccggttctggttcttagtttagccatttccatcagttgaaattgtggtgtgatctgttgcttgtttcgttgttgttttgtttttgtgtagctttgttttttaatattcatttaataagatgatgggcaatagcaaacatttttactcccaggaatataatttatcaaattgaactattttatttgccaaagaaacttgtttttaatatcacgggtaatgggtaagtgtgaaaactaggcttttttttatgaaacaaaaaaaggtgacgaataatatggcttttgtttctgtttctgaagcctgatttcatttatgccaggttttgaaaaacagatctttttcttaagtgaaagcacctttaatttgctctaacggtacatcctgtaaagacagaattctgcatagccttttaggtgtttttacagtatgtgaaaaatacaagactcattctagagttaaattaccaatcttggttgatattatctgcttccatttttattaatttggaaattaatatgttgctagtaaatattggtttttacagtacccagtttgaaaatgtaagttatcaaaacttaatgtagtgaatttgtgtaaccatgttgtattgttgagaatgtatttttatttaaattttattttcttatcaagagtattataaaaattaacttttgtaactgtcgcttggaaataactcaaataaattacaagaagcctgtctgttctttgtgagactgtattttcttact

SEQ ID NO: 304165 - DNA, 5265 bp, Homo sapiens
atggcggcggcggcgcctgctgctgcggcggcttcttccgaggcgccagcggcgagtgcgactgcagagcccgaggccggggaccaggacagtcgcgaggttcgagtgttgcagagcctgcggggcaagatctgtgaagcaaaaaatttattgccatatcttggaccccacaaaatgagagattgtttctgtaccataaatttggaccaggaagaagtttatcgtacccaagttgtggaaaaatctttaagcccatttttcagtgaagaattttactttgagattccaagaactttccagtatttgtctttctatgtttatgataagaatgttttacaaagagatctccgtataggaaaagtagccatcaaaaaagaagacttgtgtaatcacagtggcaaagaaacttggttttcattacagcctgttgactccaattcagaggttcagggtaaagttcaccttgaattaaaactgaatgaactgataacggagaatggaactgtatgccagcagcttgttgtacacatcaaggcatgccatgggttgcctctcataaatggccaaagctgtgacccttatgcaacagtttctctagtgggcccttctaggaatgaccaaaagaagacaaaagtaaagaagaaaacaagcaatccgcagtttaatgaaatcttttattttgaggtaaccagatccagtagttacaccagaaagtcccagttccaggtagaagaggaggacattgaaaagctagaaatcaggatcgacttgtggaacaatggaaacctagtccaagatgttttcctaggtgagattaaggttcctgtgaacgtattaagaactgattcctctcatcaagcctggtacttgctacagccaagagacaatggaaacaagtcatccaaaactgatgacctggggtctcttcgattaaatatatgttatacagaagactacgtgcttccttcagagtactatggtcctttgaaaactttgctgctaaaatcaccagatgttcaaccaatatctgcctcagctgcttacattttgagtgaaatatgtcgagataaaaatgatgctgttttgccccttgtacgactgctgctgcaccatgataaacttgttccttttgccactgctgtggctgaattagacttgaaggatacacaagatgcaaacacaatttttagaggaaattccctggctacccgatgtctggatgagatgatgaaaatagtgggagggcactacctgaaagtaacattaaaacctattcttgatgagatatgtgactcctcaaaatcctgtgaaatcgatcctattaaattgaaagagggagataatgtagaaaataataaggagaatctgcgctactatgtagacaagttattcaatacaattgtaaaatcaagtatgagctgccccactgtaatgtgtgatatcttttattctctaaggcagatggctactcagagatttcctaatgaccctcatgttcagtattctgcagtgagcagctttgtatttcttcgtttctttgctgtagccgtagtatcacctcatacttttcatttgcgacctcatcatccagatgcacagacaattagaacattaactctcatctcaaaaactatacaaactttgggaagctgggggagtctgtccaaaagcaagtcaagtttcaaagagacattcatgtgtgaatttttcaaaatgtttcaagaagaaggatatattatagcagttaaaaagttcttggatgaaatttcatctactgaaactaaagagtccagtggtacgagtgagcctgtgcacctgaaagaaggtgagatgtataaaagagctcaaggaagaactcggattggaaaaaagaattttaagaaacgatggttctgcttaacaagcagagagctcacctaccacaaacagccaggcaaagatgcaatctacacaatcccagtaaaaaacattcttgctgtggaaaaactggaagagagctctttcaacaagaaaaatatgttccaagtaatacatacggagaaaccactctatgtccaggcaaataactgtgtagaagctaatgaatggatagacgtactctgcagggtgagccgatgcaatcaaaacaggctcagtttttatcatccctctgtgtatctaaacggaaattggctctgctgtcaggagactggtgaaaacactctcggctgcaagccatgtactgcaggtgtccctgcagacatccaaatagatattgatgaagacagagaaacagaaagaatttattccctttttaccctcagtttacttaagctgcagaagatggaagaggcttgtggaactattgcagtctatcaaggaccacagaaagagcctgatgattattctaactttgtaatcgaggattctgtaacaacctttaagacaattcagcaaataaaaagcataattgagaagctggatgaacctcatgaaaaatataggaagaaaagatccagtagtgcaaaatatgggagcaaggaaaatccaattgttgggaaagcatcttagagtttaacagattggttcagaagaactggaaaatattatttttcttggagcttttcaattcatcatgtattttgttcatggtatttaagaatgagcatccgcttcaatgtcatctgcctccacattgtatttaatatttaataattgaaattaattgtttgggaatcctggtattgatgtattactagagaatttaaagcccaagattcccttcatacctgtgtgaccaaatccatgtttctgcaacttctttttaatcgaaagaatcttcctagaaaagctttgtaacaaagggagaactcctccgtagcaagaaaccatctcttcttgtaacactctgttctgtggacttgttttcactaccatcagtgcctgctctatactgccaacattgtgttttactagaaaattccaattcatgacagttcagagcttttcatttagttcatgtagaccctcccactttaaaaaaagaaaaaaaataagaagtgtttttcctttggtccatcagtcattacaggttccattcaagacagtgatagaaactttagaaaactgccagagcatacttgaaagttggtagatccttttgcctaaagatgtaaacaaaactcaagacagaaggaatcagggaatatgtgctattgtgtgcatcttgtttacatttgggatcagtgatggcaaaagaagtaatgagaccactgaaattgttttcattgttttaaataccaggtactcattttcttgatttgaaagtttaacatgacttctaaggacatctcttcaaaaagaaagtaaacagggaatgaaggtggtgggaaaatcacttcacttcacccactatttcatgttgtaataagggccaccataaggatgccctcctcatagtgttcggttctgatcttcctcgagaacagtcacttggcgcactttaataatctggactgctccagatttgactttagatactccatggtatctagtctttatgatcagttgaatgatcagtgtttaagtctaaaaataatgctttcctgaaaatgtttatatttcattgctgtttccttattgcctgctagccaaatggaatttgggcaagcaactctttgaagacttttttaccctagaaatttacttttgtcctaaaaaccctaactgtaaataagcagtcgaagcaagttgccaccttgaagttgagggatacactttgcttcatcagtattaaaaaccatggtactcttattttgtcttttttaattcaaaacattttctaaatgtggtactttgaaccttggagtatttacatgtttctgttcaaaactgtgacttattaatgtaagtctgctagtagtactttttttgtctgagcataagctatatttcaagatatactttgccaattttgttattggtgggtaatcatttttaaattatattgttattaggtaattatttttaaagactactggcatacaatcaaagttgttccataaaagaatataactgagcaatgtatttctctaaatgacttgtaaaaatcaatgaattatgtttaagtctgcattatggtaggttattactcccagctcattttaaagacaagtttgaaagagtcctttaaattttataagcttgtagattccataaactacactgatttatacatttgaaagaatttagccatttaataaatttcttattctcaaattgcatttagattaaaattccttttaagagtgtctgaaatgtctgcctgcgaagaacatgtaaacattgccagataccagtcattattctttagtggctttttagtcctctgcttttttttttaaggcaaaagaaatatgcatctagcatttctaataccaaatccccaattgtgattgttttaaagatcatggtatgatcacagggaccaaggctgtgtgcatatataactctggatttgaaaggaggagagttcagccatctagttcttttcttcacatgacacttttaaacagccagtttgactggaattaaccaacttggcacagcctaaaaaaggagtaatgtgaaattaaattatttttctttgaaagtcttttgaaataagagaccatgtaagtaggaccctaagacaaccaaggaatttgcttccagggccctcattcctctgctgttacttacaaatgttttaatttttactacctgatattctttctactttccctttgaaatttcaggggtcactatctaaactaaatccggggagaaggtgttgggcatccaagcggcggttaacacccgaaggggacggggacgagaggggagcgtatatctgcgggcctctcttctttatttctgagtcgatatttatttcttcgaacaaaccaacacagaatagaaaaacacatacaaagataaacacataaaacgagaaagagagagggaaaaagcgaagagacaaagagagagagagagagggggaaacgagacaggggaacgcggagacagagcgagcgaggactggagcacgagcagggggggcgcgcgaaagagaataagcaggagtatagaaggacgagaggggagagcggaggggcgaagtagggagagagagaagcgagaaacgagaaaaggaagacatgacaacgacacgaaggaggcagaagccaaggagagaacgagagaaagccggcgacaaacagaggggaccagagagaagacaagaaa

SEQ ID NO: 304166 - DNA, 4888 bp, Homo sapiens
atggcggcggcggcgcctgctgctgcggcggcttcttccgaggcgccagcggcgagtgcgactgcagagcccgaggccggggaccaggacagtcgcgaggttcgagtgttgcagagcctgcggggcaagatctgtgaagcaaaaaatttattgccatatcttggaccccacaaaatgagagattgtttctgtaccataaatttggaccaggaagaagtttatcgtacccaagttgtggaaaaatctttaagcccatttttcagtgaagaattttactttgagattccaagaactttccagtatttgtctttctatgtttatgataagaatgttttacaaagagatctccgtataggaaaagtagccatcaaaaaagaagacttgtgtaatcacagtggcaaagaaacttggttttcattacagcctgttgactccaattcagaggttcagggtaaagttcaccttgaattaaaactgaatgaactgataacggagaatggaactgtatgccagcagcttgttgtacacatcaaggcatgccatgggttgcctctcataaatggccaaagctgtgacccttatgcaacagtttctctagtgggcccttctaggaatgaccaaaagaagacaaaagtaaagaagaaaacaagcaatccgcagtttaatgaaatcttttattttgaggtaaccagatccagtagttacaccagaaagtcccagttccaggtagaagaggaggacattgaaaagctagaaatcaggatcgacttgtggaacaatggaaacctagtccaagatgttttcctaggtgagattaaggttcctgtgaacgtattaagaactgattcctctcatcaagcctggtacttgctacagccaagagacaatggaaacaagtcatccaaaactgatgacctggggtctcttcgattaaatatatgttatacagaagactacgtgcttccttcagagtactatggtcctttgaaaactttgctgctaaaatcaccagatgttcaaccaatatctgcctcagctgcttacattttgagtgaaatatgtcgagataaaaatgatgctgttttgccccttgtacgactgctgctgcaccatgataaacttgttccttttgccactgctgtggctgaattagacttgaaggatacacaagatgcaaacacaatttttagaggaaattccctggctacccgatgtctggatgagatgatgaaaatagtgggagggcactacctgaaagtaacattaaaacctattcttgatgagatatgtgactcctcaaaatcctgtgaaatcgatcctattaaattgaaagagggagataatgtagaaaataataaggagaatctgcgctactatgtagacaagttattcaatacaattgtaaaatcaagtatgagctgccccactgtaatgtgtgatatcttttattctctaaggcagatggctactcagagatttcctaatgaccctcatgttcagtattctgcagtgagcagctttgtatttcttcgtttctttgctgtagccgtagtatcacctcatacttttcatttgcgacctcatcatccagatgcacagacaattagaacattaactctcatctcaaaaactatacaaactttgggaagctgggggagtctgtccaaaagcaagtcaagtttcaaagagacattcatgtgtgaatttttcaaaatgtttcaagaagaaggatatattatagcagttaaaaagttcttggatgaaatttcatctactgaaactaaagagtccagtggtacgagtgagcctgtgcacctgaaagaaggtgagatgtataaaagagctcaaggaagaactcggattggaaaaaagaattttaagaaacgatggttctgcttaacaagcagagagctcacctaccacaaacagccaggcaaagatgcaatctacacaatcccagtaaaaaacattcttgctgtggaaaaactggaagagagctctttcaacaagaaaaatatgttccaagtaatacatacggagaaaccactctatgtccaggcaaataactgtgtagaagctaatgaatggatagacgtactctgcagggtgagccgatgcaatcaaaacaggctcagtttttatcatccctctgtgtatctaaacggaaattggctctgctgtcaggagactggtgaaaacactctcggctgcaagccatgtactgcaggtgtccctgcagacatccaaatagatattgatgaagacagagaaacagaaagaatttattccctttttaccctcagtttacttaagctgcagaagatggaagaggcttgtggaactattgcagtctatcaaggaccacagaaagagcctgatgattattctaactttgtaatcgaggattctgtaacaacctttaagacaattcagcaaataaaaagcataattgagaagctggatgaacctcatgaaaaatataggaagaaaagatccagtagtgcaaaatatgggagcaaggaaaatccaattgttgggaaagcatcttagagtttaacagattggttcagaagaactggaaaatattatttttcttggagcttttcaattcatcatgtattttgttcatggtatttaagaatgagcatccgcttcaatgtcatctgcctccacattgtatttaatatttaataattgaaattaattgtttgggaatcctggtattgatgtattactagagaatttaaagcccaagattcccttcatacctgtgtgaccaaatccatgtttctgcaacttctttttaatcgaaagaatcttcctagaaaagctttgtaacaaagggagaactcctccgtagcaagaaaccatctcttcttgtaacactctgttctgtggacttgttttcactaccatcagtgcctgctctatactgccaacattgtgttttactagaaaattccaattcatgacagttcagagcttttcatttagttcatgtagaccctcccactttaaaaaaagaaaaaaaataagaagtgtttttcctttggtccatcagtcattacaggttccattcaagacagtgatagaaactttagaaaactgccagagcatacttgaaagttggtagatccttttgcctaaagatgtaaacaaaactcaagacagaaggaatcagggaatatgtgctattgtgtgcatcttgtttacatttgggatcagtgatggcaaaagaagtaatgagaccactgaaattgttttcattgttttaaataccaggtactcattttcttgatttgaaagtttaacatgacttctaaggacatctcttcaaaaagaaagtaaacagggaatgaaggtggtgggaaaatcacttcacttcacccactatttcatgttgtaataagggccaccataaggatgccctcctcatagtgttcggttctgatcttcctcgagaacagtcacttggcgcactttaataatctggactgctccagatttgactttagatactccatggtatctagtctttatgatcagttgaatgatcagtgtttaagtctaaaaataatgctttcctgaaaatgtttatatttcattgctgtttccttattgcctgctagccaaatggaatttgggcaagcaactctttgaagacttttttaccctagaaatttacttttgtcctaaaaaccctaactgtaaataagcagtcgaagcaagttgccaccttgaagttgagggatacactttgcttcatcagtattaaaaaccatggtactcttattttgtcttttttaattcaaaacattttctaaatgtggtactttgaaccttggagtatttacatgtttctgttcaaaactgtgacttattaatgtaagtctgctagtagtactttttttgtctgagcataagctatatttcaagatatactttgccaattttgttattggtgggtaatcatttttaaattatattgttattaggtaattatttttaaagactactggcatacaatcaaagttgttccataaaagaatataactgagcaatgtatttctctaaatgacttgtaaaaatcaatgaattatgtttaagtctgcattatggtaggttattactcccagctcattttaaagacaagtttgaaagagtcctttaaattttataagcttgtagattccataaactacactgatttatacatttgaaagaatttagccatttaataaatttcttattctcaaattgcatttagattaaaattccttttaagagtgtctgaaatgtctgcctgcgaagaacatgtaaacattgccagataccagtcattattctttagtggctttttagtcctctgcttttttttttaaggcaaaagaaatatgcatctagcatttctaataccaaatccccaattgtgattgttttaaagatcatggtatgatcacagggaccaaggctgtgtgcatatataactctggatttgaaaggaggagagttcagccatctagttcttttcttcacatgacacttttaaacagccagtttgactggaattaaccaacttggcacagcctaaaaaaggagtaatgtgaaattaaattatttttctttgaaagtcttttgaaataagagaccatgtaagtaggaccctaagacaaccaaggaatttgcttccagggccctcattcctctgctgttacttacaaatgttttaatttttactacctgatattctttctctaccttttccacatttgaaaatatacaaggcagctcacttcatcctaaaaacctaaaaactccaggaaggaaagaagatcaccttggtgttccttgtttggaagattacttcctctgaatttctgggcttttg

SEQ ID NO: 304167 - DNA, 4658 bp, Homo sapiens
gccttgttctaactactttatgtgttaacttatttggtcctcctagcaacctggtaaggtaaattctgttatcatccacatgtgcagataaggaaatcacaatacagtaacttttccaagctcacacaactgacaaattatgatttgatcatactcgatttgaattggatttaactgggattcaaattcagtcagtctttatcatctgtgagcttaatcctatcccttccaacctcttagacagatgttcaagtacctataatgtatcattccatgctcagtactggagatgcagtgatgagtaagatactctttgcccttaggaaactcacagccaagaggagttgctcaatagtgtagggaaaacagatgagttttagagttaaaccaggttctgaatacccatttcttctctcaacggctacatgacattgacactcacttaactttgtgagaactgaatagaaccatgttgcagtggcagcaccacgccctttcttgccaaaggataaatggtctgtgagtagccccagcagagagtgggccagtgtccttttgttcacagggctgtccattctgtggctttgttactaaagctgcacagaactctgaggcagtgaaagcgtggtagcaacattctggacataaacagaacacctacttctgaacttgatgcacagacaattagaacattaactctcatctcaaaaactatacaaactttgggaagctgggggagtctgtccaaaagcaagtcaagtttcaaagagacattcatgtgtgaatttttcaaaatgtttcaagaagaaggatatattatagcagttaaaaagttcttggatgaaatttcatctactgaaactaaagagtccagtggtacgagtgagcctgtgcacctgaaagaaggtgagatgtataaaagagctcaaggaagaactcggattggaaaaaagaattttaagaaacgatggttctgcttaacaagcagagagctcacctaccacaaacagccaggcaaagatgcaatctacacaatcccagtaaaaaacattcttgctgtggaaaaactggaagagagctctttcaacaagaaaaatatgttccaagtaatacatacggagaaaccactctatgtccaggcaaataactgtgtagaagctaatgaatggatagacgtactctgcagggtgagccgatgcaatcaaaacaggctcagtttttatcatccctctgtgtatctaaacggaaattggctctgctgtcaggagactggtgaaaacactctcggctgcaagccatgtactgcaggtgtccctgcagacatccaaatagatattgatgaagacagagaaacagaaagaatttattccctttttaccctcagtttacttaagctgcagaagatggaagaggcttgtggaactattgcagtctatcaaggaccacagaaagagcctgatgattattctaactttgtaatcgaggattctgtaacaacctttaagacaattcagcaaataaaaagcataattgagaagctggatgaacctcatgaaaaatataggaagaaaagatccagtagtgcaaaatatgggagcaaggaaaatccaattgttgggaaagcatcttagagtttaacagattggttcagaagaactggaaaatattatttttcttggagcttttcaattcatcatgtattttgttcatggtatttaagaatgagcatccgcttcaatgtcatctgcctccacattgtatttaatatttaataattgaaattaattgtttgggaatcctggtattgatgtattactagagaatttaaagcccaagattcccttcatacctgtgtgaccaaatccatgtttctgcaacttctttttaatcgaaagaatcttcctagaaaagctttgtaacaaagggagaactcctccgtagcaagaaaccatctcttcttgtaacactctgttctgtggacttgttttcactaccatcagtgcctgctctatactgccaacattgtgttttactagaaaattccaattcatgacagttcagagcttttcatttagttcatgtagaccctcccactttaaaaaaagaaaaaaaataagaagtgtttttcctttggtccatcagtcattacaggttccattcaagacagtgatagaaactttagaaaactgccagagcatacttgaaagttggtagatccttttgcctaaagatgtaaacaaaactcaagacagaaggaatcagggaatatgtgctattgtgtgcatcttgtttacatttgggatcagtgatggcaaaagaagtaatgagaccactgaaattgttttcattgttttaaataccaggtactcattttcttgatttgaaagtttaacatgacttctaaggacatctcttcaaaaagaaagtaaacagggaatgaaggtggtgggaaaatcacttcacttcacccactatttcatgttgtaataagggccaccataaggatgccctcctcatagtgttcggttctgatcttcctcgagaacagtcacttggcgcactttaataatctggactgctccagatttgactttagatactccatggtatctagtctttatgatcagttgaatgatcagtgtttaagtctaaaaataatgctttcctgaaaatgtttatatttcattgctgtttccttattgcctgctagccaaatggaatttgggcaagcaactctttgaagacttttttaccctagaaatttacttttgtcctaaaaaccctaactgtaaataagcagtcgaagcaagttgccaccttgaagttgagggatacactttgcttcatcagtattaaaaaccatggtactcttattttgtcttttttaattcaaaacattttctaaatgtggtactttgaaccttggagtatttacatgtttctgttcaaaactgtgacttattaatgtaagtctgctagtagtactttttttgtctgagcataagctatatttcaagatatactttgccaattttgttattggtgggtaatcatttttaaattatattgttattaggtaattatttttaaagactactggcatacaatcaaagttgttccataaaagaatataactgagcaatgtatttctctaaatgacttgtaaaaatcaatgaattatgtttaagtctgcattatggtaggttattactcccagctcattttaaagacaagtttgaaagagtcctttaaattttataagcttgtagattccataaactacactgatttatacatttgaaagaatttagccatttaataaatttcttattctcaaattgcatttagattaaaattccttttaagagtgtctgaaatgtctgcctgcgaagaacatgtaaacattgccagataccagtcattattctttagtggctttttagtcctctgcttttttttttaaggcaaaagaaatatgcatctagcatttctaataccaaatccccaattgtgattgttttaaagatcatggtatgatcacagggaccaaggctgtgtgcatatataactctggatttgaaaggaggagagttcagccatctagttcttttcttcacatgacacttttaaacagccagtttgactggaattaaccaacttggcacagcctaaaaaaggagtaatgtgaaattaaattatttttctttgaaagtcttttgaaataagagaccatgtaagtaggaccctaagacaaccaaggaatttgcttccagggccctcattcctctgctgttacttacaaatgttttaatttttactacctgatattctttctctaccttttccacatttgaaaatatacaaggcagctcacttcatcctaaaaacctaaaaactccaggaaggaaagaaaaggatgatatggggaaatttgccataaatgccggttctggttcttagtttagccatttccatcagttgaaattgtggtgtgatctgttgcttgtttcgttgttgttttgtttttgtgtagctttgttttttaatattcatttaataagatgatgggcaatagcaaacatttttactcccaggaatataatttatcaaattgaactattttatttgccaaagaaacttgtttttaatatcacgggtaatgggtaagtgtgaaaactaggcttttttttatgaaacaaaaaaaggtgacgaataatatggcttttgtttctgtttctgaagcctgatttcatttatgccaggttttgaaaaacagatctttttcttaagtgaaagcacctttaatttgctctaacggtacatcctgtaaagacagaattctgcatagccttttaggtgtttttacagtatgtgaaaaatacaagactcattctagagttaaattaccaatcttggttgatattatctgcttccatttttattaatttggaaattaatatgttgctagtaaatattggtttttacagtacccagtttgaaaatgtaagttatcaaaacttaatgtagtgaatttgtgtaaccatgttgtattgttgagaatgtatttttatttaaattttattttcttatcaagagtattataaaaattaacttttgtaactgtcgcttggaaataactcaaataaattacaagaagc

SEQ ID NO: 304168 - DNA, 4669 bp, Homo sapiens
aggagaggttgcagtgagctgagattgcaccactgcactccagcctgggcaacagagtgagcctctgtctccacataaataaataaataaataaataatacttttataatacttgtcatttgtaaattagggatttcctctctaattaaatatgtgttttgttttataaattactattatgtgtattcattaataatgaagaacttcccattataattaatgacatgtaagataaactgaattttttataatgtaccttatcacacagtgtaatatttgcccatttccccatttagttcttggatgaaatttcatctactgaaactaaagagtccagtggtacgagtgagcctgtgcacctgaaagaagggtaatttaatcaaattagacgtgaaagtcatatatcagtatagatattaagtaagtacaaagagcgtgggtctaagagtgaggagatctggctttgtgtgctgtgttagaactgccaaaattagcagtcaggtaagtcgcctttactgtcctacaaactttatggcaaaaaaagcatgatttcctgtgcatacagtcctagagttgttttgcaattatagtgagatgatgggtatttagagtacttttaaaaagtaacagcactattagtcttaatgtaaagtgtttattataagttaagggggggaaccactcatttgacccttttttgttctgtatagtacaattaaaaatattaaattaattaaagaccttattcctttagtgtggccaaaataaatgcaacagtcatggatagcaaaaacatttttatatatttaatataatcttacactactattcatgtcatttaaagttaaaggatacttctttgttttggattaacttttaatttttatagctaaatgtttacatctgttatgttggcagtgagatgtataaaagagctcaaggaagaactcggattggaaaaaagaattttaagaaacgatggttctgcttaacaagcagagagctcacctaccacaaacagccaggcaaagatgcaatctacacaatcccagtaaaaaacattcttgctgtggaaaaactggaagagagctctttcaacaagaaaaatatgttccaagtaatacatacggagaaaccactctatgtccaggcaaataactgtgtagaagctaatgaatggatagacgtactctgcagggtgagccgatgcaatcaaaacaggctcagtttttatcatccctctgtgtatctaaacggaaattggctctgctgtcaggagactggtgaaaacactctcggctgcaagccatgtactgcaggtgtccctgcagacatccaaatagatattgatgaagacagagaaacagaaagaatttattccctttttaccctcagtttacttaagctgcagaagatggaagaggcttgtggaactattgcagtctatcaaggaccacagaaagagcctgatgattattctaactttgtaatcgaggattctgtaacaacctttaagacaattcagcaaataaaaagcataattgagaagctggatgaacctcatgaaaaatataggaagaaaagatccagtagtgcaaaatatgggagcaaggaaaatccaattgttgggaaagcatcttagagtttaacagattggttcagaagaactggaaaatattatttttcttggagcttttcaattcatcatgtattttgttcatggtatttaagaatgagcatccgcttcaatgtcatctgcctccacattgtatttaatatttaataattgaaattaattgtttgggaatcctggtattgatgtattactagagaatttaaagcccaagattcccttcatacctgtgtgaccaaatccatgtttctgcaacttctttttaatcgaaagaatcttcctagaaaagctttgtaacaaagggagaactcctccgtagcaagaaaccatctcttcttgtaacactctgttctgtggacttgttttcactaccatcagtgcctgctctatactgccaacattgtgttttactagaaaattccaattcatgacagttcagagcttttcatttagttcatgtagaccctcccactttaaaaaaagaaaaaaaataagaagtgtttttcctttggtccatcagtcattacaggttccattcaagacagtgatagaaactttagaaaactgccagagcatacttgaaagttggtagatccttttgcctaaagatgtaaacaaaactcaagacagaaggaatcagggaatatgtgctattgtgtgcatcttgtttacatttgggatcagtgatggcaaaagaagtaatgagaccactgaaattgttttcattgttttaaataccaggtactcattttcttgatttgaaagtttaacatgacttctaaggacatctcttcaaaaagaaagtaaacagggaatgaaggtggtgggaaaatcacttcacttcacccactatttcatgttgtaataagggccaccataaggatgccctcctcatagtgttcggttctgatcttcctcgagaacagtcacttggcgcactttaataatctggactgctccagatttgactttagatactccatggtatctagtctttatgatcagttgaatgatcagtgtttaagtctaaaaataatgctttcctgaaaatgtttatatttcattgctgtttccttattgcctgctagccaaatggaatttgggcaagcaactctttgaagacttttttaccctagaaatttacttttgtcctaaaaaccctaactgtaaataagcagtcgaagcaagttgccaccttgaagttgagggatacactttgcttcatcagtattaaaaaccatggtactcttattttgtcttttttaattcaaaacattttctaaatgtggtactttgaaccttggagtatttacatgtttctgttcaaaactgtgacttattaatgtaagtctgctagtagtactttttttgtctgagcataagctatatttcaagatatactttgccaattttgttattggtgggtaatcatttttaaattatattgttattaggtaattatttttaaagactactggcatacaatcaaagttgttccataaaagaatataactgagcaatgtatttctctaaatgacttgtaaaaatcaatgaattatgtttaagtctgcattatggtaggttattactcccagctcattttaaagacaagtttgaaagagtcctttaaattttataagcttgtagattccataaactacactgatttatacatttgaaagaatttagccatttaataaatttcttattctcaaattgcatttagattaaaattccttttaagagtgtctgaaatgtctgcctgcgaagaacatgtaaacattgccagataccagtcattattctttagtggctttttagtcctctgcttttttttttaaggcaaaagaaatatgcatctagcatttctaataccaaatccccaattgtgattgttttaaagatcatggtatgatcacagggaccaaggctgtgtgcatatataactctggatttgaaaggaggagagttcagccatctagttcttttcttcacatgacacttttaaacagccagtttgactggaattaaccaacttggcacagcctaaaaaaggagtaatgtgaaattaaattatttttctttgaaagtcttttgaaataagagaccatgtaagtaggaccctaagacaaccaaggaatttgcttccagggccctcattcctctgctgttacttacaaatgttttaatttttactacctgatattctttctctaccttttccacatttgaaaatatacaaggcagctcacttcatcctaaaaacctaaaaactccaggaaggaaagaaaaggatgatatggggaaatttgccataaatgccggttctggttcttagtttagccatttccatcagttgaaattgtggtgtgatctgttgcttgtttcgttgttgttttgtttttgtgtagctttgttttttaatattcatttaataagatgatgggcaatagcaaacatttttactcccaggaatataatttatcaaattgaactattttatttgccaaagaaacttgtttttaatatcacgggtaatgggtaagtgtgaaaactaggcttttttttatgaaacaaaaaaaggtgacgaataatatggcttttgtttctgtttctgaagcctgatttcatttatgccaggttttgaaaaacagatctttttcttaagtgaaagcacctttaatttgctctaacggtacatcctgtaaagacagaattctgcatagccttttaggtgtttttacagtatgtgaaaaatacaagactcattctagagttaaattaccaatcttggttgatattatctgcttccatttttattaatttggaaattaatatgttgctagtaaatattggtttttacagtacccagtttgaaaatgtaagttatcaaaacttaatgtagtgaatttgtgtaaccatgttgtattgttgagaatgtatttttatttaaattttattttcttatcaagagtattataaaaattaacttttgtaactgtcgcttggaaataactcaaataaattacaagaagc

SEQ ID NO: 304169 - DNA, 6007 bp, Homo sapiens
aaaaacacaagatttccttatgcgttttttgtgacctcctctgaatctataattaaattaaaagatttttttaagaagtctctattatacctgaagcccaagaagtaagctgagttaagaatgtttttcaagttccttgggtatttttcaacatagatgaaggtgctctaaatcttattgtcttccttctatttattctgagttgcttatagaatagaatgtgtttttaaaacccctgaaaaaggttggcaatctagtgtgtccgtagagagaataatacaatcttggcacataggggatgcctaaagcttatatattctttgatttgagtttataaggacagttacttttttccaagcaatatttaaaactgaatcttccctgagtcaccttaacttttaaatggaggtcaggctccctggttggaaatagcatgttttataattgtgtactgttaagttctacaaggtaaaactctaccacattggaacaggaatgaccaaaagaagacaaaagtaaagaagaaaacaagcaatccgcagtttaatgaaatcttttattttgaggtaaccagatccagtagttacaccagaaagtcccagttccaggtagaagaggaggacattgaaaagctagaaatcaggatcgacttgtggaacaatggaaacctagtccaagatgttttcctaggtgagattaaggttcctgtgaacgtattaagaactgattcctctcatcaagcctggtacttgctacagccaagagacaatggaaacaagtcatccaaaactgatgacctggggtctcttcgattaaatatatgttatacagaagactacgtgcttccttcagagtactatggtcctttgaaaactttgctgctaaaatcaccagatgttcaaccaatatctgcctcagctgcttacattttgagtgaaatatgtcgagataaaaatgatgctgttttgccccttgtacgactgctgctgcaccatgataaacttgttccttttgccactgctgtggctgaattagacttgaaggatacacaagatgcaaacacaatttttagaggaaattccctggctacccgatgtctggatgagatgatgaaaatagtgggagggcactacctgaaagtaacattaaaacctattcttgatgagatatgtgactcctcaaaatcctgtgaaatcgatcctattaaattgaaagagggagataatgtagaaaataataaggagaatctgcgctactatgtagacaagttattcaatacaattgtaaaatcaagtatgagctgccccactgtaatgtgtgatatcttttattctctaaggcagatggctactcagagatttcctaatgaccctcatgttcagtattctgcagtgagcagctttgtatttcttcgtttctttgctgtagccgtagtatcacctcatacttttcatttgcgacctcatcatccagatgcacagacaattagaacattaactctcatctcaaaaactatacaaactttgggaagctgggggagtctgtccaaaagcaagtcaagtttcaaagagacattcatgtgtgaatttttcaaaatgtttcaagaagaaggatatattatagcagttaaaaagttcttggatgaaatttcatctactgaaactaaagagtccagtggtacgagtgagcctgtgcacctgaaagaagggtaatttaatcaaattagacgtgaaagtcatatatcagtatagatattaagtaagtacaaagagcgtgggtctaagagtgaggagatctggctttgtgtgctgtgttagaactgccaaaattagcagtcaggtaagtcgcctttactgtcctacaaactttatggcaaaaaaagcatgatttcctgtgcatacagtcctagagttgttttgcaattatagtgagatgatgggtatttagagtacttttaaaaagtaacagcactattagtcttaatgtaaagtgtttattataagttaagggggggaaccactcatttgacccttttttgttctgtatagtacaattaaaaatattaaattaattaaagaccttattcctttagtgtggccaaaataaatgcaacagtcatggatagcaaaaacatttttatatatttaatataatcttacactactattcatgtcatttaaagttaaaggatacttctttgttttggattaacttttaatttttatagctaaatgtttacatctgttatgttggcagtgagatgtataaaagagctcaaggaagaactcggattggaaaaaagaattttaagaaacgatggttctgcttaacaagcagagagctcacctaccacaaacagccaggcaaagatgcaatctacacaatcccagtaaaaaacattcttgctgtggaaaaactggaagagagctctttcaacaagaaaaatatgttccaagtaatacatacggagaaaccactctatgtccaggcaaataactgtgtagaagctaatgaatggatagacgtactctgcagggtgagccgatgcaatcaaaacaggctcagtttttatcatccctctgtgtatctaaacggaaattggctctgctgtcaggagactggtgaaaacactctcggctgcaagccatgtactgcaggtgtccctgcagacatccaaatagatattgatgaagacagagaaacagaaagaatttattccctttttaccctcagtttacttaagctgcagaagatggaagaggcttgtggaactattgcagtctatcaaggaccacagaaagagcctgatgattattctaactttgtaatcgaggattctgtaacaacctttaagacaattcagcaaataaaaagcataattgagaagctggatgaacctcatgaaaaatataggaagaaaagatccagtagtgcaaaatatgggagcaaggaaaatccaattgttgggaaagcatcttagagtttaacagattggttcagaagaactggaaaatattatttttcttggagcttttcaattcatcatgtattttgttcatggtatttaagaatgagcatccgcttcaatgtcatctgcctccacattgtatttaatatttaataattgaaattaattgtttgggaatcctggtattgatgtattactagagaatttaaagcccaagattcccttcatacctgtgtgaccaaatccatgtttctgcaacttctttttaatcgaaagaatcttcctagaaaagctttgtaacaaagggagaactcctccgtagcaagaaaccatctcttcttgtaacactctgttctgtggacttgttttcactaccatcagtgcctgctctatactgccaacattgtgttttactagaaaattccaattcatgacagttcagagcttttcatttagttcatgtagaccctcccactttaaaaaaagaaaaaaaataagaagtgtttttcctttggtccatcagtcattacaggttccattcaagacagtgatagaaactttagaaaactgccagagcatacttgaaagttggtagatccttttgcctaaagatgtaaacaaaactcaagacagaaggaatcagggaatatgtgctattgtgtgcatcttgtttacatttgggatcagtgatggcaaaagaagtaatgagaccactgaaattgttttcattgttttaaataccaggtactcattttcttgatttgaaagtttaacatgacttctaaggacatctcttcaaaaagaaagtaaacagggaatgaaggtggtgggaaaatcacttcacttcacccactatttcatgttgtaataagggccaccataaggatgccctcctcatagtgttcggttctgatcttcctcgagaacagtcacttggcgcactttaataatctggactgctccagatttgactttagatactccatggtatctagtctttatgatcagttgaatgatcagtgtttaagtctaaaaataatgctttcctgaaaatgtttatatttcattgctgtttccttattgcctgctagccaaatggaatttgggcaagcaactctttgaagacttttttaccctagaaatttacttttgtcctaaaaaccctaactgtaaataagcagtcgaagcaagttgccaccttgaagttgagggatacactttgcttcatcagtattaaaaaccatggtactcttattttgtcttttttaattcaaaacattttctaaatgtggtactttgaaccttggagtatttacatgtttctgttcaaaactgtgacttattaatgtaagtctgctagtagtactttttttgtctgagcataagctatatttcaagatatactttgccaattttgttattggtgggtaatcatttttaaattatattgttattaggtaattatttttaaagactactggcatacaatcaaagttgttccataaaagaatataactgagcaatgtatttctctaaatgacttgtaaaaatcaatgaattatgtttaagtctgcattatggtaggttattactcccagctcattttaaagacaagtttgaaagagtcctttaaattttataagcttgtagattccataaactacactgatttatacatttgaaagaatttagccatttaataaatttcttattctcaaattgcatttagattaaaattccttttaagagtgtctgaaatgtctgcctgcgaagaacatgtaaacattgccagataccagtcattattctttagtggctttttagtcctctgcttttttttttaaggcaaaagaaatatgcatctagcatttctaataccaaatccccaattgtgattgttttaaagatcatggtatgatcacagggaccaaggctgtgtgcatatataactctggatttgaaaggaggagagttcagccatctagttcttttcttcacatgacacttttaaacagccagtttgactggaattaaccaacttggcacagcctaaaaaaggagtaatgtgaaattaaattatttttctttgaaagtcttttgaaataagagaccatgtaagtaggaccctaagacaaccaaggaatttgcttccagggccctcattcctctgctgttacttacaaatgttttaatttttactacctgatattctttctctaccttttccacatttgaaaatatacaaggcagctcacttcatcctaaaaacctaaaaactccaggaaggaaagaaaaggatgatatggggaaatttgccataaatgccggttctggttcttagtttagccatttccatcagttgaaattgtggtgtgatctgttgcttgtttcgttgttgttttgtttttgtgtagctttgttttttaatattcatttaataagatgatgggcaatagcaaacatttttactcccaggaatataatttatcaaattgaactattttatttgccaaagaaacttgtttttaatatcacgggtaatgggtaagtgtgaaaactaggcttttttttatgaaacaaaaaaaggtgacgaataatatggcttttgtttctgtttctgaagcctgatttcatttatgccaggttttgaaaaacagatctttttcttaagtgaaagcacctttaatttgctctaacggtacatcctgtaaagacagaattctgcatagccttttaggtgtttttacagtatgtgaaaaatacaagactcattctagagttaaattaccaatcttggttgatattatctgcttccatttttattaatttggaaattaatatgttgctagtaaatattggtttttacagtacccagtttgaaaatgtaagttatcaaaacttaatgtagtgaatttgtgtaaccatgttgtattgttgagaatgtatttttatttaaattttattttcttatcaagagtattataaaaattaacttttgtaactgtcgcttggaaataactcaaataaattacaagaagc

SEQ ID NO: 304170 - DNA, 5941 bp, Homo sapiens
gccttgttctaactactttatgtgttaacttatttggtcctcctagcaacctggtaaggtaaattctgttatcatccacatgtgcagataaggaaatcacaatacagtaacttttccaagctcacacaactgacaaattatgatttgatcatactcgatttgaattggatttaactgggattcaaattcagtcagtctttatcatctgtgagcttaatcctatcccttccaacctcttagacagatgttcaagtacctataatgtatcattccatgctcagtactggagatgcagtgatgagtaagatactctttgcccttaggaaactcacagccaagaggagttgctcaatagtgtagggaaaacagatgagttttagagttaaaccaggttctgaatacccatttcttctctcaacggctacatgacattgacactcacttaactttgtgagaactgaatagaaccatgttgcagtggcagcaccacgccctttcttgccaaaggataaatggtctgtgagtagccccagcagagagtgggccagtgtccttttgttcacagggctgtccattctgtggctttgttactaaagctgcacagaactctgaggcagtgaaagcgtggtagcaacattctggacataaacagaacacctacttctgaacttgtgagtctgccttgtattcatacttgaatttgcatattcctgtaacagatgttggtggatacttaggttggttctatgactttgctattgtaaatagtgctgcaggaaacatgagtgcaggtgccaggacatctttaagaatattattttcttcaaagacagagaattgtagggaccttttatagatgtaatgaaatcccagatgttacagctaaaatgttttctgaatagacttaatttaggtgtgtatctactttataagtatattataaggatcatatttcggatattccttcctttccagattaccttatattctggtcatctcttccccttcacattcattgcctgttttcaatgtgggggttggggggatactaaaatatcaaggaatgggagccaaaaatcaaactaaagcttttctgtatctaaatttttctggatatgtttttagatgcaagatactgtttacttgaatccgtaaataaaaatggtctgtgttttgatagaaacttacacaaatgtatggattggtgaaaattcagcagggtattcatttaatacctattcattttgtcatatgtaaattatatctcaatttttaaaaaaatgaaggagcaaagattcctgagggaacaccgtttagtcaattttatatgctactatatattacttctttcagatagacaggcctgaaaaacctcttggataatagacccaaataatcaccctctggatgcacagacaattagaacattaactctcatctcaaaaactatacaaactttgggaagctgggggagtctgtccaaaagcaagtcaagtttcaaagagacattcatgtgtgaatttttcaaaatgtttcaagaagaaggatatattatagcagttaaaaagttcttggatgaaatttcatctactgaaactaaagagtccagtggtacgagtgagcctgtgcacctgaaagaagggtaatttaatcaaattagacgtgaaagtcatatatcagtatagatattaagtaagtacaaagagcgtgggtctaagagtgaggagatctggctttgtgtgctgtgttagaactgccaaaattagcagtcaggtaagtcgcctttactgtcctacaaactttatggcaaaaaaagcatgatttcctgtgcatacagtcctagagttgttttgcaattatagtgagatgatgggtatttagagtacttttaaaaagtaacagcactattagtcttaatgtaaagtgtttattataagttaagggggggaaccactcatttgacccttttttgttctgtatagtacaattaaaaatattaaattaattaaagaccttattcctttagtgtggccaaaataaatgcaacagtcatggatagcaaaaacatttttatatatttaatataatcttacactactattcatgtcatttaaagttaaaggatacttctttgttttggattaacttttaatttttatagctaaatgtttacatctgttatgttggcagtgagatgtataaaagagctcaaggaagaactcggattggaaaaaagaattttaagaaacgatggttctgcttaacaagcagagagctcacctaccacaaacagccaggcaaagatgcaatctacacaatcccagtaaaaaacattcttgctgtggaaaaactggaagagagctctttcaacaagaaaaatatgttccaagtaatacatacggagaaaccactctatgtccaggcaaataactgtgtagaagctaatgaatggatagacgtactctgcagggtgagccgatgcaatcaaaacaggctcagtttttatcatccctctgtgtatctaaacggaaattggctctgctgtcaggagactggtgaaaacactctcggctgcaagccatgtactgcaggtgtccctgcagacatccaaatagatattgatgaagacagagaaacagaaagaatttattccctttttaccctcagtttacttaagctgcagaagatggaagaggcttgtggaactattgcagtctatcaaggaccacagaaagagcctgatgattattctaactttgtaatcgaggattctgtaacaacctttaagacaattcagcaaataaaaagcataattgagaagctggatgaacctcatgaaaaatataggaagaaaagatccagtagtgcaaaatatgggagcaaggaaaatccaattgttgggaaagcatcttagagtttaacagattggttcagaagaactggaaaatattatttttcttggagcttttcaattcatcatgtattttgttcatggtatttaagaatgagcatccgcttcaatgtcatctgcctccacattgtatttaatatttaataattgaaattaattgtttgggaatcctggtattgatgtattactagagaatttaaagcccaagattcccttcatacctgtgtgaccaaatccatgtttctgcaacttctttttaatcgaaagaatcttcctagaaaagctttgtaacaaagggagaactcctccgtagcaagaaaccatctcttcttgtaacactctgttctgtggacttgttttcactaccatcagtgcctgctctatactgccaacattgtgttttactagaaaattccaattcatgacagttcagagcttttcatttagttcatgtagaccctcccactttaaaaaaagaaaaaaaataagaagtgtttttcctttggtccatcagtcattacaggttccattcaagacagtgatagaaactttagaaaactgccagagcatacttgaaagttggtagatccttttgcctaaagatgtaaacaaaactcaagacagaaggaatcagggaatatgtgctattgtgtgcatcttgtttacatttgggatcagtgatggcaaaagaagtaatgagaccactgaaattgttttcattgttttaaataccaggtactcattttcttgatttgaaagtttaacatgacttctaaggacatctcttcaaaaagaaagtaaacagggaatgaaggtggtgggaaaatcacttcacttcacccactatttcatgttgtaataagggccaccataaggatgccctcctcatagtgttcggttctgatcttcctcgagaacagtcacttggcgcactttaataatctggactgctccagatttgactttagatactccatggtatctagtctttatgatcagttgaatgatcagtgtttaagtctaaaaataatgctttcctgaaaatgtttatatttcattgctgtttccttattgcctgctagccaaatggaatttgggcaagcaactctttgaagacttttttaccctagaaatttacttttgtcctaaaaaccctaactgtaaataagcagtcgaagcaagttgccaccttgaagttgagggatacactttgcttcatcagtattaaaaaccatggtactcttattttgtcttttttaattcaaaacattttctaaatgtggtactttgaaccttggagtatttacatgtttctgttcaaaactgtgacttattaatgtaagtctgctagtagtactttttttgtctgagcataagctatatttcaagatatactttgccaattttgttattggtgggtaatcatttttaaattatattgttattaggtaattatttttaaagactactggcatacaatcaaagttgttccataaaagaatataactgagcaatgtatttctctaaatgacttgtaaaaatcaatgaattatgtttaagtctgcattatggtaggttattactcccagctcattttaaagacaagtttgaaagagtcctttaaattttataagcttgtagattccataaactacactgatttatacatttgaaagaatttagccatttaataaatttcttattctcaaattgcatttagattaaaattccttttaagagtgtctgaaatgtctgcctgcgaagaacatgtaaacattgccagataccagtcattattctttagtggctttttagtcctctgcttttttttttaaggcaaaagaaatatgcatctagcatttctaataccaaatccccaattgtgattgttttaaagatcatggtatgatcacagggaccaaggctgtgtgcatatataactctggatttgaaaggaggagagttcagccatctagttcttttcttcacatgacacttttaaacagccagtttgactggaattaaccaacttggcacagcctaaaaaaggagtaatgtgaaattaaattatttttctttgaaagtcttttgaaataagagaccatgtaagtaggaccctaagacaaccaaggaatttgcttccagggccctcattcctctgctgttacttacaaatgttttaatttttactacctgatattctttctctaccttttccacatttgaaaatatacaaggcagctcacttcatcctaaaaacctaaaaactccaggaaggaaagaaaaggatgatatggggaaatttgccataaatgccggttctggttcttagtttagccatttccatcagttgaaattgtggtgtgatctgttgcttgtttcgttgttgttttgtttttgtgtagctttgttttttaatattcatttaataagatgatgggcaatagcaaacatttttactcccaggaatataatttatcaaattgaactattttatttgccaaagaaacttgtttttaatatcacgggtaatgggtaagtgtgaaaactaggcttttttttatgaaacaaaaaaaggtgacgaataatatggcttttgtttctgtttctgaagcctgatttcatttatgccaggttttgaaaaacagatctttttcttaagtgaaagcacctttaatttgctctaacggtacatcctgtaaagacagaattctgcatagccttttaggtgtttttacagtatgtgaaaaatacaagactcattctagagttaaattaccaatcttggttgatattatctgcttccatttttattaatttggaaattaatatgttgctagtaaatattggtttttacagtacccagtttgaaaatgtaagttatcaaaacttaatgtagtgaatttgtgtaaccatgttgtattgttgagaatgtatttttatttaaattttattttcttatcaagagtattataaaaattaacttttgtaactgtcgcttggaaataactcaaataaattacaagaagc

SEQ ID NO: 304171 - DNA, 3807 bp, Homo sapiens
aaaaaaaaaaaaaaaaaaaaaaaaagtacgagtgagcctgtgcacctgaaagaaggtgagatgtataaaagagctcaaggaagaactcggattggaaaaaagaattttaagaaacgatggttctgcttaacaagcagagagctcacctaccacaaacagccaggcaaagatgcaatctacacaatcccagtaaaaaacattcttgctgtggaaaaactggaagagagctctttcaacaagaaaaatatgttccaagtaatacatacggagaaaccactctatgtccaggcaaataactgtgtagaagctaatgaatggatagacgtactctgcagggtgagccgatgcaatcaaaacaggctcagtttttatcatccctctgtgtatctaaacggaaattggctctgctgtcaggagactggtgaaaacactctcggctgcaagccatgtactgcaggtgtccctgcagacatccaaatagatattgatgaagacagagaaacagaaagaatttattccctttttaccctcagtttacttaagctgcagaagatggaagaggcttgtggaactattgcagtctatcaaggaccacagaaagagcctgatgattattctaactttgtaatcgaggattctgtaacaacctttaagacaattcagcaaataaaaagcataattgagaagctggatgaacctcatgaaaaatataggaagaaaagatccagtagtgcaaaatatgggagcaaggaaaatccaattgttgggaaagcatcttagagtttaacagattggttcagaagaactggaaaatattatttttcttggagcttttcaattcatcatgtattttgttcatggtatttaagaatgagcatccgcttcaatgtcatctgcctccacattgtatttaatatttaataattgaaattaattgtttgggaatcctggtattgatgtattactagagaatttaaagcccaagattcccttcatacctgtgtgaccaaatccatgtttctgcaacttctttttaatcgaaagaatcttcctagaaaagctttgtaacaaagggagaactcctccgtagcaagaaaccatctcttcttgtaacactctgttctgtggacttgttttcactaccatcagtgcctgctctatactgccaacattgtgttttactagaaaattccaattcatgacagttcagagcttttcatttagttcatgtagaccctcccactttaaaaaaagaaaaaaaataagaagtgtttttcctttggtccatcagtcattacaggttccattcaagacagtgatagaaactttagaaaactgccagagcatacttgaaagttggtagatccttttgcctaaagatgtaaacaaaactcaagacagaaggaatcagggaatatgtgctattgtgtgcatcttgtttacatttgggatcagtgatggcaaaagaagtaatgagaccactgaaattgttttcattgttttaaataccaggtactcattttcttgatttgaaagtttaacatgacttctaaggacatctcttcaaaaagaaagtaaacagggaatgaaggtggtgggaaaatcacttcacttcacccactatttcatgttgtaataagggccaccataaggatgccctcctcatagtgttcggttctgatcttcctcgagaacagtcacttggcgcactttaataatctggactgctccagatttgactttagatactccatggtatctagtctttatgatcagttgaatgatcagtgtttaagtctaaaaataatgctttcctgaaaatgtttatatttcattgctgtttccttattgcctgctagccaaatggaatttgggcaagcaactctttgaagacttttttaccctagaaatttacttttgtcctaaaaaccctaactgtaaataagcagtcgaagcaagttgccaccttgaagttgagggatacactttgcttcatcagtattaaaaaccatggtactcttattttgtcttttttaattcaaaacattttctaaatgtggtactttgaaccttggagtatttacatgtttctgttcaaaactgtgacttattaatgtaagtctgctagtagtactttttttgtctgagcataagctatatttcaagatatactttgccaattttgttattggtgggtaatcatttttaaattatattgttattaggtaattatttttaaagactactggcatacaatcaaagttgttccataaaagaatataactgagcaatgtatttctctaaatgacttgtaaaaatcaatgaattatgtttaagtctgcattatggtaggttattactcccagctcattttaaagacaagtttgaaagagtcctttaaattttataagcttgtagattccataaactacactgatttatacatttgaaagaatttagccatttaataaatttcttattctcaaattgcatttagattaaaattccttttaagagtgtctgaaatgtctgcctgcgaagaacatgtaaacattgccagataccagtcattattctttagtggctttttagtcctctgcttttttttttaaggcaaaagaaatatgcatctagcatttctaataccaaatccccaattgtgattgttttaaagatcatggtatgatcacagggaccaaggctgtgtgcatatataactctggatttgaaaggaggagagttcagccatctagttcttttcttcacatgacacttttaaacagccagtttgactggaattaaccaacttggcacagcctaaaaaaggagtaatgtgaaattaaattatttttctttgaaagtcttttgaaataagagaccatgtaagtaggaccctaagacaaccaaggaatttgcttccagggccctcattcctctgctgttacttacaaatgttttaatttttactacctgatattctttctctaccttttccacatttgaaaatatacaaggcagctcacttcatcctaaaaacctaaaaactccaggaaggaaagaaaaggatgatatggggaaatttgccataaatgccggttctggttcttagtttagccatttccatcagttgaaattgtggtgtgatctgttgcttgtttcgttgttgttttgtttttgtgtagctttgttttttaatattcatttaataagatgatgggcaatagcaaacatttttactcccaggaatataatttatcaaattgaactattttatttgccaaagaaacttgtttttaatatcacgggtaatgggtaagtgtgaaaactaggcttttttttatgaaacaaaaaaaggtgacgaataatatggcttttgtttctgtttctgaagcctgatttcatttatgccaggttttgaaaaacagatctttttcttaagtgaaagcacctttaatttgctctaacggtacatcctgtaaagacagaattctgcatagccttttaggtgtttttacagtatgtgaaaaatacaagactcattctagagttaaattaccaatcttggttgatattatctgcttccatttttattaatttggaaattaatatgttgctagtaaatattggtttttacagtacccagtttgaaaatgtaagttatcaaaacttaatgtagtgaatttgtgtaaccatgttgtattgttgagaatgtatttttatttaaattttattttcttatcaagagtattataaaaattaacttttgtaactgtcgcttggaaataactcaaataaattacaagaagc

SEQ ID NO: 304172 - DNA, 1213 bp, Homo sapiens
atggcggcggcggcgcctgctgctgcggcggcttcttccgaggcgccagcggcgagtgcgactgcagagcccgaggccggggaccaggacagtcgcgaggttcgagtgttgcagagcctgcggggcaagatctgtgaagcaaaaaatttattgccatatcttggaccccacaaaatgagagattgtttctgtaccataaatttggaccaggaagaagtttatcgtacccaagttgtggaaaaatctttaagcccatttttcagtgaagaattttactttgagattccaagaactttccagtatttgtctttctatgtttatgataagaatgttttacaaagagatctccgtataggaaaagtagccatcaaaaaagaagacttgtgtaatcacagtggcaaagaaacttggttttcattacagcctgttgactccaattcagaggttcagggtaaagttcaccttgaattaaaactgaatgaactgataacggagaatggaactgtatgccagcagcttgttgtacacatcaaggcatgccatgggttgcctctcataaatggccaaagctgtgacccttatgcaacagtttctctagtgggcccttctaggaatgaccaaaagaagacaaaagtaaagaagaaaacaagcaatccgcagtttaatgaaatcttttattttgaggtaaccagatccagtagttacaccagaaagtcccagttccaggtagaagaggaggacattgaaaagctagaaatcaggatcgacttgtggaacaatggaaacctagtccaagatgttttcctaggtgagattaaggttcctgtgaacgtattaagaactgattcctctcatcaagcctggtacttgctacagccaagagacaatggaaacaagtcatccaaaactgatgacctggggtctcttcgattaaatatatgttatacagaagactacgtgcttccttcagagtactatggtcctttgaaaactttgctgctaaaatcaccagatgttcaaccaatatctgcctcagctgcttacattttgagtgaaatatgtcgagataaaaatgatgctgttttgccccttgtacgactgctgctgcaccatgataaacttgttccttttgccactgctgtggctgaattagacttgaaggatacacaagatgcaaacacaatttttaataaggaggtaccgagctcgattt

SEQ ID NO: 304173 - DNA, 1917 bp, Homo sapiens
atggcggcggcggcgcctgctgctgcggcggcttcttccgaggcgccagcggcgagtgcgactgcagagcccgaggccggggaccaggacagtcgcgaggttcgagtgttgcagagcctgcggggcaagatctgtgaagcaaaaaatttattgccatatcttggaccccacaaaatgagagattgtttctgtaccataaatttggaccaggaagaagtttatcgtacccaagttgtggaaaaatctttaagcccatttttcagtgaagaattttactttgagattccaagaactttccagtatttgtctttctatgtttatgataagaatgttttacaaagagatctccgtataggaaaagtagccatcaaaaaagaagacttgtgtaatcacagtggcaaagaaacttggttttcattacagcctgttgactccaattcagaggttcagggtaaagttcaccttgaattaaaactgaatgaactgataacggagaatggaactgtatgccagcagcttgttgtacacatcaaggcatgccatgggttgcctctcataaatggccaaagctgtgacccttatgcaacagtttctctagtgggcccttctaggaatgaccaaaagaagacaaaagtaaagaagaaaacaagcaatccgcagtttaatgaaatcttttattttgaggtaaccagatccagtagttacaccagaaagtcccagttccaggtagaagaggaggacattgaaaagctagaaatcaggatcgacttgtggaacaatggaaacctagtccaagatgttttcctaggtgagattaaggttcctgtgaacgtattaagaactgattcctctcatcaagcctggtacttgctacagccaagagacaatggaaacaagtcatccaaaactgatgacctggggtctcttcgattaaatatatgttatacagaagactacgtgcttccttcagagtactatggtcctttgaaaactttgctgctaaaatcaccagatgttcaaccaatatctgcctcagctgcttacattttgagtgaaatatgtcgagataaaaatgatgctgttttgccccttgtacgactgctgctgcaccatgataaacttgttccttttgccactgctgtggctgaattagacttgaaggatacacaagatgcaaacacaatttttagaggaaattccctggctacccgatgtctggatgagatgatgaaaatagtgggagggcactacctgaaagtaacattaaaacctattcttgatgagatatgtgactcctcaaaatcctgtgaaatcgatcctattaaattgaaagagggagataatgtagaaaataataaggagaatctgcgctactatgtagacaagttattcaatacaattgtaaaatcaagtatgagctgccccactgtaatgtgtgatatcttttattctctaaggcagatggctactcagagatttcctaatgaccctcatgttcagtattctgcagtgagcagctttgtatttcttcgtttctttgctgtagccgtagtatcacctcatacttttcatttgcgacctcatcatccagatgcacagacaattagaacattaactctcatctcaaaaactatacaaactttgggaagctgggggagtctgtccaaaagcaagtcaagtttcaaagagacattcatgtgtgaatttttcaaaatgtttcaagaagaaggatatattatagcagttaaaaagttcttggatgaaatttcatctactgaaactaaagagtccagtggtacgagtgagcctgtgcacctgaaagaaggtgagatgtatgagctcatggaagaactcggattggaacagccagtagttgtgttatgcctatagtggggtttttctgttctcagggttctt

SEQ ID NO: 304174 - DNA, 733 bp, Homo sapiens
gctttagcatgaggatatgatgccatagagctggcttggtttgtagcttctcatttagggtttgcaccactttcttttcctttttagaggccacagcagttttgatgtattatcaaaccgcaaaatgtaccttgttgggtatttagcagaaggaaatgtgttgactgttacacatcccttatctacagtgcttgagactgttttgaatttcttattcttattttttttttgagtatttgcattatatatacttgcccattaagcatcccaaatccaaaaagcccaaatttgaaatgctgcagtgagcatttccttggagcatcatgtcagtgctcagaaagttttgaattttggaggactttggatttttgaatttggaatgctcagtctgtgtttgatagtttcattagtgattgtggcattcctgtttagtctcattttgaaaatacagcataaatttaaaaatgcatacatacatatgtccatacatattactacctattccatataggtagtatatagccatacaactgcagacacatggaaaacaattcttaaccttttgaatgtattagtttgtgtttaaagataatgttttatcttgtttaactggaatctaatatgttaaatctcttttattctaccttagcatcaaggcatgccatgggttgcctctcataaatggccaaagctgtgacccttatgcaacagtttctctagtgggcccttctag

SEQ ID NO: 304175 - DNA, 246 bp, Homo sapiens
gcggccgcgactactactactactaaattcgcggccgcgtcgactaaagtatcccactaaattcaaaagcgagaaaggaaaagattcattaatttgaatacatacaaaattaaaaatatttttctgtgacatcaaacagtactgtcaaaagaaaaagaacaaataatgaaataattgaaatatatacaataggcaaatataatttcccgaatacgtgaagaactcctataaatccctaagaaaaaa

SEQ ID NO: 304176 - DNA, 552 bp, Homo sapiens
  misc_feature (415)..(415): n is a, c, g, or t
  misc_feature (419)..(419): n is a, c, g, or t
  misc_feature (444)..(444): n is a, c, g, or t
  misc_feature (461)..(461): n is a, c, g, or t
  misc_feature (520)..(520): n is a, c, g, or t
  misc_feature (541)..(541): n is a, c, g, or t
  misc_feature (549)..(549): n is a, c, g, or t
attaatcccatgaaaagcctgtagaaactgctacgacataactaattgattttgcattagggtgatcattcagttgacataaatctttctcacagtaaatttatataatatcgtaatgcccaagccttccattgtgtttgactacctcccctccctaaccttagtctggatgcagggtctttaaggtgtatgataaatgagctgtttactaatttcctgttgaagtgaatacacatttgcaattattggaatttattatttgggggcatctggctcatccttgtttttgtttgttaaacaggaaaaggaccagcgcagcctagacataaacactgccaagtgcatgttgggactgttattaggaaaaatctggcccctttttccagtttttcaccaattcttagaggagcaatcnaaantacaaaggtatttaataaaggaccngttggggcaatgttccnaggagttttggcaggaccatttaattcttggaccccagcaactttggtggaaggatggngcctgggcccttttttttggncgagtttnttg

SEQ ID NO: 304177 - DNA, 4313 bp, Homo sapiens
tgagagacgcagcagggcggcccctgagccgcggtttagccaatggagaaggcgagatgggcgggctgggagtgcccggcggcgggtcctcagcttcgagccgaggtgcagtgagctggtggggggaccgcgaggcgagcgcgggagcctgggcggcgagccgggtgtgagctgcctgaaaatgcactcggatgccgccgctgtcaattttcagctgaactctcatctctcaacactggcaaatattcataagatctaccacacccttaataagctgaacctaacagaagacattggccaagacgatcaccaaacaggaagtctgcggtcttgcagttcttcagactgctttaataaagtgatgccaccaaggaaaaagagaagacctgcctctggagatgatttatctgccaagaaaagtagacatgatagcatgtatagaaaatatgattcgactagaataaagactgaagaagaagccttttcaagtaaaaggtgcttggaatggttctatgaatatgcaggaactgatgatgttgtaggccctgaaggcatggagaaattttgtgaagacattggtgttgaaccagaaaacgtagttatgcttgtcctagcttggaaattggatgcacaaaacatgggttattttactctacaggagtggttaaaaggaatgacttctctccaatgtgatacaacagaaaaactcagaaatactttggattacttaagatcattcttaaatgattctacaaactttaaacttatttacagatatgcgtttgactttgcacgggaaaaggaccagcgcagcctagacataaacactgccaagtgcatgttgggactgttattaggaaaaatctggcccctttttccagtttttcaccaattcttagagcaatcaaaatacaaagttattaataaagaccagtggtgcaatgtcctagagtttagcagaacaattaatcttgacctcagcaactatgatgaagatggagcatggccagttttgttggacgagtttgtggagtggtataaagacaaacagatgtcctaggactttatgcatagcagcgagagagtcactgttaccacagttttgtcacccattagccataaattgctgtttgtatcaaagcgcatgctgcttctcttgcactgtttccctttcgcagggacatgttggtgtttgctattgaattggccagctctgcttgctgtgtggcattgttctcttggaaggctgctttgcagtttgtatttacactacagattggtgaatttgccaacgtcctcactgtgattatgtgtatattgctgtttaaattttgtatatgtgtataaaaggaaaaagcttcacctagagattatttctgaaaaatgtattgtaaaaataattttgtggcatttctagtccctttttttgaatgaaccaattatactttatttggtctcctatgtagcatttcagaaaacaagagaaaactgttaccatgaacaaacattgccagaattaaccttactgtttaagaggccaacttctggaaggaggtaggagtcataactttttagaggcatatgccaaatatcatttggtatacttaacaatattagtgttttaaaatgatgagttataattatttgaacatatagatatgtaacatgccacaaatcatttctaccatgcaaggtgtataagttgtttattttttagtgttaaaactataatagcttgaatataggtaccaatgaacaaattcaaattgcacctcttttcttaaaagaatgggatttaaactcttataaacattctttaacttttttgtttgtttgttctctttttttccttttgcattcttctagccagtgattgatctgctaatgctttctttgccactctaagtaaaatttatttcacctcctcaatgaaaacctcatggttttgctggctgtttataactgcatcgcacttctagttgtggcttgaattttcagttaagctttcatggtatgtaattttccagccttttgagaaaacaagcatactataagtgagagctgttttgttttccttgtttgtttgtttcatgctaggcttttcctggcagcatgtccattgcaggcagtggacaagaaaccaccagcattgagctaacccagtacatgctaggacctgtcctagaggggccacttttcattacctgagttatttgtacagaagggcaatagccattatttttgtggatgaggaaacaagaataaacagaatggtatttttaggtttgtattttatgtcttttttttttttttttttttgccattcttgaggaaatatagagatgacatgttttcaccccaactatctggtgctattgaatgactaattcagtccctaaagttctgtgaaaacacaaaagtctaatgatttgagtgagtaaaaggtaatggtgcatttgaacaagtaaatgctgtcgtggtcagcaagatccgtgatttgaacatgtgatgactggaaaaaggtttgggttatttggaactctggctaaaacttctttcgggtgacatgtgatcgtttaaatggcattaagtgaataaagcacacagacagtgctactcttgaccactattttaccatttctttgcaaacagtgttcacattttcatattttttccctaactaaaccaccaaagaaagaaattttgtatgtatatacagtgtgtgtgtatacaaaatcatgatatagtagaatgcaactactttctttttctaccaaacgaaaggttttatttgctgtgaaataaaccagaagtttaaaaaaccctgtagtgattaagcatacttaaccactccttatttgtagattcactttcaaccttaaaaattaataccagtttgcataaaccaatatctgaaaagaacaggaaatgttaatggcaagcaacagctattaatactgatgtgatggatgcatttgttttgcagtggtgactggcctaggcaggtttggatctgtgaagaattgattcattttcaaaattattccataaagttaaaaagttacactttaaaggcaacaggtcatacagttctttaaatctgatcaactgtagctttatttaaagcaaatataaatcatagatgaagttattttaaacactatgttagaatatagagatttttaaaaaatgctgataagcacagttaattctaaaatgagaggattgttacaggagggagatgttacagttaatccacaatcaacattttgatggtagggaaaaaactgcgtaaaaactattgcattatgtatgataagaaagtaagtattccaaagggataatcttgcatattaagaaaactccaaataatctttaaactgccttgaaaaataaacctctttgactgctgagcggcagagtgcttacccttgattgtcttgattttatatatttatttctaaggggagaaaaaggggtcagacagagtaatatgatacattttcttaaaaacttctctaagttgcacaaaactgaacaatcatcaagcacttatttactggctaatgttgaataaattagggtgccttcatctgggttttctttagtacctaagtctacaaccctttctctttttctattgtgtttcgaactccacattgcaatactctgttgtcatggaatacaacctttagatgtttactgctgaagtaggtcagaaattgtattatttgatttgcctcaaacatccactgtaatgttacatgcaccttttttgaagcatgaactctgaattatgtttttataaatctgactaggcaaacctagattctggtttcacaatggatttattttctctctcagtctccattttaacagtgcttttgaagtttatacagaaagctttaaaagttagtttgtgcccttggtttttattcttaaaactgctaaaatacctctgtaagccttatcctttattctttcatatgttgtataataaatgtatagatttcattgaccaactaaaatgttgggtgtctgtaaatgagaccaaaacgtgggttgcttttttcataaaataatttctattgggggttactgttcaatgacagcaggtaacctataactgtgaatgcttcgtgtcgtcagtatttgcattacattcataaaagtgtgcaagtcctgtgactcccagcttaactgaaatactgttatgccacctaacttgagtacagcaaactggttttaggtttcaatgacattgatgtaaaatgatatcccatgaataaaaagtatttgtgtttggtttcaga

SEQ ID NO: 304178 - DNA, 4244 bp, Homo sapiens
  misc_feature (8)..(8): n is a, c, g, or t
  misc_feature (10)..(10): n is a, c, g, or t
  misc_feature (12)..(12): n is a, c, g, or t
ccaaattngncnttggccggggagcttcgagccgaggtgcagtgagctggtggggggaccgcgaggcgagcgcgggagcctgggcggcgagccgggtgtgagctgcctgaaaatgcactcggatgccgccgctgtcaattttcagctgaactctcatctctcaacactggcaaatattcataagatctaccacacccttaataagctgaacctaacagaagacattggccaagacgatcaccaaacaggaagtctgcggtcttgcagttcttcagactgctttaataaagtgatgccaccaaggaaaaagagaagacctgcctctggagatgatttatctgccaagaaaagtagacatgatagcatgtatagaaaatatgattcgactagaataaagactgaagaagaagccttttcaagtaaaaggtgcttggaatggttctatgaatatgcaggaactgatgatgttgtaggccctgaaggcatggagaaattttgtgaagacattggtgttgaaccagaaaacgtagttatgcttgtcctagcttggaaattggatgcacaaaacatgggttattttactctacaggagtggttaaaaggaatgacttctctccaatgtgatacaacagaaaaactcagaaatactttggattacttaagatcattcttaaatgattctacaaactttaaacttatttacagatatgcgtttgactttgcacgggaaaaggaccagcgcagcctagacataaacactgccaagtgcatgttgggactgttattaggaaaaatctggcccctttttccagtttttcaccaattcttagagcaatcaaaatacaaagttattaataaagaccagtggtgcaatgtcctagagtttagcagaacaattaatcttgacctcagcaactatgatgaagatggagcatggccagttttgttggacgagtttgtggagtggtataaagacaaacagatgtcctaggactttatgcatagcagcgagagagtcactgttaccacagttttgtcacccattagccataaattgctgtttgtatcaaagcgcatgctgcttctcttgcactgtttccctttcgcagggacatgttggtgtttgctattgaattggccagctctgcttgctgtgtggcattgttctcttggaaggctgctttgcagtttgtatttacactacagattggtgaatttgccaacgtcctcactgtgattatgtgtatattgctgtttaaattttgtatatgtgtataaaaggaaaaagcttcacctagagattatttctgaaaaatgtattgtaaaaataattttgtggcatttctagtccctttttttgaatgaaccaattatactttatttggtctcctatgtagcatttcagaaaacaagagaaaactgttaccatgaacaaacattgccagaattaaccttactgtttaagaggccaacttctggaaggaggtaggagtcataactttttagaggcatatgccaaatatcatttggtatacttaacaatattagtgttttaaaatgatgagttataattatttgaacatatagatatgtaacatgccacaaatcatttctaccatgcaaggtgtataagttgtttattttttagtgttaaaactataatagcttgaatataggtaccaatgaacaaattcaaattgcacctcttttcttaaaagaatgggatttaaactcttataaacattctttaacttttttgtttgtttgttctctttttttccttttgcattcttctagccagtgattgatctgctaatgctttctttgccactctaagtaaaatttatttcacctcctcaatgaaaacctcatggttttgctggctgtttataactgcatcgcacttctagttgtggcttgaattttcagttaagctttcatggtatgtaattttccagccttttgagaaaacaagcatactataagtgagagctgttttgttttccttgtttgtttgtttcatgctaggcttttcctggcagcatgtccattgcaggcagtggacaagaaaccaccagcattgagctaacccagtacatgctaggacctgtcctagaggggccacttttcattacctgagttatttgtacagaagggcaatagccattatttttgtggatgaggaaacaagaataaacagaatggtatttttaggtttgtattttatgtcttttttttttttttttttttgccattcttgaggaaatatagagatgacatgttttcaccccaactatctggtgctattgaatgactaattcagtccctaaagttctgtgaaaacacaaaagtctaatgatttgagtgagtaaaaggtaatggtgcatttgaacaagtaaatgctgtcgtggtcagcaagatccgtgatttgaacatgtgatgactggaaaaaggtttgggttatttggaactctggctaaaacttctttcgggtgacatgtgatcgtttaaatggcattaagtgaataaagcacacagacagtgctactcttgaccactattttaccatttctttgcaaacagtgttcacattttcatattttttccctaactaaaccaccaaagaaagaaattttgtatgtatatacagtgtgtgtgtatacaaaatcatgatatagtagaatgcaactactttctttttctaccaaacgaaaggttttatttgctgtgaaataaaccagaagtttaaaaaaccctgtagtgattaagcatacttaaccactccttatttgtagattcactttcaaccttaaaaattaataccagtttgcataaaccaatatctgaaaagaacaggaaatgttaatggcaagcaacagctattaatactgatgtgatggatgcatttgttttgcagtggtgactggcctaggcaggtttggatctgtgaagaattgattcattttcaaaattattccataaagttaaaaagttacactttaaaggcaacaggtcatacagttctttaaatctgatcaactgtagctttatttaaagcaaatataaatcatagatgaagttattttaaacactatgttagaatatagagatttttaaaaaatgctgataagcacagttaattctaaaatgagaggattgttacaggagggagatgttacagttaatccacaatcaacattttgatggtagggaaaaaactgcgtaaaaactattgcattatgtatgataagaaagtaagtattccaaagggataatcttgcatattaagaaaactccaaataatctttaaactgccttgaaaaataaacctctttgactgctgagcggcagagtgcttacccttgattgtcttgattttatatatttatttctaaggggagaaaaaggggtcagacagagtaatatgatacattttcttaaaaacttctctaagttgcacaaaactgaacaatcatcaagcacttatttactggctaatgttgaataaattagggtgccttcatctgggttttctttagtacctaagtctacaaccctttctctttttctattgtgtttcgaactccacattgcaatactctgttgtcatggaatacaacctttagatgtttactgctgaagtaggtcagaaattgtattatttgatttgcctcaaacatccactgtaatgttacatgcaccttttttgaagcatgaactctgaattatgtttttataaatctgactaggcaaacctagattctggtttcacaatggatttattttctctctcagtctccattttaacagtgcttttgaagtttatacagaaagctttaaaagttagtttgtgcccttggtttttattcttaaaactgctaaaatacctctgtaagccttatcctttattctttcatatgttgtataataaatgtatagatttcattgaccaactaaaatgttgggtgtctgtaaatgagaccaaaacgtgggttgcttttttcataaaataatttctattgggggttactgttcaatgacagcaggtaacctataactgtgaatgcttcgtgtcgtcagtatttgcattacattcataaaagtgtgcaagtcctgtgactcccagcttaactgaaatactgttatgccacctaacttgagtacagcaaactggttttaggtttcaatgacattgatgtaaaatgatatcccatgaataaaaagtatttgtgtttggtttcaga

SEQ ID NO: 304179 - DNA, 4032 bp, Homo sapiens
tgagagacgcagcagggcggcccctgagccgcggtttagccaatggagaaggcgagatgggcgggctgggagtgcccggcggcgggtcctcagcttcgagccgaggtgcagtgagctggtggggggaccgcgaggcgagcgcgggagcctgggcggcgagccgggtgtgagctgcctgaaaatgcactcggatgccgccgctgtcaattttcagctgaactctcatctctcaacactggcaaatattcataagatctaccacacccttaataagctgaacctaacagaagacattggccaagacgatcaccaaacaggaagtctgcggtcttgcagttcttcagactgctttaataaagtgatgccaccaaggaaaaagagaagacctgcctctggagatgatttatctgccaagaaaagtagacatgatagcatgtatagaaaatatgattcgactagaataaagactgaagaagaagccttttcaagtaaaaggtgcttggaatggttctatgaatatgcaggaactgatgatgttgtaggccctgaaggcatggagaaattttgtgaagacattggtgttgaaccagaaaacgtagttatgcttgtcctagcttggaaattggatgcacaaaacatgggttattttactctacaggagtggttaaaaggaatgacttctctccaatgtgatacaacagaaaaactcagaaatactttggattacttaagatcattcttaaatgattctacaaactttaaacttatttacagatatgcgtttgactttgcacgggaaaaggaccagcgcagcctagacataaacactgccaagtgcatgttgggactgttattaggaaaaatctggcccctttttccagtttttcaccaattcttagagcaatcaaaatacaaagttattaataaagaccagtggtgcaatgtcctagagtttagcagaacaattaatcttgacctcagcaactatgatgaagatggagcatggccagttttgttggacgagtttgtggagtggtataaagacaaacagatgtcctaggactttatgcatagcagcgagagagtcactgttaccacagttttgtcacccattagccataaattgctgtttgtatcaaagcgcatgctgcttctcttgcactgtttccctttcgcagggacatgttggtgtttgctattgaattggccagctctgcttgctgtgtggcattgttctcttggaaggctgctttgcagtttgtatttacactacagattggtgaatttgccaacgtcctcactgtgattatgtgtatattgctgtttaaattttgtatatgtgtataaaaggaaaaagcttcacctagagattatttctgaaaaatgtattgtaaaaataattttgtggcatttctagtccctttttttgaatgaaccaattatactttatttggtctcctatgtagcatttcagaaaacaagagaaaactgttaccatgaacaaacattgccagaattaaccttactgtttaagaggccaacttctggaaggaggtaggagtcataactttttagaggcatatgccaaatatcatttggtatacttaacaatattagtgttttaaaatgatgagttataattatttgaacatatagatatgtaacatgccacaaatcatttctaccatgcaaggtgtataagttgtttattttttagtgttaaaactataatagcttgaatataggtaccaatgaacaaattcaaattgcacctcttttcttaaaagaatgggatttaaactcttataaacattctttaacttttttgtttgtttgttctctttttttccttttgcattcttctagccagtgattgatctgctaatgctttctttgccactctaagtaaaatttatttcacctcctcaatgaaaacctcatggttttgctggctgtttataactgcatcgcacttctagttgtggcttgaattttcagttaagctttcatggtatgtaattttccagccttttgagaaaacaagcatactataagtgagagctgttttgttttccttgtttgtttgtttcatgctaggcttttcctggcagcatgtccattgcaggcagtggacaagaaaccaccagcattgagctaacccagtacatgctaggacctgtcctagaggggccacttttcattacctgagttatttgtacagaagggcaatagccattatttttgtggatgaggaaacaagaataaacagaatggtatttttaggtttgtattttatgtcttttttttttttttttttttgccattcttgaggaaatatagagatgacatgttttcaccccaactatctggtgctattgaatgactaattcagtccctaaagttctgtgaaaacacaaaagtctaatgatttgagtgagtaaaaggtaatggtgcatttgaacaagtaaatgctgtcgtggtcagcaagatccgtgatttgaacatgtgatgactggaaaaaggtttgggttatttggaactctggctaaaacttctttcgggtgacatgtgatcgtttaaatggcattaagtgaataaagcacacagacagtgctactcttgaccactattttaccatttctttgcaaacagtgttcacattttcatattttttccctaactaaaccaccaaagaaagaaattttgtatgtatatacagtgtgtgtgtatacaaaatcatgatatagtagaatgcaactactttctttttctaccaaacgaaaggttttatttgctgtgaaataaaccagaagtttaaaaaaccctgtagtgattaagcatacttaaccactccttatttgtagattcactttcaaccttaaaaattaataccagtttgcataaaccaatatctgaaaagaacaggaaatgttaatggcaagcaacagctattaatactgatgtgatggatgcatttgttttgcagtggtgactggcctaggcaggtttggatctgtgaagaattgattcattttcaaaattattccataaagttaaaaagttacactttaaaggcaacaggtcatacagttctttaaatctgatcaactgtagctttatttaaagcaaatataaatcatagatgaagttattttaaacactatgttagaatatagagatttttaaaaaatgctgataagcacagttaattctaaaatgagaggattgttacaggagggagatgttacagttaatccacaatcaacattttgatggtagggaaaaaactgcgtaaaaactattgcattatgtatgataagaaagtaagtattccaaagggataatcttgcatattaagaaaactccaaataatctttaaactgccttgaaaaataaacctctttgactgctgagcggcagagtgcttacccttgattgtcttgattttatatatttatttctaaggggagaaaaaggggtcagacagagtaatatgatacattttcttaaaaacttctctaagttgcacaaaactgaacaatcatcaagcacttatttactggctaatgttgaataaattagggtgccttcatctgggttttctttagtacctaagtctacaaccctttctctttttctattgtgtttcgaactccacattgcaatactctgttgtcatggaatacaacctttagatgtttactgctgaagtaggtcagaaattgtattatttgatttgcctcaaacatccactgtaatgttacatgcaccttttttgaagcatgaactctgaattatgtttttataaatctgactaggcaaacctagattctggtttcacaatggatttattttctctctcagtctccattttaacagtgcttttgaagtttatacagaaagctttaaaagttagtttgtgcccttggtttttattcttaaaactgctaaaatacctctgtaagccttatcctttattctttcatatgttgtataataaatgtatagatttcattgaccaactaaaatgtt

SEQ ID NO: 304180 - DNA, 4400 bp, Homo sapiens
tgagagacgcagcagggcggcccctgagccgcggtttagccaatggagaaggcgagatgggcgggctgggagtgcccggcggcgggtcctcagcttcgagccgaggtgcagtgagctggtggggggaccgcgaggcgagcgcgggagcctgggcggcgagccgggtgtgagctgcctgaaaatgcactcggatgccgccgctgtcaattttcagctgaactctcatctctcaacactggcaaatattcataagatctaccacacccttaataagctgaacctaacagaagacattggccaagacgatcaccaaacaggaagtctgcggtcttgcagttcttcagactgctttaataaagtgatgccaccaaggaaaaagagaagacctgcctctggagatgatttatctgccaagaaaagtagacatgatagcatgtatagaaaatatgattcgactagaataaagactgaagaagaagccttttcaagtaaaaggtgcttggaatggttctatgaatatgcaggaactgatgatgttgtaggccctgaaggcatggagaaattttgtgaagacattggtgttgaaccagaaaacgtagttatgcttgtcctagcttggaaattggatgcacaaaacatgggttattttactctacaggagtggttaaaaggaatgacttctctccaatgtgatacaacagaaaaactcagaaatactttggattacttaagatcattcttaaatgattctacaaactttaaacttatttacagatatgcgtttgactttgcacgggccgaagatggtgttagtgattgcgagctgctggctggcacccttgcagagcaggagtaagtgagtgctgttcagctttccagtcctgaaaaggaccagcgcagcctagacataaacactgccaagtgcatgttgggactgttattaggaaaaatctggcccctttttccagtttttcaccaattcttagagcaatcaaaatacaaagttattaataaagaccagtggtgcaatgtcctagagtttagcagaacaattaatcttgacctcagcaactatgatgaagatggagcatggccagttttgttggacgagtttgtggagtggtataaagacaaacagatgtcctaggactttatgcatagcagcgagagagtcactgttaccacagttttgtcacccattagccataaattgctgtttgtatcaaagcgcatgctgcttctcttgcactgtttccctttcgcagggacatgttggtgtttgctattgaattggccagctctgcttgctgtgtggcattgttctcttggaaggctgctttgcagtttgtatttacactacagattggtgaatttgccaacgtcctcactgtgattatgtgtatattgctgtttaaattttgtatatgtgtataaaaggaaaaagcttcacctagagattatttctgaaaaatgtattgtaaaaataattttgtggcatttctagtccctttttttgaatgaaccaattatactttatttggtctcctatgtagcatttcagaaaacaagagaaaactgttaccatgaacaaacattgccagaattaaccttactgtttaagaggccaacttctggaaggaggtaggagtcataactttttagaggcatatgccaaatatcatttggtatacttaacaatattagtgttttaaaatgatgagttataattatttgaacatatagatatgtaacatgccacaaatcatttctaccatgcaaggtgtataagttgtttattttttagtgttaaaactataatagcttgaatataggtaccaatgaacaaattcaaattgcacctcttttcttaaaagaatgggatttaaactcttataaacattctttaacttttttgtttgtttgttctctttttttccttttgcattcttctagccagtgattgatctgctaatgctttctttgccactctaagtaaaatttatttcacctcctcaatgaaaacctcatggttttgctggctgtttataactgcatcgcacttctagttgtggcttgaattttcagttaagctttcatggtatgtaattttccagccttttgagaaaacaagcatactataagtgagagctgttttgttttccttgtttgtttgtttcatgctaggcttttcctggcagcatgtccattgcaggcagtggacaagaaaccaccagcattgagctaacccagtacatgctaggacctgtcctagaggggccacttttcattacctgagttatttgtacagaagggcaatagccattatttttgtggatgaggaaacaagaataaacagaatggtatttttaggtttgtattttatgtcttttttttttttttttttttgccattcttgaggaaatatagagatgacatgttttcaccccaactatctggtgctattgaatgactaattcagtccctaaagttctgtgaaaacacaaaagtctaatgatttgagtgagtaaaaggtaatggtgcatttgaacaagtaaatgctgtcgtggtcagcaagatccgtgatttgaacatgtgatgactggaaaaaggtttgggttatttggaactctggctaaaacttctttcgggtgacatgtgatcgtttaaatggcattaagtgaataaagcacacagacagtgctactcttgaccactattttaccatttctttgcaaacagtgttcacattttcatattttttccctaactaaaccaccaaagaaagaaattttgtatgtatatacagtgtgtgtgtatacaaaatcatgatatagtagaatgcaactactttctttttctaccaaacgaaaggttttatttgctgtgaaataaaccagaagtttaaaaaaccctgtagtgattaagcatacttaaccactccttatttgtagattcactttcaaccttaaaaattaataccagtttgcataaaccaatatctgaaaagaacaggaaatgttaatggcaagcaacagctattaatactgatgtgatggatgcatttgttttgcagtggtgactggcctaggcaggtttggatctgtgaagaattgattcattttcaaaattattccataaagttaaaaagttacactttaaaggcaacaggtcatacagttctttaaatctgatcaactgtagctttatttaaagcaaatataaatcatagatgaagttattttaaacactatgttagaatatagagatttttaaaaaatgctgataagcacagttaattctaaaatgagaggattgttacaggagggagatgttacagttaatccacaatcaacattttgatggtagggaaaaaactgcgtaaaaactattgcattatgtatgataagaaagtaagtattccaaagggataatcttgcatattaagaaaactccaaataatctttaaactgccttgaaaaataaacctctttgactgctgagcggcagagtgcttacccttgattgtcttgattttatatatttatttctaaggggagaaaaaggggtcagacagagtaatatgatacattttcttaaaaacttctctaagttgcacaaaactgaacaatcatcaagcacttatttactggctaatgttgaataaattagggtgccttcatctgggttttctttagtacctaagtctacaaccctttctctttttctattgtgtttcgaactccacattgcaatactctgttgtcatggaatacaacctttagatgtttactgctgaagtaggtcagaaattgtattatttgatttgcctcaaacatccactgtaatgttacatgcaccttttttgaagcatgaactctgaattatgtttttataaatctgactaggcaaacctagattctggtttcacaatggatttattttctctctcagtctccattttaacagtgcttttgaagtttatacagaaagctttaaaagttagtttgtgcccttggtttttattcttaaaactgctaaaatacctctgtaagccttatcctttattctttcatatgttgtataataaatgtatagatttcattgaccaactaaaatgttgggtgtctgtaaatgagaccaaaacgtgggttgcttttttcataaaataatttctattgggggttactgttcaatgacagcaggtaacctataactgtgaatgcttcgtgtcgtcagtatttgcattacattcataaaagtgtgcaagtcctgtgactcccagcttaactgaaatactgttatgccacctaacttgagtacagcaaactggttttaggtttcaatgacattgatgtaaaatgatatcccatgaataaaaagtatttgtgtttggtttcaga

SEQ ID NO: 304181 - DNA, 4369 bp, Homo sapiens
tgagagacgcagcagggcggcccctgagccgcggtttagccaatggagaaggcgagatgggcgggctgggagtgcccggcggcgggtcctcagcttcgagccgaggtgcagtgagctggtggggggaccgcgaggcgagcgcgggagcctgggcggcgagccgggtgtgagctgcctgaaaatgcactcggatgccgccgctgtcaattttcagctgaactctcatctctcaacactggcaaatattcataagatctaccacacccttaataagctgaacctaacagaagacattggccaagacgatcaccaaacaggaagtctgcggtcttgcagttcttcagactgctttaataaagtgatgccaccaaggaaaaagagaagacctgcctctggagatgatttatctgccaagaaaagtagacatgatagcatgtatagaaaatatgattcgactagaataaagactgaagaagaagccttttcaagtaaaaggtgcttggaatggttctatgaatatgcaggaactgatgatgttgtaggccctgaaggcatggagaaattttgtgaagacattggtgttgaaccagaaaacgtagttatgcttgtcctagcttggaaattggatgcacaaaacatgggttattttactctacaggagtggttaaaaggaatgacttctctccaatgtgatacaacagaaaaactcagaaatactttggattacttaagatcattcttaaatgattctacaaactttaaacttatttacagatatgcgtttgactttgcacgggccgaagatggtgttagtgattgcgagctgctggctggcacccttgcagagcaggagaaaaggaccagcgcagcctagacataaacactgccaagtgcatgttgggactgttattaggaaaaatctggcccctttttccagtttttcaccaattcttagagcaatcaaaatacaaagttattaataaagaccagtggtgcaatgtcctagagtttagcagaacaattaatcttgacctcagcaactatgatgaagatggagcatggccagttttgttggacgagtttgtggagtggtataaagacaaacagatgtcctaggactttatgcatagcagcgagagagtcactgttaccacagttttgtcacccattagccataaattgctgtttgtatcaaagcgcatgctgcttctcttgcactgtttccctttcgcagggacatgttggtgtttgctattgaattggccagctctgcttgctgtgtggcattgttctcttggaaggctgctttgcagtttgtatttacactacagattggtgaatttgccaacgtcctcactgtgattatgtgtatattgctgtttaaattttgtatatgtgtataaaaggaaaaagcttcacctagagattatttctgaaaaatgtattgtaaaaataattttgtggcatttctagtccctttttttgaatgaaccaattatactttatttggtctcctatgtagcatttcagaaaacaagagaaaactgttaccatgaacaaacattgccagaattaaccttactgtttaagaggccaacttctggaaggaggtaggagtcataactttttagaggcatatgccaaatatcatttggtatacttaacaatattagtgttttaaaatgatgagttataattatttgaacatatagatatgtaacatgccacaaatcatttctaccatgcaaggtgtataagttgtttattttttagtgttaaaactataatagcttgaatataggtaccaatgaacaaattcaaattgcacctcttttcttaaaagaatgggatttaaactcttataaacattctttaacttttttgtttgtttgttctctttttttccttttgcattcttctagccagtgattgatctgctaatgctttctttgccactctaagtaaaatttatttcacctcctcaatgaaaacctcatggttttgctggctgtttataactgcatcgcacttctagttgtggcttgaattttcagttaagctttcatggtatgtaattttccagccttttgagaaaacaagcatactataagtgagagctgttttgttttccttgtttgtttgtttcatgctaggcttttcctggcagcatgtccattgcaggcagtggacaagaaaccaccagcattgagctaacccagtacatgctaggacctgtcctagaggggccacttttcattacctgagttatttgtacagaagggcaatagccattatttttgtggatgaggaaacaagaataaacagaatggtatttttaggtttgtattttatgtcttttttttttttttttttttgccattcttgaggaaatatagagatgacatgttttcaccccaactatctggtgctattgaatgactaattcagtccctaaagttctgtgaaaacacaaaagtctaatgatttgagtgagtaaaaggtaatggtgcatttgaacaagtaaatgctgtcgtggtcagcaagatccgtgatttgaacatgtgatgactggaaaaaggtttgggttatttggaactctggctaaaacttctttcgggtgacatgtgatcgtttaaatggcattaagtgaataaagcacacagacagtgctactcttgaccactattttaccatttctttgcaaacagtgttcacattttcatattttttccctaactaaaccaccaaagaaagaaattttgtatgtatatacagtgtgtgtgtatacaaaatcatgatatagtagaatgcaactactttctttttctaccaaacgaaaggttttatttgctgtgaaataaaccagaagtttaaaaaaccctgtagtgattaagcatacttaaccactccttatttgtagattcactttcaaccttaaaaattaataccagtttgcataaaccaatatctgaaaagaacaggaaatgttaatggcaagcaacagctattaatactgatgtgatggatgcatttgttttgcagtggtgactggcctaggcaggtttggatctgtgaagaattgattcattttcaaaattattccataaagttaaaaagttacactttaaaggcaacaggtcatacagttctttaaatctgatcaactgtagctttatttaaagcaaatataaatcatagatgaagttattttaaacactatgttagaatatagagatttttaaaaaatgctgataagcacagttaattctaaaatgagaggattgttacaggagggagatgttacagttaatccacaatcaacattttgatggtagggaaaaaactgcgtaaaaactattgcattatgtatgataagaaagtaagtattccaaagggataatcttgcatattaagaaaactccaaataatctttaaactgccttgaaaaataaacctctttgactgctgagcggcagagtgcttacccttgattgtcttgattttatatatttatttctaaggggagaaaaaggggtcagacagagtaatatgatacattttcttaaaaacttctctaagttgcacaaaactgaacaatcatcaagcacttatttactggctaatgttgaataaattagggtgccttcatctgggttttctttagtacctaagtctacaaccctttctctttttctattgtgtttcgaactccacattgcaatactctgttgtcatggaatacaacctttagatgtttactgctgaagtaggtcagaaattgtattatttgatttgcctcaaacatccactgtaatgttacatgcaccttttttgaagcatgaactctgaattatgtttttataaatctgactaggcaaacctagattctggtttcacaatggatttattttctctctcagtctccattttaacagtgcttttgaagtttatacagaaagctttaaaagttagtttgtgcccttggtttttattcttaaaactgctaaaatacctctgtaagccttatcctttattctttcatatgttgtataataaatgtatagatttcattgaccaactaaaatgttgggtgtctgtaaatgagaccaaaacgtgggttgcttttttcataaaataatttctattgggggttactgttcaatgacagcaggtaacctataactgtgaatgcttcgtgtcgtcagtatttgcattacattcataaaagtgtgcaagtcctgtgactcccagcttaactgaaatactgttatgccacctaacttgagtacagcaaactggttttaggtttcaatgacattgatgtaaaatgatatcccatgaataaaaagtatttgtgtttggtttcaga

SEQ ID NO: 304182 - DNA, 4937 bp, Homo sapiens
  misc_feature (8)..(8): n is a, c, g, or t
  misc_feature (10)..(10): n is a, c, g, or t
  misc_feature (12)..(12): n is a, c, g, or t
ccaaattngncnttggccggggagcttcgagccgaggtgcagtgagctggtggggggaccgcgaggcgagcgcgggagcctgggcggcgagccgggtgtgagctgcctgaaaatgcactcggatgccgccgctgtcaattttcagctgaactctcatctctcaacactggcaaatattcataagatctaccacacccttaataagctgaacctaacagaagacattggccaagacgatcaccaaacaggaagtctgcggtcttgcagttcttcagactgctttaataaagtgatgccaccaaggaaaaagagaagacctgcctctggagatgatttatctgccaagaaaagtagacatgatagcatgtatagaaaatatgattcgactagaataaagactgaagaagaagccttttcaagtaaaaggtgcttggaatggttctatgaatatgcaggaactgatgatgttgtaggccctgaaggcatggagaaattttgtgaagacattggtgttgaaccagaaaacgtgagtcaaacttactgagttgggtgaatcagttggttgtttttcatacttaaatctttgttctttagcaaataaataaataattaaaaagtagtggtatgttagtttttatgaagcagtctaagaaataagttctaattctagtttgacttataagcagattctccattcttgtaagtgatatggtgtaactacagttattttttctctcatttaatttcttgtatgtaaaaggtacagtaagccagatgcttacaaaatggtgtggccacatgtgcctacaatgacggatcaactggaggccacattgtacgctgtgtaccttcgtgcccctcagtagttgttttagcctaatgtagagtcaatctaggacttataattattcatcatgattttgagtagattgtaatcatcaagaatttttcatagatcgtttacttccaattgaatttagctcagaagtgattgcttttttttttttgagatggagtctcgcactgtcgccaggctggagtgcaatggtatgatgtcggctcactgcaacctctgcctcccgggttgaagcgatttcccctgcctcagcctcctgagtagctgggactacaggtagttatgcttgtcctagcttggaaattggatgcacaaaacatgggttattttactctacaggagtggttaaaaggaatgacttctctccaatgtgatacaacagaaaaactcagaaatactttggattacttaagatcattcttaaatgattctacaaactttaaacttatttacagatatgcgtttgactttgcacgggccgaagatggtgttagtgattgcgagctgctggctggcacccttgcagagcaggagtaagtgagtgctgttcagctttccagtcctgaaaaggaccagcgcagcctagacataaacactgccaagtgcatgttgggactgttattaggaaaaatctggcccctttttccagtttttcaccaattcttagagcaatcaaaatacaaagttattaataaagaccagtggtgcaatgtcctagagtttagcagaacaattaatcttgacctcagcaactatgatgaagatggagcatggccagttttgttggacgagtttgtggagtggtataaagacaaacagatgtcctaggactttatgcatagcagcgagagagtcactgttaccacagttttgtcacccattagccataaattgctgtttgtatcaaagcgcatgctgcttctcttgcactgtttccctttcgcagggacatgttggtgtttgctattgaattggccagctctgcttgctgtgtggcattgttctcttggaaggctgctttgcagtttgtatttacactacagattggtgaatttgccaacgtcctcactgtgattatgtgtatattgctgtttaaattttgtatatgtgtataaaaggaaaaagcttcacctagagattatttctgaaaaatgtattgtaaaaataattttgtggcatttctagtccctttttttgaatgaaccaattatactttatttggtctcctatgtagcatttcagaaaacaagagaaaactgttaccatgaacaaacattgccagaattaaccttactgtttaagaggccaacttctggaaggaggtaggagtcataactttttagaggcatatgccaaatatcatttggtatacttaacaatattagtgttttaaaatgatgagttataattatttgaacatatagatatgtaacatgccacaaatcatttctaccatgcaaggtgtataagttgtttattttttagtgttaaaactataatagcttgaatataggtaccaatgaacaaattcaaattgcacctcttttcttaaaagaatgggatttaaactcttataaacattctttaacttttttgtttgtttgttctctttttttccttttgcattcttctagccagtgattgatctgctaatgctttctttgccactctaagtaaaatttatttcacctcctcaatgaaaacctcatggttttgctggctgtttataactgcatcgcacttctagttgtggcttgaattttcagttaagctttcatggtatgtaattttccagccttttgagaaaacaagcatactataagtgagagctgttttgttttccttgtttgtttgtttcatgctaggcttttcctggcagcatgtccattgcaggcagtggacaagaaaccaccagcattgagctaacccagtacatgctaggacctgtcctagaggggccacttttcattacctgagttatttgtacagaagggcaatagccattatttttgtggatgaggaaacaagaataaacagaatggtatttttaggtttgtattttatgtcttttttttttttttttttttgccattcttgaggaaatatagagatgacatgttttcaccccaactatctggtgctattgaatgactaattcagtccctaaagttctgtgaaaacacaaaagtctaatgatttgagtgagtaaaaggtaatggtgcatttgaacaagtaaatgctgtcgtggtcagcaagatccgtgatttgaacatgtgatgactggaaaaaggtttgggttatttggaactctggctaaaacttctttcgggtgacatgtgatcgtttaaatggcattaagtgaataaagcacacagacagtgctactcttgaccactattttaccatttctttgcaaacagtgttcacattttcatattttttccctaactaaaccaccaaagaaagaaattttgtatgtatatacagtgtgtgtgtatacaaaatcatgatatagtagaatgcaactactttctttttctaccaaacgaaaggttttatttgctgtgaaataaaccagaagtttaaaaaaccctgtagtgattaagcatacttaaccactccttatttgtagattcactttcaaccttaaaaattaataccagtttgcataaaccaatatctgaaaagaacaggaaatgttaatggcaagcaacagctattaatactgatgtgatggatgcatttgttttgcagtggtgactggcctaggcaggtttggatctgtgaagaattgattcattttcaaaattattccataaagttaaaaagttacactttaaaggcaacaggtcatacagttctttaaatctgatcaactgtagctttatttaaagcaaatataaatcatagatgaagttattttaaacactatgttagaatatagagatttttaaaaaatgctgataagcacagttaattctaaaatgagaggattgttacaggagggagatgttacagttaatccacaatcaacattttgatggtagggaaaaaactgcgtaaaaactattgcattatgtatgataagaaagtaagtattccaaagggataatcttgcatattaagaaaactccaaataatctttaaactgccttgaaaaataaacctctttgactgctgagcggcagagtgcttacccttgattgtcttgattttatatatttatttctaaggggagaaaaaggggtcagacagagtaatatgatacattttcttaaaaacttctctaagttgcacaaaactgaacaatcatcaagcacttatttactggctaatgttgaataaattagggtgccttcatctgggttttctttagtacctaagtctacaaccctttctctttttctattgtgtttcgaactccacattgcaatactctgttgtcatggaatacaacctttagatgtttactgctgaagtaggtcagaaattgtattatttgatttgcctcaaacatccactgtaatgttacatgcaccttttttgaagcatgaactctgaattatgtttttataaatctgactaggcaaacctagattctggtttcacaatggatttattttctctctcagtctccattttaacagtgcttttgaagtttatacagaaagctttaaaagttagtttgtgcccttggtttttattcttaaaactgctaaaatacctctgtaagccttatcctttattctttcatatgttgtataataaatgtatagatttcattgaccaactaaaatgttgggtgtctgtaaatgagaccaaaacgtgggttgcttttttcataaaataatttctattgggggttactgttcaatgacagcaggtaacctataactgtgaatgcttcgtgtcgtcagtatttgcattacattcataaaagtgtgcaagtcctgtgactcccagcttaactgaaatactgttatgccacctaacttgagtacagcaaactggttttaggtttcaatgacattgatgtaaaatgatatcccatgaataaaaagtatttgtgtttggtttcaga

SEQ ID NO: 304183 - DNA, 4525 bp, Homo sapiens
ggctggacgtgcgatgaagggccgagatcggagtgtccggggtgcatggaggtggaggcagcgttgggctgtagcgggcagggccggggatgtgggggggtggcaccggcggggagagggagggagcgagcgagcgagcggggcacaagggtgaggatttccaaagggctgagtggtgcgggcggctccgtgagaaaggcggattttcagctgaactctcatctctcaacactggcaaatattcataagatctaccacacccttaataagctgaacctaacagaagacattggccaagacgatcaccaaacaggaagtctgcggtcttgcagttcttcagactgctttaataaagtgatgccaccaaggaaaaagagaagacctgcctctggagatgatttatctgccaagaaaagtagacatgatagcatgtatagaaaatatgattcgactagaataaagactgaagaagaagccttttcaagtaaaaggtgcttggaatggttctatgaatatgcaggaactgatgatgttgtaggccctgaaggcatggagaaattttgtgaagacattggtgttgaaccagaaaacttttgagatggagtctcgcactgtcgccaggctggagtgcaatggtatgatgtcggctcactgcaacctctgcctcccgggttgaagcgatttcccctgcctcagcctcctgagtagctgggactacaggtagttatgcttgtcctagcttggaaattggatgcacaaaacatgggttattttactctacaggagtggttaaaaggaatgacttctctccaatgtgatacaacagaaaaactcagaaatactttggattacttaagatcattcttaaatgattctacaaactttaaacttatttacagatatgcgtttgactttgcacgggccgaagatggtgttagtgattgcgagctgctggctggcacccttgcagagcaggagtaagtgagtgctgttcagctttccagtcctgaaaaggaccagcgcagcctagacataaacactgccaagtgcatgttgggactgttattaggaaaaatctggcccctttttccagtttttcaccaattcttagagcaatcaaaatacaaagttattaataaagaccagtggtgcaatgtcctagagtttagcagaacaattaatcttgacctcagcaactatgatgaagatggagcatggccagttttgttggacgagtttgtggagtggtataaagacaaacagatgtcctaggactttatgcatagcagcgagagagtcactgttaccacagttttgtcacccattagccataaattgctgtttgtatcaaagcgcatgctgcttctcttgcactgtttccctttcgcagggacatgttggtgtttgctattgaattggccagctctgcttgctgtgtggcattgttctcttggaaggctgctttgcagtttgtatttacactacagattggtgaatttgccaacgtcctcactgtgattatgtgtatattgctgtttaaattttgtatatgtgtataaaaggaaaaagcttcacctagagattatttctgaaaaatgtattgtaaaaataattttgtggcatttctagtccctttttttgaatgaaccaattatactttatttggtctcctatgtagcatttcagaaaacaagagaaaactgttaccatgaacaaacattgccagaattaaccttactgtttaagaggccaacttctggaaggaggtaggagtcataactttttagaggcatatgccaaatatcatttggtatacttaacaatattagtgttttaaaatgatgagttataattatttgaacatatagatatgtaacatgccacaaatcatttctaccatgcaaggtgtataagttgtttattttttagtgttaaaactataatagcttgaatataggtaccaatgaacaaattcaaattgcacctcttttcttaaaagaatgggatttaaactcttataaacattctttaacttttttgtttgtttgttctctttttttccttttgcattcttctagccagtgattgatctgctaatgctttctttgccactctaagtaaaatttatttcacctcctcaatgaaaacctcatggttttgctggctgtttataactgcatcgcacttctagttgtggcttgaattttcagttaagctttcatggtatgtaattttccagccttttgagaaaacaagcatactataagtgagagctgttttgttttccttgtttgtttgtttcatgctaggcttttcctggcagcatgtccattgcaggcagtggacaagaaaccaccagcattgagctaacccagtacatgctaggacctgtcctagaggggccacttttcattacctgagttatttgtacagaagggcaatagccattatttttgtggatgaggaaacaagaataaacagaatggtatttttaggtttgtattttatgtcttttttttttttttttttttgccattcttgaggaaatatagagatgacatgttttcaccccaactatctggtgctattgaatgactaattcagtccctaaagttctgtgaaaacacaaaagtctaatgatttgagtgagtaaaaggtaatggtgcatttgaacaagtaaatgctgtcgtggtcagcaagatccgtgatttgaacatgtgatgactggaaaaaggtttgggttatttggaactctggctaaaacttctttcgggtgacatgtgatcgtttaaatggcattaagtgaataaagcacacagacagtgctactcttgaccactattttaccatttctttgcaaacagtgttcacattttcatattttttccctaactaaaccaccaaagaaagaaattttgtatgtatatacagtgtgtgtgtatacaaaatcatgatatagtagaatgcaactactttctttttctaccaaacgaaaggttttatttgctgtgaaataaaccagaagtttaaaaaaccctgtagtgattaagcatacttaaccactccttatttgtagattcactttcaaccttaaaaattaataccagtttgcataaaccaatatctgaaaagaacaggaaatgttaatggcaagcaacagctattaatactgatgtgatggatgcatttgttttgcagtggtgactggcctaggcaggtttggatctgtgaagaattgattcattttcaaaattattccataaagttaaaaagttacactttaaaggcaacaggtcatacagttctttaaatctgatcaactgtagctttatttaaagcaaatataaatcatagatgaagttattttaaacactatgttagaatatagagatttttaaaaaatgctgataagcacagttaattctaaaatgagaggattgttacaggagggagatgttacagttaatccacaatcaacattttgatggtagggaaaaaactgcgtaaaaactattgcattatgtatgataagaaagtaagtattccaaagggataatcttgcatattaagaaaactccaaataatctttaaactgccttgaaaaataaacctctttgactgctgagcggcagagtgcttacccttgattgtcttgattttatatatttatttctaaggggagaaaaaggggtcagacagagtaatatgatacattttcttaaaaacttctctaagttgcacaaaactgaacaatcatcaagcacttatttactggctaatgttgaataaattagggtgccttcatctgggttttctttagtacctaagtctacaaccctttctctttttctattgtgtttcgaactccacattgcaatactctgttgtcatggaatacaacctttagatgtttactgctgaagtaggtcagaaattgtattatttgatttgcctcaaacatccactgtaatgttacatgcaccttttttgaagcatgaactctgaattatgtttttataaatctgactaggcaaacctagattctggtttcacaatggatttattttctctctcagtctccattttaacagtgcttttgaagtttatacagaaagctttaaaagttagtttgtgcccttggtttttattcttaaaactgctaaaatacctctgtaagccttatcctttattctttcatatgttgtataataaatgtatagatttcattgaccaactaaaatgttgggtgtctgtaaatgagaccaaaacgtgggttgcttttttcataaaataatttctattgggggttactgttcaatgacagcaggtaacctataactgtgaatgcttcgtgtcgtcagtatttgcattacattcataaaagtgtgcaagtcctgtgactcccagcttaactgaaatactgttatgccacctaacttgagtacagcaaactggttttaggtttcaatgacattgatgtaaaatgatatcccatgaataaaaagtatttgtgtttggtttcaga

SEQ ID NO: 304184 - DNA, 4897 bp, Homo sapiens
  misc_feature (8)..(8): n is a, c, g, or t
  misc_feature (10)..(10): n is a, c, g, or t
  misc_feature (12)..(12): n is a, c, g, or t
ccaaattngncnttggccggggagcttcgagccgaggtgcagtgagctggtggggggaccgcgaggcgagcgcgggagcctgggcggcgagccgggtgtgagctgcctgaaaatgcactcggatgccgccgctgtcaattttcagctgaactctcatctctcaacactggcaaatattcataagatctaccacacccttaataagctggaagtctgcggtcttgcagttcttcagactgctttaataaagtgatgccaccaaggaaaaagagaagacctgcctctggagatgatttatctgccaagaaaagtagacatgatagcatgtatagaaaatatgattcgactagaataaagactgaagaagaagccttttcaagtaaaaggtgcttggaatggttctatgaatatgcaggaactgatgatgttgtaggccctgaaggcatggagaaattttgtgaagacattggtgttgaaccagaaaacgtgagtcaaacttactgagttgggtgaatcagttggttgtttttcatacttaaatctttgttctttagcaaataaataaataattaaaaagtagtggtatgttagtttttatgaagcagtctaagaaataagttctaattctagtttgacttataagcagattctccattcttgtaagtgatatggtgtaactacagttattttttctctcatttaatttcttgtatgtaaaaggtacagtaagccagatgcttacaaaatggtgtggccacatgtgcctacaatgacggatcaactggaggccacattgtacgctgtgtaccttcgtgcccctcagtagttgttttagcctaatgtagagtcaatctaggacttataattattcatcatgattttgagtagattgtaatcatcaagaatttttcatagatcgtttacttccaattgaatttagctcagaagtgattgcttttttttttttgagatggagtctcgcactgtcgccaggctggagtgcaatggtatgatgtcggctcactgcaacctctgcctcccgggttgaagcgatttcccctgcctcagcctcctgagtagctgggactacaggtagttatgcttgtcctagcttggaaattggatgcacaaaacatgggttattttactctacaggagtggttaaaaggaatgacttctctccaatgtgatacaacagaaaaactcagaaatactttggattacttaagatcattcttaaatgattctacaaactttaaacttatttacagatatgcgtttgactttgcacgggccgaagatggtgttagtgattgcgagctgctggctggcacccttgcagagcaggagtaagtgagtgctgttcagctttccagtcctgaaaaggaccagcgcagcctagacataaacactgccaagtgcatgttgggactgttattaggaaaaatctggcccctttttccagtttttcaccaattcttagagcaatcaaaatacaaagttattaataaagaccagtggtgcaatgtcctagagtttagcagaacaattaatcttgacctcagcaactatgatgaagatggagcatggccagttttgttggacgagtttgtggagtggtataaagacaaacagatgtcctaggactttatgcatagcagcgagagagtcactgttaccacagttttgtcacccattagccataaattgctgtttgtatcaaagcgcatgctgcttctcttgcactgtttccctttcgcagggacatgttggtgtttgctattgaattggccagctctgcttgctgtgtggcattgttctcttggaaggctgctttgcagtttgtatttacactacagattggtgaatttgccaacgtcctcactgtgattatgtgtatattgctgtttaaattttgtatatgtgtataaaaggaaaaagcttcacctagagattatttctgaaaaatgtattgtaaaaataattttgtggcatttctagtccctttttttgaatgaaccaattatactttatttggtctcctatgtagcatttcagaaaacaagagaaaactgttaccatgaacaaacattgccagaattaaccttactgtttaagaggccaacttctggaaggaggtaggagtcataactttttagaggcatatgccaaatatcatttggtatacttaacaatattagtgttttaaaatgatgagttataattatttgaacatatagatatgtaacatgccacaaatcatttctaccatgcaaggtgtataagttgtttattttttagtgttaaaactataatagcttgaatataggtaccaatgaacaaattcaaattgcacctcttttcttaaaagaatgggatttaaactcttataaacattctttaacttttttgtttgtttgttctctttttttccttttgcattcttctagccagtgattgatctgctaatgctttctttgccactctaagtaaaatttatttcacctcctcaatgaaaacctcatggttttgctggctgtttataactgcatcgcacttctagttgtggcttgaattttcagttaagctttcatggtatgtaattttccagccttttgagaaaacaagcatactataagtgagagctgttttgttttccttgtttgtttgtttcatgctaggcttttcctggcagcatgtccattgcaggcagtggacaagaaaccaccagcattgagctaacccagtacatgctaggacctgtcctagaggggccacttttcattacctgagttatttgtacagaagggcaatagccattatttttgtggatgaggaaacaagaataaacagaatggtatttttaggtttgtattttatgtcttttttttttttttttttttgccattcttgaggaaatatagagatgacatgttttcaccccaactatctggtgctattgaatgactaattcagtccctaaagttctgtgaaaacacaaaagtctaatgatttgagtgagtaaaaggtaatggtgcatttgaacaagtaaatgctgtcgtggtcagcaagatccgtgatttgaacatgtgatgactggaaaaaggtttgggttatttggaactctggctaaaacttctttcgggtgacatgtgatcgtttaaatggcattaagtgaataaagcacacagacagtgctactcttgaccactattttaccatttctttgcaaacagtgttcacattttcatattttttccctaactaaaccaccaaagaaagaaattttgtatgtatatacagtgtgtgtgtatacaaaatcatgatatagtagaatgcaactactttctttttctaccaaacgaaaggttttatttgctgtgaaataaaccagaagtttaaaaaaccctgtagtgattaagcatacttaaccactccttatttgtagattcactttcaaccttaaaaattaataccagtttgcataaaccaatatctgaaaagaacaggaaatgttaatggcaagcaacagctattaatactgatgtgatggatgcatttgttttgcagtggtgactggcctaggcaggtttggatctgtgaagaattgattcattttcaaaattattccataaagttaaaaagttacactttaaaggcaacaggtcatacagttctttaaatctgatcaactgtagctttatttaaagcaaatataaatcatagatgaagttattttaaacactatgttagaatatagagatttttaaaaaatgctgataagcacagttaattctaaaatgagaggattgttacaggagggagatgttacagttaatccacaatcaacattttgatggtagggaaaaaactgcgtaaaaactattgcattatgtatgataagaaagtaagtattccaaagggataatcttgcatattaagaaaactccaaataatctttaaactgccttgaaaaataaacctctttgactgctgagcggcagagtgcttacccttgattgtcttgattttatatatttatttctaaggggagaaaaaggggtcagacagagtaatatgatacattttcttaaaaacttctctaagttgcacaaaactgaacaatcatcaagcacttatttactggctaatgttgaataaattagggtgccttcatctgggttttctttagtacctaagtctacaaccctttctctttttctattgtgtttcgaactccacattgcaatactctgttgtcatggaatacaacctttagatgtttactgctgaagtaggtcagaaattgtattatttgatttgcctcaaacatccactgtaatgttacatgcaccttttttgaagcatgaactctgaattatgtttttataaatctgactaggcaaacctagattctggtttcacaatggatttattttctctctcagtctccattttaacagtgcttttgaagtttatacagaaagctttaaaagttagtttgtgcccttggtttttattcttaaaactgctaaaatacctctgtaagccttatcctttattctttcatatgttgtataataaatgtatagatttcattgaccaactaaaatgttgggtgtctgtaaatgagaccaaaacgtgggttgcttttttcataaaataatttctattgggggttactgttcaatgacagcaggtaacctataactgtgaatgcttcgtgtcgtcagtatttgcattacattcataaaagtgtgcaagtcctgtgactcccagcttaactgaaatactgttatgccacctaacttgagtacagcaaactggttttaggtttcaatgacattgatgtaaaatgatatcccatgaataaaaagtatttgtgtttggtttcaga

SEQ ID NO: 304185 - DNA, 3570 bp, Homo sapiens
gattgcttcatagtatggtgtgctgttgccgtctgccacacctgtgttacagggaaaaggaccagcgcagcctagacataaacactgccaagtgcatgttgggactgttattaggaaaaatctggcccctttttccagtttttcaccaattcttagagcaatcaaaatacaaagttattaataaagaccagtggtgcaatgtcctagagtttagcagaacaattaatcttgacctcagcaactatgatgaagatggagcatggccagttttgttggacgagtttgtggagtggtataaagacaaacagatgtcctaggactttatgcatagcagcgagagagtcactgttaccacagttttgtcacccattagccataaattgctgtttgtatcaaagcgcatgctgcttctcttgcactgtttccctttcgcagggacatgttggtgtttgctattgaattggccagctctgcttgctgtgtggcattgttctcttggaaggctgctttgcagtttgtatttacactacagattggtgaatttgccaacgtcctcactgtgattatgtgtatattgctgtttaaattttgtatatgtgtataaaaggaaaaagcttcacctagagattatttctgaaaaatgtattgtaaaaataattttgtggcatttctagtccctttttttgaatgaaccaattatactttatttggtctcctatgtagcatttcagaaaacaagagaaaactgttaccatgaacaaacattgccagaattaaccttactgtttaagaggccaacttctggaaggaggtaggagtcataactttttagaggcatatgccaaatatcatttggtatacttaacaatattagtgttttaaaatgatgagttataattatttgaacatatagatatgtaacatgccacaaatcatttctaccatgcaaggtgtataagttgtttattttttagtgttaaaactataatagcttgaatataggtaccaatgaacaaattcaaattgcacctcttttcttaaaagaatgggatttaaactcttataaacattctttaacttttttgtttgtttgttctctttttttccttttgcattcttctagccagtgattgatctgctaatgctttctttgccactctaagtaaaatttatttcacctcctcaatgaaaacctcatggttttgctggctgtttataactgcatcgcacttctagttgtggcttgaattttcagttaagctttcatggtatgtaattttccagccttttgagaaaacaagcatactataagtgagagctgttttgttttccttgtttgtttgtttcatgctaggcttttcctggcagcatgtccattgcaggcagtggacaagaaaccaccagcattgagctaacccagtacatgctaggacctgtcctagaggggccacttttcattacctgagttatttgtacagaagggcaatagccattatttttgtggatgaggaaacaagaataaacagaatggtatttttaggtttgtattttatgtcttttttttttttttttttttgccattcttgaggaaatatagagatgacatgttttcaccccaactatctggtgctattgaatgactaattcagtccctaaagttctgtgaaaacacaaaagtctaatgatttgagtgagtaaaaggtaatggtgcatttgaacaagtaaatgctgtcgtggtcagcaagatccgtgatttgaacatgtgatgactggaaaaaggtttgggttatttggaactctggctaaaacttctttcgggtgacatgtgatcgtttaaatggcattaagtgaataaagcacacagacagtgctactcttgaccactattttaccatttctttgcaaacagtgttcacattttcatattttttccctaactaaaccaccaaagaaagaaattttgtatgtatatacagtgtgtgtgtatacaaaatcatgatatagtagaatgcaactactttctttttctaccaaacgaaaggttttatttgctgtgaaataaaccagaagtttaaaaaaccctgtagtgattaagcatacttaaccactccttatttgtagattcactttcaaccttaaaaattaataccagtttgcataaaccaatatctgaaaagaacaggaaatgttaatggcaagcaacagctattaatactgatgtgatggatgcatttgttttgcagtggtgactggcctaggcaggtttggatctgtgaagaattgattcattttcaaaattattccataaagttaaaaagttacactttaaaggcaacaggtcatacagttctttaaatctgatcaactgtagctttatttaaagcaaatataaatcatagatgaagttattttaaacactatgttagaatatagagatttttaaaaaatgctgataagcacagttaattctaaaatgagaggattgttacaggagggagatgttacagttaatccacaatcaacattttgatggtagggaaaaaactgcgtaaaaactattgcattatgtatgataagaaagtaagtattccaaagggataatcttgcatattaagaaaactccaaataatctttaaactgccttgaaaaataaacctctttgactgctgagcggcagagtgcttacccttgattgtcttgattttatatatttatttctaaggggagaaaaaggggtcagacagagtaatatgatacattttcttaaaaacttctctaagttgcacaaaactgaacaatcatcaagcacttatttactggctaatgttgaataaattagggtgccttcatctgggttttctttagtacctaagtctacaaccctttctctttttctattgtgtttcgaactccacattgcaatactctgttgtcatggaatacaacctttagatgtttactgctgaagtaggtcagaaattgtattatttgatttgcctcaaacatccactgtaatgttacatgcaccttttttgaagcatgaactctgaattatgtttttataaatctgactaggcaaacctagattctggtttcacaatggatttattttctctctcagtctccattttaacagtgcttttgaagtttatacagaaagctttaaaagttagtttgtgcccttggtttttattcttaaaactgctaaaatacctctgtaagccttatcctttattctttcatatgttgtataataaatgtatagatttcattgaccaactaaaatgttgggtgtctgtaaatgagaccaaaacgtgggttgcttttttcataaaataatttctattgggggttactgttcaatgacagcaggtaacctataactgtgaatgcttcgtgtcgtcagtatttgcattacattcataaaagtgtgcaagtcctgtgactcccagcttaactgaaatactgttatgccacctaacttgagtacagcaaactggttttaggtttcaatgacattgatgtaaaatgatatcccatgaataaaaagtatttgtgtttggtttcaga

SEQ ID NO: 304186 - DNA, 4208 bp, Homo sapiens
tgagagacgcagcagggcggcccctgagccgcggtttagccaatggagaaggcgagatgggcgggctgggagtgcccggcggcgggtcctcagcttcgagccgaggtgcagtgagctggtggggggaccgcgaggcgagcgcgggagcctgggcggcgagccgggtgtgagctgcctgaaaatgcactcggatgccgccgctgtcaattttcagctgaactctcatctctcaacactggcaaatattcataagatctaccacacccttaataagctgaacctaacagaagacattggccaagacgatcaccaaacaggaagtctgcggtcttgcagttcttcagactgctttaataaagtgatgccaccaaggaaaaagagaagacctgcctctggagatgatttatctgccaagaaaagtagacatgatagcatgtatagaaaatatgattcgactagaataaagactgaagaagaagccttttcaagtaaaaggtgcttggaatggttctatgaatatgcaggaactgatgatgttgtaggccctgaaggcatggagaaattttgtgaagacattggtgttgaaccagaaaacgtagttatgcttgtcctagcttggaaattggatgcacaaaacatgggttattttactctacaggagtggttaaaaggaatgacttctctccaatgtgatacaacagaaaaactcagaaatactttggattacttaagatcattcttaaatgattctacaaactttaaacttatttacagatatgcgtttgactttgcacggcaatcaaaatacaaagttattaataaagaccagtggtgcaatgtcctagagtttagcagaacaattaatcttgacctcagcaactatgatgaagatggagcatggccagttttgttggacgagtttgtggagtggtataaagacaaacagatgtcctaggactttatgcatagcagcgagagagtcactgttaccacagttttgtcacccattagccataaattgctgtttgtatcaaagcgcatgctgcttctcttgcactgtttccctttcgcagggacatgttggtgtttgctattgaattggccagctctgcttgctgtgtggcattgttctcttggaaggctgctttgcagtttgtatttacactacagattggtgaatttgccaacgtcctcactgtgattatgtgtatattgctgtttaaattttgtatatgtgtataaaaggaaaaagcttcacctagagattatttctgaaaaatgtattgtaaaaataattttgtggcatttctagtccctttttttgaatgaaccaattatactttatttggtctcctatgtagcatttcagaaaacaagagaaaactgttaccatgaacaaacattgccagaattaaccttactgtttaagaggccaacttctggaaggaggtaggagtcataactttttagaggcatatgccaaatatcatttggtatacttaacaatattagtgttttaaaatgatgagttataattatttgaacatatagatatgtaacatgccacaaatcatttctaccatgcaaggtgtataagttgtttattttttagtgttaaaactataatagcttgaatataggtaccaatgaacaaattcaaattgcacctcttttcttaaaagaatgggatttaaactcttataaacattctttaacttttttgtttgtttgttctctttttttccttttgcattcttctagccagtgattgatctgctaatgctttctttgccactctaagtaaaatttatttcacctcctcaatgaaaacctcatggttttgctggctgtttataactgcatcgcacttctagttgtggcttgaattttcagttaagctttcatggtatgtaattttccagccttttgagaaaacaagcatactataagtgagagctgttttgttttccttgtttgtttgtttcatgctaggcttttcctggcagcatgtccattgcaggcagtggacaagaaaccaccagcattgagctaacccagtacatgctaggacctgtcctagaggggccacttttcattacctgagttatttgtacagaagggcaatagccattatttttgtggatgaggaaacaagaataaacagaatggtatttttaggtttgtattttatgtcttttttttttttttttttttgccattcttgaggaaatatagagatgacatgttttcaccccaactatctggtgctattgaatgactaattcagtccctaaagttctgtgaaaacacaaaagtctaatgatttgagtgagtaaaaggtaatggtgcatttgaacaagtaaatgctgtcgtggtcagcaagatccgtgatttgaacatgtgatgactggaaaaaggtttgggttatttggaactctggctaaaacttctttcgggtgacatgtgatcgtttaaatggcattaagtgaataaagcacacagacagtgctactcttgaccactattttaccatttctttgcaaacagtgttcacattttcatattttttccctaactaaaccaccaaagaaagaaattttgtatgtatatacagtgtgtgtgtatacaaaatcatgatatagtagaatgcaactactttctttttctaccaaacgaaaggttttatttgctgtgaaataaaccagaagtttaaaaaaccctgtagtgattaagcatacttaaccactccttatttgtagattcactttcaaccttaaaaattaataccagtttgcataaaccaatatctgaaaagaacaggaaatgttaatggcaagcaacagctattaatactgatgtgatggatgcatttgttttgcagtggtgactggcctaggcaggtttggatctgtgaagaattgattcattttcaaaattattccataaagttaaaaagttacactttaaaggcaacaggtcatacagttctttaaatctgatcaactgtagctttatttaaagcaaatataaatcatagatgaagttattttaaacactatgttagaatatagagatttttaaaaaatgctgataagcacagttaattctaaaatgagaggattgttacaggagggagatgttacagttaatccacaatcaacattttgatggtagggaaaaaactgcgtaaaaactattgcattatgtatgataagaaagtaagtattccaaagggataatcttgcatattaagaaaactccaaataatctttaaactgccttgaaaaataaacctctttgactgctgagcggcagagtgcttacccttgattgtcttgattttatatatttatttctaaggggagaaaaaggggtcagacagagtaatatgatacattttcttaaaaacttctctaagttgcacaaaactgaacaatcatcaagcacttatttactggctaatgttgaataaattagggtgccttcatctgggttttctttagtacctaagtctacaaccctttctctttttctattgtgtttcgaactccacattgcaatactctgttgtcatggaatacaacctttagatgtttactgctgaagtaggtcagaaattgtattatttgatttgcctcaaacatccactgtaatgttacatgcaccttttttgaagcatgaactctgaattatgtttttataaatctgactaggcaaacctagattctggtttcacaatggatttattttctctctcagtctccattttaacagtgcttttgaagtttatacagaaagctttaaaagttagtttgtgcccttggtttttattcttaaaactgctaaaatacctctgtaagccttatcctttattctttcatatgttgtataataaatgtatagatttcattgaccaactaaaatgttgggtgtctgtaaatgagaccaaaacgtgggttgcttttttcataaaataatttctattgggggttactgttcaatgacagcaggtaacctataactgtgaatgcttcgtgtcgtcagtatttgcattacattcataaaagtgtgcaagtcctgtgactcccagcttaactgaaatactgttatgccacctaacttgagtacagcaaactggttttaggtttcaatgacattgatgtaaaatgatatcccatgaataaaaagtatttgtgtttggtttcaga

SEQ ID NO: 304187 - DNA, 3818 bp, Homo sapiens
attaatcccatgaaaagcctgtagaaactgctacgacataactaattgattttgcattagggtgatcattcagttgacataaatctttctcacagtaaatttatataatatcgtaatgcccaagccttccattgtgtttgactacctcccctccctaaccttagtctggatgcagggtctttaaggtgtatgataaatgagctgtttactaatttcctgttgaagtgaatacacatttgcaattattggaatttattatttgggggcatctggctcatccttgtttttgtttgttaaacaggaaaaggaccagcgcagcctagacataaacactgccaagtgcatgttgggactgttattaggaaaaatctggcccctttttccagtttttcaccaattcttagagcaatcaaaatacaaagttattaataaagaccagtggtgcaatgtcctagagtttagcagaacaattaatcttgacctcagcaactatgatgaagatggagcatggccagttttgttggacgagtttgtggagtggtataaagacaaacagatgtcctaggactttatgcatagcagcgagagagtcactgttaccacagttttgtcacccattagccataaattgctgtttgtatcaaagcgcatgctgcttctcttgcactgtttccctttcgcagggacatgttggtgtttgctattgaattggccagctctgcttgctgtgtggcattgttctcttggaaggctgctttgcagtttgtatttacactacagattggtgaatttgccaacgtcctcactgtgattatgtgtatattgctgtttaaattttgtatatgtgtataaaaggaaaaagcttcacctagagattatttctgaaaaatgtattgtaaaaataattttgtggcatttctagtccctttttttgaatgaaccaattatactttatttggtctcctatgtagcatttcagaaaacaagagaaaactgttaccatgaacaaacattgccagaattaaccttactgtttaagaggccaacttctggaaggaggtaggagtcataactttttagaggcatatgccaaatatcatttggtatacttaacaatattagtgttttaaaatgatgagttataattatttgaacatatagatatgtaacatgccacaaatcatttctaccatgcaaggtgtataagttgtttattttttagtgttaaaactataatagcttgaatataggtaccaatgaacaaattcaaattgcacctcttttcttaaaagaatgggatttaaactcttataaacattctttaacttttttgtttgtttgttctctttttttccttttgcattcttctagccagtgattgatctgctaatgctttctttgccactctaagtaaaatttatttcacctcctcaatgaaaacctcatggttttgctggctgtttataactgcatcgcacttctagttgtggcttgaattttcagttaagctttcatggtatgtaattttccagccttttgagaaaacaagcatactataagtgagagctgttttgttttccttgtttgtttgtttcatgctaggcttttcctggcagcatgtccattgcaggcagtggacaagaaaccaccagcattgagctaacccagtacatgctaggacctgtcctagaggggccacttttcattacctgagttatttgtacagaagggcaatagccattatttttgtggatgaggaaacaagaataaacagaatggtatttttaggtttgtattttatgtcttttttttttttttttttttgccattcttgaggaaatatagagatgacatgttttcaccccaactatctggtgctattgaatgactaattcagtccctaaagttctgtgaaaacacaaaagtctaatgatttgagtgagtaaaaggtaatggtgcatttgaacaagtaaatgctgtcgtggtcagcaagatccgtgatttgaacatgtgatgactggaaaaaggtttgggttatttggaactctggctaaaacttctttcgggtgacatgtgatcgtttaaatggcattaagtgaataaagcacacagacagtgctactcttgaccactattttaccatttctttgcaaacagtgttcacattttcatattttttccctaactaaaccaccaaagaaagaaattttgtatgtatatacagtgtgtgtgtatacaaaatcatgatatagtagaatgcaactactttctttttctaccaaacgaaaggttttatttgctgtgaaataaaccagaagtttaaaaaaccctgtagtgattaagcatacttaaccactccttatttgtagattcactttcaaccttaaaaattaataccagtttgcataaaccaatatctgaaaagaacaggaaatgttaatggcaagcaacagctattaatactgatgtgatggatgcatttgttttgcagtggtgactggcctaggcaggtttggatctgtgaagaattgattcattttcaaaattattccataaagttaaaaagttacactttaaaggcaacaggtcatacagttctttaaatctgatcaactgtagctttatttaaagcaaatataaatcatagatgaagttattttaaacactatgttagaatatagagatttttaaaaaatgctgataagcacagttaattctaaaatgagaggattgttacaggagggagatgttacagttaatccacaatcaacattttgatggtagggaaaaaactgcgtaaaaactattgcattatgtatgataagaaagtaagtattccaaagggataatcttgcatattaagaaaactccaaataatctttaaactgccttgaaaaataaacctctttgactgctgagcggcagagtgcttacccttgattgtcttgattttatatatttatttctaaggggagaaaaaggggtcagacagagtaatatgatacattttcttaaaaacttctctaagttgcacaaaactgaacaatcatcaagcacttatttactggctaatgttgaataaattagggtgccttcatctgggttttctttagtacctaagtctacaaccctttctctttttctattgtgtttcgaactccacattgcaatactctgttgtcatggaatacaacctttagatgtttactgctgaagtaggtcagaaattgtattatttgatttgcctcaaacatccactgtaatgttacatgcaccttttttgaagcatgaactctgaattatgtttttataaatctgactaggcaaacctagattctggtttcacaatggatttattttctctctcagtctccattttaacagtgcttttgaagtttatacagaaagctttaaaagttagtttgtgcccttggtttttattcttaaaactgctaaaatacctctgtaagccttatcctttattctttcatatgttgtataataaatgtatagatttcattgaccaactaaaatgttgggtgtctgtaaatgagaccaaaacgtgggttgcttttttcataaaataatttctattgggggttactgttcaatgacagcaggtaacctataactgtgaatgcttcgtgtcgtcagtatttgcattacattcataaaagtgtgcaagtcctgtgactcccagcttaactgaaatactgttatgccacctaacttgagtacagcaaactggttttaggtttcaatgacattgatgtaaaatgatatcccatgaataaaaagtatttgtgtttggtttcaga

SEQ ID NO: 304188 - DNA, 4477 bp, Homo sapiens
tgagagacgcagcagggcggcccctgagccgcggtttagccaatggagaaggcgagatgggcgggctgggagtgcccggcggcgggtcctcagcttcgagccgaggtgcagtgagctggtggggggaccgcgaggcgagcgcgggagcctgggcggcgagccgggtgtgagctgcctgaaaatgcactcggatgccgccgctgtcaattttcagctgaactctcatctctcaacactggcaaatattcataagatctaccacacccttaataagctgaacctaacagaagacattggccaagacgatcaccaaacaggaagtctgcggtcttgcagttcttcagactgctttaataaagtgatgccaccaaggaaaaagagaagacctgcctctggagatgatttatctgccaagaaaagtagacatgatagcatgtatagaaaatatgattcgactagaataaagactgaagaagaagccttttcaagtaaaaggtgcttggaatggttctatgaatatgcaggaactgatgatgttgtaggccctgaaggcatggagaaattttgtgaagacattggtgttgaaccagaaaacgtagttatgcttgtcctagcttggaaattggatgcacaaaacatgggttattttactctacaggagtggttaaaaggaatgacttctctccaatgtgatacaacagaaaaactcagaaatactttggattacttaagatcattcttaaatgattctacaaactttaaacttatttacagatatgcgtttgactttgcacgggaaaaggaccagcgcagcctagacataaacactgccaagtgcatgttgggactgttattaggaaaaatctggcccctttttccagtttttcaccaattcttagagcaatcaaaatacaaagttattaataaagaccagtggtgcaatgtcctagagtttagcagaacaattaatcttgacctcagcaactatgatgaagatggagcatggccagttttgttggacgagtttgtggagtggtataaagacaaacagatgtcctaggactttatgcatagcagcgagagagtcactgttaccacagttttgtcacccattagccataaattgctgtttgtatcaaagcgcatgctgcttctcttgcactgtttccctttcgcagggacatgttggtgtttgctattgaattggccagctctgcttgctgtgtggcattgttctcttggaaggctgctttgcagtttgtatttacactacagattggtgaatttgccaacgtcctcactgtgattatgtgtatattgctgtttaaattttgtatatgtgtataaaaggaaaaagcttcacctagagattatttctgaaaaatgtattgtaaaaataattttgtggcatttctagtccctttttttgaatgaaccaattatactttatttggtctcctatgtagcatttcagaaaacaagagaaaactgttaccatgaacaaacattgccagaattaaccttactgtttaagaggccaacttctggaaggaggtaggagtcataactttttagaggcatatgccaaatatcatttggtatacttaacaatattagtgttttaaaatgatgagttataattatttgaacatatagatatgtaacatgccacaaatcatttctaccatgcaaggtgtataagttgtttattttttagtgttaaaactataatagcttgaatataggtaccaatgaacaaattcaaattgcacctcttttcttaaaagaatgggatttaaactcttataaacattctttaacttttttgtttgtttgttctctttttttccttttgcattcttctagccagtgattgatctgctaatgctttctttgccactctaagtaaaatttatttcacctcctcaatgaaaacctcatggttttgctggctgtttataactgcatcgcacttctagttgtggcttgaattttcagttaagctttcatggtatgtaattttccagccttttgagaaaacaagcatactataagtgagagctgttttgttttccttgtttgtttgtttcatgctaggcttttcctggcagcatgtccattgcaggcagtggacaagaaaccaccagcattgagctaacccagtacatgctaggacctgtcctagaggggccacttttcattacctgagttatttgtacagaagggcaatagccattatttttgtggatgaggaaacaagaataaacagaatggtatttttaggtttgtattttatgtcttttttttttttttttttttgccattcttgaggaaatatagagatgacatgttttcaccccaactatctggtgctattgaatgactaattcagtccctaaagttctgtgaaaacacaaaagtctaatgatttgagtgagtaaaaggtaatggtgcatttgaacaagtaaatgctgtcgtggtcagcaagatccgtgatttgaacatgtgatgactggaaaaaggtttgggttatttggaactctggctaaaacttctttcgggtgacatgtgatcgtttaaatggcattaagtgaataaagcacacagacagtgctactcttgaccactattttaccatttctttgcaaacagtgttcacattttcatattttttccctaactaaaccaccaaagaaagaaattttgtatgtatatacagtgtgtgtgtatacaaaatcatgatatagtagaatgcaactactttctttttctaccaaacgaaaggttttatttgctgtgaaataaaccagaagtttaaaaaaccctgtagtgattaagcatacttaaccactccttatttgtagattcactttcaaccttaaaaattaataccagtttgcataaaccaatatctgaaaagaacaggaaatgttaatggcaagcaacagctattaatactgatgtgatggatgcatttgttttgcagtggtgactggcctaggcaggtttggatctgtgaagaattgattcattttcaaaattattccataaagttaaaaagttacactttaaaggcaacaggtcatacagttctttaaatctgatcaactgtagctttatttaaagcaaatataaatcatagatgaagttattttaaacactatgttagaatatagagatttttaaaaaatgctgataagcacagttaattctaaaatgagaggattgttacaggagggagatgttacagttaatccacaatcaacattttgatggtagggaaaaaactgcgtaaaaactattgcattatgtatgataagaaagtaagtattccaaagggataatcttgcatattaagaaaactccaaataatctttaaactgccttgaaaaataaacctctttgactgctgagcggcagagtgcttacccttgattgtcttgattttatatatttatttctaaggggagaaaaaggggtcagacagagtaatatgatacattttcttaaaaacttctctaagttgcacaaaactgaacaatcatcaagcacttatttactggctaatgttgaataaattagggtgccttcatctgggttttctttagtacctaagtctacaaccctttctctttttctattgtgtttcgaactccacattgcaatactctgttgtcatggaatacaacctttagatgtttactgctgaagtaggtcagaaattgtattatttgatttgcctcaaacatccactgtaatgttacatgcaccttttttgaagcatgaactctgaattatgtttttataaatctgactaggcaaacctagattctggtttcacaatggatttattttctctctcagtctccattttaacagtgcttttgaagtttatacagaaagctttaaaagttagtttgtgcccttggtttttattcttaaaactgctaaaatacctctgtaagccttatcctttattctttcatatgttgtataataaatgtatagatttcattgaccaactaaaatgttgggtgtctgtaaatgagaccaaaacgtgggttgcttttttcataaaataatttctattgggggttactgttcaatgacagcaggtaacctataactgtgaatgcttcgtgtcgtcagtatttgcattacattcataaaagtgtgcaagtcctgtgactcccagcttaactgaaatactgttatgccacctaacttgagtacagcaaactggttttaggtttcaatgacattgatgtaaaatgatatcccatgaataaaaagtatttgtgtttggtttcagaacagatgtgtaaattttttcttctctcttctggctttcatttcaaaaaccatttaaggtagtctttaaagcattttttatccttttttgtttgttttttttccaacttcttctattgaaaatttccaaagctacaataatataatgaacaactgtgtacctgtc

SEQ ID NO: 304189 - DNA, 2282 bp, Homo sapiens
tgagagacgcagcagggcggcccctgagccgcggtttagccaatggagaaggcgagatgggcgggctgggagtgcccggcggcgggtcctcagcttcgagccgaggtgcagtgagctggtggggggaccgcgaggcgagcgcgggagcctgggcggcgagccgggtgtgagctgcctgaaaatgcactcggatgccgccgctgtcaattttcagctgaactctcatctctcaacactggcaaatattcataagatctaccacacccttaataagctgaacctaacagaagacattggccaagacgatcaccaaacaggaagtctgcggtcttgcagttcttcagactgctttaataaagtgatgccaccaaggaaaaagagaagacctgcctctggagatgatttatctgccaagaaaagtagacatgatagcatgtatagaaaatatgattcgactagaataaagactgaagaagaagccttttcaagtaaaaggtgcttggaatggttctatgaatatgcaggaactgatgatgttgtaggccctgaaggcatggagaaattttgtgaagacattggtgttgaaccagaaaacgtagttatgcttgtcctagcttggaaattggatgcacaaaacatgggttattttactctacaggagtggttaaaaggaatgacttctctccaatgtgatacaacagaaaaactcagaaatactttggattacttaagatcattcttaaatgattctacaaactttaaacttatttacagatatgcgtttgactttgcacgggaaaaggaccagcgcagcctagacataaacactgccaagtgcatgttgggactgttattaggaaaaatctggcccctttttccagtttttcaccaattcttagagcaatcaaaatacaaagttattaataaagaccagtggtgcaatgtcctagagtttagcagaacaattaatcttgacctcagcaactatgatgaagatggagcatggccagttttgttggacgagtttgtggagtggtataaagacaaacagatgtcctaggactttatgcatagcagcgagagagtcactgttaccacagttttgtcacccattagccataaattgctgtttgtatcaaagcgcatgctgcttctcttgcactgtttccctttcgcagggacatgttggtgtttgctattgaattggccagctctgcttgctgtgtggcattgttctcttggaaggctgctttgcagtttgtatttacactacagattggtgaatttgccaacgtcctcactgtgattatgtgtatattgctgtttaaattttgtatatgtgtataaaaggaaaaagcttcacctagagattatttctgaaaaatgtattgtaaaaataattttgtggcatttctagtccctttttttgaatgaaccaattatactttatttggtctcctatgtagcatttcagaaaacaagagaaaactgttaccatgaacaaacattgccagaattaaccttactgtttaagaggccaacttctggaaggaggtaggagtcataactttttagaggcatatgccaaatatcatttggtatacttaacaatattagtgttttaaaatgatgagttataattatttgaacatatagatatgtaacatgccacaaatcatttctaccatgcaaggtgtataagttgtttattttttagtgttaaaactataatagcttgaatataggtaccaatgaacaaattcaaattgcacctcttttcttaaaagaatgggatttaaactcttataaacattctttaacttttttgtttgtttgttctctttttttccttttgcattcttctagccagtgattgatctgctaatgctttctttgccactctaagtaaaatttatttcacctcctcaatgaaaacctcatggttttgctggctgtttataactgcatcgcacttctagttgtggcttgaattttcagttaagctttcatggtatgtaattttccagccttttgagaaaacaagcatactataagtgagagctgttttgttttccttgtttgtttgtttcatgctaggcttttcctggcagcatgtccattgcaggcagtggacaagaaaccaccagcattgagctaacccagtacatgctaggacctgtcctagaggggccacttttcattacctgagttatttgtacagaagggcaatagccattatttttgtggatgaggaaacaagaataaacagaatggtattttta

SEQ ID NO: 304190 - DNA, 1211 bp, Homo sapiens
  misc_feature (8)..(8): n is a, c, g, or t
  misc_feature (10)..(10): n is a, c, g, or t
  misc_feature (12)..(12): n is a, c, g, or t
ccaaattngncnttggccggggagcttcgagccgaggtgcagtgagctggtggggggaccgcgaggcgagcgcgggagcctgggcggcgagccgggtgtgagctgcctgaaaatgcactcggatgccgccgctgtcaattttcagctgaactctcatctctcaacactggcaaatattcataagatctaccacacccttaataagctgaacctaacagaagacattggccaagacgatcaccaaacaggaagtctgcggtcttgcagttcttcagactgctttaataaagtgatgccaccaaggaaaaagagaagacctgcctctggagatgatttatctgccaagaaaagtagacatgataggtctcactcattcacttcaaccacagagctggagagatcttcctgtacttaatggtctgtgcccgcccagaatatcagccaagctgaggtttattctcacatgggtgagaattcgatagaactgtgaaaaacaaggctctttaaatcgcttctctttcagataagtgaacttgttaattcttggtaactccaagggcctgttagattcgtttatttcaaacatctttattgtttcaccctgagtttagtaagtagttttttcttccttgtttcagaaacaacaaacgaacatcattgtctagtcttttctacctttctccatctttccccattctggctttgtgggtcatatcactaatgggccagaatttccacatgtattaatccagggaatttaagtgagatttttctgtttctttcttgctgtgactcagaggaataagaaagactctgaaaatgtaaaaataatgtcattgtttatatctcaaatgaatagaaaatattatctgaaagaagatagtagtgatttagaaaataatcaccagcaatctttaggccagtgatttttcaactttacaaaggcaggctactttgatacttttttggtggtgtggacgttattatcagaattgttaaattctaacaatcacataacattttgtgactttgtagcgcttagtattttctcaccacagtctaataaaatatagtatgataaagccagatttgaaactggcagtgtagttgcagtttctgagtttcattcttggcctttcttttttaaacaactttatttacataccataaagttcatccattttaagtgtacagtttagtgatttttatta

SEQ ID NO: 304191 - DNA, 886 bp, Homo sapiens
  misc_feature (817)..(817): n is a, c, g, or t
  misc_feature (867)..(867): n is a, c, g, or t
tgagagacgcagcagggcggcccctgagccgcggtttagccaatggagaaggcgagatgggcgggctgggagtgcccggcggcgggtcctcagcttcgagccgaggtgcagtgagctggtggggggaccgcgaggcgagcgcgggagcctgggcggcgagccgggtgtgagctgcctgaaaatgcactcggatgccgccgctgtcaattttcagctgaactctcatctctcaacactggcaaatattcataagatctaccacacccttaataagctgaacctaacagaagacattggccaagacgatcaccaaacaggaagtctgcggtcttgcagttcttcagactgctttaataaagtgatgccaccaaggaaaaagagaagacctgcctctggagatgatttatctgccaagaaaagtagacatgatagcatgtatagaaaatatgattcgactagaataaagactgaagaagaagccttttcaagtaaaaggtgcttggaatggttctatgaatatgcaggaactgatgatgttgtaggccctgaaggcatggagaaattttgtgaagacattggtgttgaaccagaaaacgtagttatgcttgtcctagcttggaaattggatgcacaaaacatgggttattttactctacaggagtggttaaaaggaatgacttctctccaatgtgatacaacagaaaaactcagaaatactttggattacttaagatcattcttaaatgattctacaaactttaaacttatttacagatatgcgtttgactttgcacggcccggcatcaaaattccaaanttatttattaaagaaccaattggttgccattgttcctaaaaattttaacnaaaaaccaattttattcct

SEQ ID NO: 304192 - DNA, 606 bp, Homo sapiens
  misc_feature (8)..(8): n is a, c, g, or t
  misc_feature (10)..(10): n is a, c, g, or t
  misc_feature (12)..(12): n is a, c, g, or t
ccaaattngncnttggccggggagcttcgagccgaggtgcagtgagctggtggggggaccgcgaggcgagcgcgggagcctgggcggcgagccgggtgtgagctgcctgaaaatgcactcggatgccgccgctgtcaattttcagctgaactctcatctctcaacactggcaaatattcataagatctaccacacccttaataagctgaacctaacagaagacattggccaagacgatcaccaaacaggaagtctgcggtcttgcagttcttcagactgctttaataaagtgatgccaccaaggaaaaagagaagacctgcctctggagatgatttatctgccaagaaaagtagacatgataggtatgatgtagagacagtagatcagaatcagtgatacatatgtcgaagatgcacatttctacctaattcagtgtgggtcttctaagtgtgcaaatgccaagtggaatgggctttgccagtcgatttttcaaaatgtaattatttaatcatgtttattttgtgttttagtttaaaaacgtaagaacaaattaggtaatttgaattcttagaagttaaagttttatcttaatccatgatcgccca

SEQ ID NO: 304193 - DNA, 3598 bp, Homo sapiens
gagcccggagaagcaggctcaggagggagggagccagaggaaaagaagaggaggagaaggaggaggacccggggagggaggcgcggcgcgggaggaggaggggcgcagccgcggagccagtggccccgcttggacgcgctgctctccagatacccccggagctccagccgcgcggatcgcgcgctcccgccgctctgcccctaaacttctgccgtagctccctttcaagccagcgaatttattccttaaaaccagaaactgaacctcggcacgggaaaggagtccgcggaggagcaaaaccacagcagagcaagaagagcttcagagagcagccttcccggagcaccaactccgtgtcgggagtgcagaaaccaacaagtgagagggcgccgcgttcccggggcgcagctgcgggcggcgggagcaggcgcaggaggaggaagcgagcgcccccgagccccgagcccgagtccccgagcctgagccgcaatcgctgcggtactctgctccggattcgtgtgcgcgggctgcgccgagcgctgggcaggaggcttcgttttgccctggttgcaagcagcggctgggagcagccggtccctggggaatatgcggcgcgcgtggatcctgctcaccttgggcttggtggcctgcgtgtcggcggagtcgagagcagagctgacatctgataaagacatgtaccttgacaacagctccattgaagaagcttcaggagtgtatcctattgatgacgatgactacgcttctgcgtctggctcgggagctgatgaggatgtagagagtccagagctgacaacatctcgaccacttccaaagatactgttgactagtgctgctccaaaagtggaaaccacgacgctgaatatacagaacaagatacctgctcagacaaagtcacctgaagaaactgataaagagaaagttcacctctctgactcagaaaggaaaatggacccagccgaagaggatacaaatgtgtatactgagaaacactcagacagtctgtttaaacggacagaagtcctagcagctgtcattgctggtggagttattggctttctctttgcaatttttcttatcctgctgttggtgtatcgcatgagaaagaaggatgaaggaagctatgaccttggagaacgcaaaccatccagtgctgcttatcagaaggcacctactaaggagttttatgcgtaaaactccaacttagtgtctctatttatgagatcactgaacttttcaaaataaagcttttgcatagaataatgaagatctttgttttttgttttcattaaagagccattctggcactttaatgataaaatcccattgtatttaaaacatttcatgtatttctttagaacaacataaaattaaaatttaacatctgcagtgttctgtgaatagcagtggcaaaatattatgttatgaaaaccctcgatgttcatggaattggtttaaacttttatgcgcaaatacaaaatgattgtctttttcctatgactcaaagatgaaagctgtttcatttgtgtcagcatgtctcagattgaccttaccaagttggtcttactttgttaatttatctgttgtccccttcctctcctctgccctcccttcttgtgcccttaaaaccaaaccctatgccttttgtagctgtcatggtgcaatttgtctttggaaaattcagataatggtaatttagtgtatatgtgattttcaaatatgtaaactttaacttccactttgtataaatttttaagtgtcagactatccattttacacttgctttatttttcattacctgtagctttgggcagatttgcaacagcaaattaatgtgtaaaattggattattactacaaaaccgtttagtcatatctatctaatcagatcttcttttgggaggatttgatgtaagttactgacaagcctcagcaaacccaaagatgttaacagtattttaagaagttgctgcagattcctttggccactgtatttgttaatttcttgcaatttgaaggtacgagtagaggtttaaagaaaaatcagtttttgttcttaaaaatgcatttaagttgtaaacgtctttttaagcctttgaagtgcctctgattctatgtaacttgttgcagactggtgttaatgagtatatgtaacagtttaaaaaaaaagttggtattttataagcacagacaattctaatggtaacttttgtagtcttatgaatagacataaattgtaatttgggaacataaaaactactgaataaatcatgtggcctaatattgaaaatgtcactgttataaattttgtacatttttgatcaaatgtacatctcccctttgctaacggccgtctgctctcaaggatgacgtgggtttgatttctaagtgtttcacagtgtctgtaaatcaagaccaaagagcctgtcgatgagactgtttattaccagattcacttctgaattggccagaggaaatctgaatgtattatcctgtgtgtgtctaggtagagatattggaaggctgccaggggatttcgaagtttgcaacctttataggataactgatggcaatattaagacagacgcctgcttttgcaaataacttacaagactgtaaattccaaagatctgaatggggctttcctgatgttggtatctaaggcttaggcctatagattgatttacctttggaattgtgctccaaatgtctactgaagcttaaccgaagaactaataaatggactacagtagctcacgttacagggaaggagggtaggcagggaggctctgtgtgttaaaatgagggtctcactgctttaggattgaagtggctggaaagagtgatgcctggggaaggagatggagttatgagggtactgtggctggtactttctgtactaaacatttcctttttctattttaccactaattttgttttaaactgtgagccgtccaagtcagaagaagacagcaaaaaaagcaacttttccaacatacaatttacttttaataaagtatgaatatttcattttgagaacattccctggaattgccacataattcattaaaaacatttttttaagcaacacttggaacagtgtttactttaaatccttaatggccttaattaattctcagattcctgccccatcacttacagaaccaattcactttagagtgactaaaaggaaacgatagcctagctttctaaagccacgctgtgtccctcaattacagagggtaggaatgggtatacctctaactgtgcaaagcagagtgaaattcaattcatagaataacaactgctgggaatatccgtgccaggaaaagaaaaatttctggcaaatattttgtcactgctgtaaagcaaaatatttgtgaaagtgccaaaataaagtctgtcatgccaaaagtaaatcattgtatagactgacatccagttttcttcaactgtacactttctgcttagttttttttttttaagatgcagtaaataatactataaaaagtgttagtaatgattactgagttcaggaaaattttggtaaaatgtaaatattaaagccaatgtgaaaattt

SEQ ID NO: 304194 - DNA, 503 bp, Homo sapiens
tgtttaaacggacagaagtcctagcagctgtcattgctggtggagttattggctttctctttgcaatttttcttatcctgctgttgactagtgctgctccaaaagtggaaaccacgacgctgaatatacagaacaagatacctgctcagacaaagtcacctgaagaaactgataaagagaaagttcacctctctgactcagaaaggaaaatggacccagccgaagaggatacaaatgtgtatactgagaaacactcagacagtctgtttaaacggacagaagtcctagcagctgtcattgctggtggagttattggctttctctttgcaatttttcttatcctgctgttgactagtgctgctccaaaagtggaaaccacgacgctgaatatacagaacaagatacctgctcagacaaagtcacctgaagaaactgataaagagaaagttcacctctctgactcagaaaggaaaatgacccagccgaagacggatacaaacgct

SEQ ID NO: 304195 - DNA, 3560 bp, Homo sapiens
gagcccggagaagcaggctcaggagggagggagccagaggaaaagaagaggaggagaaggaggaggacccggggagggaggcgcggcgcgggaggaggaggggcgcagccgcggagccagtggccccgcttggacgcgctgctctccagatacccccggagctccagccgcgcggatcgcgcgctcccgccgctctgcccctaaacttctgccgtagctccctttcaagccagcgaatttattccttaaaaccagaaactgaacctcggcacgggaaaggagtccgcggaggagcaaaaccacagcagagcaagaagagcttcagagagcagccttcccggagcaccaactccgtgtcgggagtgcagaaaccaacaagtgagagggcgccgcgttcccggggcgcagctgcgggcggcgggagcaggcgcaggaggaggaagcgagcgcccccgagccccgagcccgagtccccgagcctgagccgcaatcgctgcggtactctgctccggattcgtgtgcgcgggctgcgccgagcgctgggcaggaggcttcgttttgccctggttgcaagcagcggctgggagcagccggtccctggggaatatgcggcgcgcgtggatcctgctcaccttgggcttggtggcctgcgtgtcggcggagtcgagagcagagctgacatctgataaagacatgtaccttgacaacagctccattgaagaagcttcaggagtgtatcctattgatgacgatgactacgcttctgcgtctggctcgggagctgatgaggatgtagagagtccagagctgacaacatctcgaccacttccaaagatactgttgactagtgctgctccaaaagtggaaaccacgacgctgaatatacagaacaagatacctgctcagacaaagtcacctgaagaaactgataaagagaaagttcacctctctgactcagaaaggaaaatggacccagccgaagaggatacaaatgtgtatactgagaaacactcagacagtctgtttaaacggacagaagtcctagcagctgtcattgctggtggagttattggctttctctttgcaatttttcttatcctgctgttggtgtatcgcatgagaaagaaggatgaaggaagctatgaccttggagaacgcaaaccatccagtgctgcttatcagaaggcacctactaaggagttttatgcgtaaaactccaacttagtgtctctatttatgagatcactgaacttttcaaaataaagcttttgcatagaataatgaagatctttgttttttgttttcattaaagagccattctggcactttaatgataaaatcccattgtatttaaaacatttcatgtatttctttagaacaacataaaattaaaatttaacatctgcagtgttctgtgaatagcagtggcaaaatattatgttatgaaaaccctcgatgttcatggaattggtttaaacttttatgcgcaaatacaaaatgattgtctttttcctatgactcaaagatgaaagctgtttcatttgtgtcagcatgtctcagattgaccttaccaagttggtcttactttgttaatttatctgttgtccccttcctctcctctgccctcccttcttgtgcccttaaaaccaaaccctatgccttttgtagctgtcatggtgcaatttgtctttggaaaattcagataatggtaatttagtgtatatgtgattttcaaatatgtaaactttaacttccactttgtataaatttttaagtgtcagactatccattttacacttgctttatttttcattacctgtagctttgggcagatttgcaacagcaaattaatgtgtaaaattggattattactacaaaaccgtttagtcatatctatctaatcagatcttcttttgggaggatttgatgtaagttactgacaagcctcagcaaacccaaagatgttaacagtattttaagaagttgctgcagattcctttggccactgtatttgttaatttcttgcaatttgaaggtacgagtagaggtttaaagaaaaatcagtttttgttcttaaaaatgcatttaagttgtaaacgtctttttaagcctttgaagtgcctctgattctatgtaacttgttgcagactggtgttaatgagtatatgtaacagtttaaaaaaaaagttggtattttataagcacagacaattctaatggtaacttttgtagtcttatgaatagacataaattgtaatttgggaacataaaaactactgaataaatcatgtggcctaatattgaaaatgtcactgttataaattttgtacatttttgatcaaatgtacatctcccctttgctaacggccgtctgctctcaagggtaaatcaagaccaaagagcctgtcgatgagactgtttattaccagattcacttctgaattggccagaggaaatctgaatgtattatcctgtgtgtgtctaggtagagatattggaaggctgccaggggatttcgaagtttgcaacctttataggataactgatggcaatattaagacagacgcctgcttttgcaaataacttacaagactgtaaattccaaagatctgaatggggctttcctgatgttggtatctaaggcttaggcctatagattgatttacctttggaattgtgctccaaatgtctactgaagcttaaccgaagaactaataaatggactacagtagctcacgttacagggaaggagggtaggcagggaggctctgtgtgttaaaatgagggtctcactgctttaggattgaagtggctggaaagagtgatgcctggggaaggagatggagttatgagggtactgtggctggtactttctgtactaaacatttcctttttctattttaccactaattttgttttaaactgtgagccgtccaagtcagaagaagacagcaaaaaaagcaacttttccaacatacaatttacttttaataaagtatgaatatttcattttgagaacattccctggaattgccacataattcattaaaaacatttttttaagcaacacttggaacagtgtttactttaaatccttaatggccttaattaattctcagattcctgccccatcacttacagaaccaattcactttagagtgactaaaaggaaacgatagcctagctttctaaagccacgctgtgtccctcaattacagagggtaggaatgggtatacctctaactgtgcaaagcagagtgaaattcaattcatagaataacaactgctgggaatatccgtgccaggaaaagaaaaatttctggcaaatattttgtcactgctgtaaagcaaaatatttgtgaaagtgccaaaataaagtctgtcatgccaaaagtaaatcattgtatagactgacatccagttttcttcaactgtacactttctgcttagttttttttttttaagatgcagtaaataatactataaaaagtgttagtaatgattactgagttcaggaaaattttggtaaaatgtaaatattaaagccaatgtgaaaattt

SEQ ID NO: 304196 - DNA, 3521 bp, Homo sapiens
gagcccggagaagcaggctcaggagggagggagccagaggaaaagaagaggaggagaaggaggaggacccggggagggaggcgcggcgcgggaggaggaggggcgcagccgcggagccagtggccccgcttggacgcgctgctctccagatacccccggagctccagccgcgcggatcgcgcgctcccgccgctctgcccctaaacttctgccgtagctccctttcaagccagcgaatttattccttaaaaccagaaactgaacctcggcacgggaaaggagtccgcggaggagcaaaaccacagcagagcaagaagagcttcagagagcagccttcccggagcaccaactccgtgtcgggagtgcagaaaccaacaagtgagagggcgccgcgttcccggggcgcagctgcgggcggcgggagcaggcgcaggaggaggaagcgagcgcccccgagccccgagcccgagtccccgagcctgagccgcaatcgctgcggtactctgctccggattcgtgtgcgcgggctgcgccgagcgctgggcaggaggcttcgttttgccctggttgcaagcagcggctgggagcaagagcagagctgacatctgataaagacatgtaccttgacaacagctccattgaagaagcttcaggagtgtatcctattgatgacgatgactacgcttctgcgtctggctcgggagctgatgaggatgtagagagtccagagctgacaacatctcgaccacttccaaagatactgttgactagtgctgctccaaaagtggaaaccacgacgctgaatatacagaacaagatacctgctcagacaaagtcacctgaagaaactgataaagagaaagttcacctctctgactcagaaaggaaaatggacccagccgaagaggatacaaatgtgtatactgagaaacactcagacagtctgtttaaacggacagaagtcctagcagctgtcattgctggtggagttattggctttctctttgcaatttttcttatcctgctgttggtgtatcgcatgagaaagaaggatgaaggaagctatgaccttggagaacgcaaaccatccagtgctgcttatcagaaggcacctactaaggagttttatgcgtaaaactccaacttagtgtctctatttatgagatcactgaacttttcaaaataaagcttttgcatagaataatgaagatctttgttttttgttttcattaaagagccattctggcactttaatgataaaatcccattgtatttaaaacatttcatgtatttctttagaacaacataaaattaaaatttaacatctgcagtgttctgtgaatagcagtggcaaaatattatgttatgaaaaccctcgatgttcatggaattggtttaaacttttatgcgcaaatacaaaatgattgtctttttcctatgactcaaagatgaaagctgtttcatttgtgtcagcatgtctcagattgaccttaccaagttggtcttactttgttaatttatctgttgtccccttcctctcctctgccctcccttcttgtgcccttaaaaccaaaccctatgccttttgtagctgtcatggtgcaatttgtctttggaaaattcagataatggtaatttagtgtatatgtgattttcaaatatgtaaactttaacttccactttgtataaatttttaagtgtcagactatccattttacacttgctttatttttcattacctgtagctttgggcagatttgcaacagcaaattaatgtgtaaaattggattattactacaaaaccgtttagtcatatctatctaatcagatcttcttttgggaggatttgatgtaagttactgacaagcctcagcaaacccaaagatgttaacagtattttaagaagttgctgcagattcctttggccactgtatttgttaatttcttgcaatttgaaggtacgagtagaggtttaaagaaaaatcagtttttgttcttaaaaatgcatttaagttgtaaacgtctttttaagcctttgaagtgcctctgattctatgtaacttgttgcagactggtgttaatgagtatatgtaacagtttaaaaaaaaagttggtattttataagcacagacaattctaatggtaacttttgtagtcttatgaatagacataaattgtaatttgggaacataaaaactactgaataaatcatgtggcctaatattgaaaatgtcactgttataaattttgtacatttttgatcaaatgtacatctcccctttgctaacggccgtctgctctcaaggatgacgtgggtttgatttctaagtgtttcacagtgtctgtaaatcaagaccaaagagcctgtcgatgagactgtttattaccagattcacttctgaattggccagaggaaatctgaatgtattatcctgtgtgtgtctaggtagagatattggaaggctgccaggggatttcgaagtttgcaacctttataggataactgatggcaatattaagacagacgcctgcttttgcaaataacttacaagactgtaaattccaaagatctgaatggggctttcctgatgttggtatctaaggcttaggcctatagattgatttacctttggaattgtgctccaaatgtctactgaagcttaaccgaagaactaataaatggactacagtagctcacgttacagggaaggagggtaggcagggaggctctgtgtgttaaaatgagggtctcactgctttaggattgaagtggctggaaagagtgatgcctggggaaggagatggagttatgagggtactgtggctggtactttctgtactaaacatttcctttttctattttaccactaattttgttttaaactgtgagccgtccaagtcagaagaagacagcaaaaaaagcaacttttccaacatacaatttacttttaataaagtatgaatatttcattttgagaacattccctggaattgccacataattcattaaaaacatttttttaagcaacacttggaacagtgtttactttaaatccttaatggccttaattaattctcagattcctgccccatcacttacagaaccaattcactttagagtgactaaaaggaaacgatagcctagctttctaaagccacgctgtgtccctcaattacagagggtaggaatgggtatacctctaactgtgcaaagcagagtgaaattcaattcatagaataacaactgctgggaatatccgtgccaggaaaagaaaaatttctggcaaatattttgtcactgctgtaaagcaaaatatttgtgaaagtgccaaaataaagtctgtcatgccaaaagtaaatcattgtatagactgacatccagttttcttcaactgtacactttctgcttagttttttttttttaagatgcagtaaataatactataaaaagtgttagtaatgattactgagttcaggaaaattttggtaaaatgtaaatattaaagccaatgtgaaaattt

SEQ ID NO: 304197 - DNA, 3092 bp, Homo sapiens
ctagaacacaacggcggtcaagggagaggacgcagaaagatcaggctcaggcctgggtcttgggcatcttcaaggaactcgctttctcagtggtataagaagagccccactctataagaggcatccaacaggaacagccaacatcagtggcaccttccaaagagcagagctgacatctgataaagacatgtaccttgacaacagctccattgaagaagcttcaggagtgtatcctattgatgacgatgactacgcttctgcgtctggctcgggagctgatgaggatgtagagagtccagagctgacaacatctcgaccacttccaaagatactgttgactagtgctgctccaaaagtggaaaccacgacgctgaatatacagaacaagatacctgctcagacaaagtcacctgaagaaactgataaagagaaagttcacctctctgactcagaaaggaaaatggacccagccgaagaggatacaaatgtgtatactgagaaacactcagacagtctgtttaaacggacagaagtcctagcagctgtcattgctggtggagttattggctttctctttgcaatttttcttatcctgctgttggtgtatcgcatgagaaagaaggatgaaggaagctatgaccttggagaacgcaaaccatccagtgctgcttatcagaaggcacctactaaggagttttatgcgtaaaactccaacttagtgtctctatttatgagatcactgaacttttcaaaataaagcttttgcatagaataatgaagatctttgttttttgttttcattaaagagccattctggcactttaatgataaaatcccattgtatttaaaacatttcatgtatttctttagaacaacataaaattaaaatttaacatctgcagtgttctgtgaatagcagtggcaaaatattatgttatgaaaaccctcgatgttcatggaattggtttaaacttttatgcgcaaatacaaaatgattgtctttttcctatgactcaaagatgaaagctgtttcatttgtgtcagcatgtctcagattgaccttaccaagttggtcttactttgttaatttatctgttgtccccttcctctcctctgccctcccttcttgtgcccttaaaaccaaaccctatgccttttgtagctgtcatggtgcaatttgtctttggaaaattcagataatggtaatttagtgtatatgtgattttcaaatatgtaaactttaacttccactttgtataaatttttaagtgtcagactatccattttacacttgctttatttttcattacctgtagctttgggcagatttgcaacagcaaattaatgtgtaaaattggattattactacaaaaccgtttagtcatatctatctaatcagatcttcttttgggaggatttgatgtaagttactgacaagcctcagcaaacccaaagatgttaacagtattttaagaagttgctgcagattcctttggccactgtatttgttaatttcttgcaatttgaaggtacgagtagaggtttaaagaaaaatcagtttttgttcttaaaaatgcatttaagttgtaaacgtctttttaagcctttgaagtgcctctgattctatgtaacttgttgcagactggtgttaatgagtatatgtaacagtttaaaaaaaaagttggtattttataagcacagacaattctaatggtaacttttgtagtcttatgaatagacataaattgtaatttgggaacataaaaactactgaataaatcatgtggcctaatattgaaaatgtcactgttataaattttgtacatttttgatcaaatgtacatctcccctttgctaacggccgtctgctctcaaggatgacgtgggtttgatttctaagtgtttcacagtgtctgtaaatcaagaccaaagagcctgtcgatgagactgtttattaccagattcacttctgaattggccagaggaaatctgaatgtattatcctgtgtgtgtctaggtagagatattggaaggctgccaggggatttcgaagtttgcaacctttataggataactgatggcaatattaagacagacgcctgcttttgcaaataacttacaagactgtaaattccaaagatctgaatggggctttcctgatgttggtatctaaggcttaggcctatagattgatttacctttggaattgtgctccaaatgtctactgaagcttaaccgaagaactaataaatggactacagtagctcacgttacagggaaggagggtaggcagggaggctctgtgtgttaaaatgagggtctcactgctttaggattgaagtggctggaaagagtgatgcctggggaaggagatggagttatgagggtactgtggctggtactttctgtactaaacatttcctttttctattttaccactaattttgttttaaactgtgagccgtccaagtcagaagaagacagcaaaaaaagcaacttttccaacatacaatttacttttaataaagtatgaatatttcattttgagaacattccctggaattgccacataattcattaaaaacatttttttaagcaacacttggaacagtgtttactttaaatccttaatggccttaattaattctcagattcctgccccatcacttacagaaccaattcactttagagtgactaaaaggaaacgatagcctagctttctaaagccacgctgtgtccctcaattacagagggtaggaatgggtatacctctaactgtgcaaagcagagtgaaattcaattcatagaataacaactgctgggaatatccgtgccaggaaaagaaaaatttctggcaaatattttgtcactgctgtaaagcaaaatatttgtgaaagtgccaaaataaagtctgtcatgccaaaagtaaatcattgtatagactgacatccagttttcttcaactgtacactttctgcttagttttttttttttaagatgcagtaaataatactataaaaagtgttagtaatgattactgagttcaggaaaattttggtaaaatgtaaatattaaagccaatgtgaaaattt

SEQ ID NO: 304198 - DNA, 3544 bp, Homo sapiens
gagcccggagaagcaggctcaggagggagggagccagaggaaaagaagaggaggagaaggaggaggacccggggagggaggcgcggcgcgggaggaggaggggcgcagccgcggagccagtggccccgcttggacgcgctgctctccagatacccccggagctccagccgcgcggatcgcgcgctcccgccgctctgcccctaaacttctgccgtagctccctttcaagccagcgaatttattccttaaaaccagaaactgaacctcggcacgggaaaggagtccgcggaggagcaaaaccacagcagagcaagaagagcttcagagagcagccttcccggagcaccaactccgtgtcgggagtgcagaaaccaacaagtgagagggcgccgcgttcccggggcgcagctgcgggcggcgggagcaggcgcaggaggaggaagcgagcgcccccgagccccgagcccgagtccccgagcctgagccgcaatcgctgcggtactctgctccggattcgtgtgcgcgggctgcgccgagcgctgggcaggaggcttcgttttgccctggttgcaagcagcggctgggagcagccggtccctggggaatatgcggcgcgcgtggatcctgctcaccttgggcttggtggcctgcgtgtcggcggagtcgagagcagagctgacatctgataaagacatgtaccttgacaacagctccattgaagaagcttcaggagtgtatcctattgatgacgatgactacgcttctgcgtctggctcgggagctgatgaggatgtagagagtccagagctgacaacatctcgaccacttccaaagatactgttgactagtgctgctccaaaagtggaaaccacgacgctgaatatacagaacaagatacctgctcagacaaagtcacctgaagaaactgataaagagaaagttcacctctctgactcagaaaggaaaatggacccagccgaagaggatacaaatgtgtatactgagaaacactcagacagtctgtttaaacggacagaagtcctagcagctgtcattgctggtggagttattggctttctctttgcaatttttcttatcctgctgttggtgtatcgcatgagaaagaaggatgaaggaagctatgaccttggagaacgcaaaccatccagtgctgcttatcagaaggcacctactaaggagttttatgcgtaaaactccaacttagtgtctctatttatgagatcactgaacttttcaaaataaagcttttgcatagaataatgaagatctttgttttttgttttcattaaagagccattctggcactttaatgataaaatcccattgtatttaaaacatttcatgtatttctttagaacaacataaaattaaaatttaacatctgcagtgttctgtgaatagcagtggcaaaatattatgttatgaaaaccctcgatgttcatggaattggtttaaacttttatgcgcaaatacaaaatgattgtctttttcctatgactcaaagatgaaagctgtttcatttgtgtcagcatgtctcagattgaccttaccaagttggtcttactttgttaatttatctgttgtccccttcctctcctctgccctcccttcttgtgcccttaaaaccaaaccctatgccttttgtagctgtcatggtgcaatttgtctttggaaaattcagataatggtaatttagtgtatatgtgattttcaaatatgtaaactttaacttccactttgtataaatttttaagtgtcagactatccattttacacttgctttatttttcattacctgtagctttgggcagatttgcaacagcaaattaatgtgtaaaattggattattactactaagttactgacaagcctcagcaaacccaaagatgttaacagtattttaagaagttgctgcagattcctttggccactgtatttgttaatttcttgcaatttgaaggtacgagtagaggtttaaagaaaaatcagtttttgttcttaaaaatgcatttaagttgtaaacgtctttttaagcctttgaagtgcctctgattctatgtaacttgttgcagactggtgttaatgagtatatgtaacagtttaaaaaaaaagttggtattttataagcacagacaattctaatggtaacttttgtagtcttatgaatagacataaattgtaatttgggaacataaaaactactgaataaatcatgtggcctaatattgaaaatgtcactgttataaattttgtacatttttgatcaaatgtacatctcccctttgctaacggccgtctgctctcaaggatgacgtgggtttgatttctaagtgtttcacagtgtctgtaaatcaagaccaaagagcctgtcgatgagactgtttattaccagattcacttctgaattggccagaggaaatctgaatgtattatcctgtgtgtgtctaggtagagatattggaaggctgccaggggatttcgaagtttgcaacctttataggataactgatggcaatattaagacagacgcctgcttttgcaaataacttacaagactgtaaattccaaagatctgaatggggctttcctgatgttggtatctaaggcttaggcctatagattgatttacctttggaattgtgctccaaatgtctactgaagcttaaccgaagaactaataaatggactacagtagctcacgttacagggaaggagggtaggcagggaggctctgtgtgttaaaatgagggtctcactgctttaggattgaagtggctggaaagagtgatgcctggggaaggagatggagttatgagggtactgtggctggtactttctgtactaaacatttcctttttctattttaccactaattttgttttaaactgtgagccgtccaagtcagaagaagacagcaaaaaaagcaacttttccaacatacaatttacttttaataaagtatgaatatttcattttgagaacattccctggaattgccacataattcattaaaaacatttttttaagcaacacttggaacagtgtttactttaaatccttaatggccttaattaattctcagattcctgccccatcacttacagaaccaattcactttagagtgactaaaaggaaacgatagcctagctttctaaagccacgctgtgtccctcaattacagagggtaggaatgggtatacctctaactgtgcaaagcagagtgaaattcaattcatagaataacaactgctgggaatatccgtgccaggaaaagaaaaatttctggcaaatattttgtcactgctgtaaagcaaaatatttgtgaaagtgccaaaataaagtctgtcatgccaaaagtaaatcattgtatagactgacatccagttttcttcaactgtacactttctgcttagttttttttttttaagatgcagtaaataatactataaaaagtgttagtaatgattactgagttcaggaaaattttggtaaaatgtaaatattaaagccaatgtgaaaattt

SEQ ID NO: 304199 - DNA, 2557 bp, Homo sapiens
  misc_feature (2493)..(2493): n is a, c, g, or t
gagcccggagaagcaggctcaggagggagggagccagaggaaaagaagaggaggagaaggaggaggacccggggagggaggcgcggcgcgggaggaggaggggcgcagccgcggagccagtggccccgcttggacgcgctgctctccagatacccccggagctccagccgcgcggatcgcgcgctcccgccgctctgcccctaaacttctgccgtagctccctttcaagccagcgaatttattccttaaaaccagaaactgaacctcggcacgggaaaggagtccgcggaggagcaaaaccacagcagagcaagaagagcttcagagagcagccttcccggagcaccaactccgtgtcgggagtgcagaaaccaacaagtgagagggcgccgcgttcccggggcgcagctgcgggcggcgggagcaggcgcaggaggaggaagcgagcgcccccgagccccgagcccgagtccccgagcctgagccgcaatcgctgcggtactctgctccggattcgtgtgcgcgggctgcgccgagcgctgggcaggaggcttcgttttgccctggttgcaagcagcggctgggagcagccggtccctggggaatatgcggcgcgcgtggatcctgctcaccttgggcttggtggcctgcgtgtcggcggagtcgagagcagagctgacatctgataaagacatgtaccttgacaacagctccattgaagaagcttcaggagtgtatcctattgatgacgatgactacgcttctgcgtctggctcgggagctgatgaggatgtagagagtccagagctgacaacatctcgaccacttccaaagatactgttgactagtgctgctccaaaagtggaaaccacgacgctgaatatacagaacaagatacctgctcagacaaagtcacctgaagaaactgataaagagaaagttcacctctctgactcagaaaggaaaatggacccagccgaagaggatacaaatgtgtatactgagaaacactcagacagtctgtttaaacggacagaagtcctagcagctgtcattgctggtggagttattggctttctctttgcaatttttcttatcctgctgttggtgtatcgcatgagaaagaaggatgaaggaagctatgaccttggagaacgcaaaccatccagtgctgcttatcagaaggcacctactaaggagttttatgcgtaaaactccaacttagtgtctctatttatgagatcactgaacttttcaaaataaagcttttgcatagaataatgaagatctttgttttttgttttcattaaagagccattctggcactttaatgataaaatcccattgtatttaaaacatttcatgtatttctttagaacaacataaaattaaaatttaacatctgcagtgttctgtgaatagcagtggcaaaatattatgttatgaaaaccctcgatgttcatggaattggtttaaacttttatgcgcaaatacaaaatgattgtctttttcctatgactcaaagatgaaagctgtttcatttgtgtcagcatgtctcagattgaccttaccaagttggtcttactttgttaatttatctgttgtccccttcctctcctctgccctcccttcttgtgcccttaaaaccaaaccctatgccttttgtagctgtcatggtgcaatttgtctttggaaaattcagataatggtaatttagtgtatatgtgattttcaaatatgtaaactttaacttccactttgtataaatttttaagtgtcagactatccattttacacttgctttatttttcattacctgtagctttgggcagatttgcaacagcaaattaatgtgtaaaattggattattactacaaaaccgtttagtcatatctatctaatcagatcttcttttgggaggatttgatgtaagttactgacaagcctcagcaaacccaaagatgttaacagtattttaagaagttgctgcagattcctttggccactgtatttgttaatttcttgcaatttgaaggtacgagtagaggtttaaagaaaaatcagtttttgttcttaaaaatgcatttaagttgtaaacgtctttttaagcctttgaagtgcctctgattctatgtaacttgttgcagactggtgttaatgagtatatgtaacagtttaaaaaaaaagttggtattttataagcacagacaattctaatggtaacttttgtagtcttatgaatagacataaattgtaatttgggaacataaaaactactgaataaatcatgtggcctaatataaaaaaaaaaaaaaaaaaaaaaaaaaaaaaaaaaaaaaaaaaaaaaaaaaaaaaaaaaaaaaaaaaaaaaaaaaaaaaaaaaaaaaaaacaaaaaaaaaaaaaaaaaacaaaaaaaaaaaaaaacaaaaaaaccaaaccaacacaaacccaaaacacccaacacaacaaccaaccccaaaaaaaaacacccncccccccacacaaaccacccccccttcccctcaacccctcctcccacacccttcccatcgggct

SEQ ID NO: 304200 - DNA, 2435 bp, Homo sapiens
gagcccggagaagcaggctcaggagggagggagccagaggaaaagaagaggaggagaaggaggaggacccggggagggaggcgcggcgcgggaggaggaggggcgcagccgcggagccagtggccccgcttggacgcgctgctctccagatacccccggagctccagccgcgcggatcgcgcgctcccgccgctctgcccctaaacttctgccgtagctccctttcaagccagcgaatttattccttaaaaccagaaactgaacctcggcacgggaaaggagtccgcggaggagcaaaaccacagcagagcaagaagagcttcagagagcagccttcccggagcaccaactccgtgtcgggagtgcagaaaccaacaagtgagagggcgccgcgttcccggggcgcagctgcgggcggcgggagcaggcgcaggaggaggaagcgagcgcccccgagccccgagcccgagtccccgagcctgagccgcaatcgctgcggtactctgctccggattcgtgtgcgcgggctgcgccgagcgctgggcaggaggcttcgttttgccctggttgcaagcagcggctgggagcagccggtccctggggaatatgcggcgcgcgtggatcctgctcaccttgggcttggtggcctgcgtgtcggcggagtcgagagcagagctgacatctgataaagacatgtaccttgacaacagctccattgaagaagcttcaggagtgtatcctattgatgacgatgactacgcttctgcgtctggctcgggagctgatgaggatgtagagagtccagagctgacaacatctcgaccacttccaaagatactgttgactagtgctgctccaaaagtggaaaccacgacgctgaatatacagaacaagatacctgctcagacaaagtcacctgaagaaactgataaagagaaagttcacctctctgactcagaaaggaaaatggacccagccgaagaggatacaaatgtgtatactgagaaacactcagacagtctgtttaaacggacagaagtcctagcagctgtcattgctggtggagttattggctttctctttgcaatttttcttatcctgctgttggtgtatcgcatgagaaagaaggatgaaggaagctatgaccttggagaacgcaaaccatccagtgctgcttatcagaaggcacctactaaggagttttatgcgtaaaactccaacttagtgtctctatttatgagatcactgaacttttcaaaataaagcttttgcatagaataatgaagatctttgttttttgttttcattaaagagccattctggcactttaatgataaaatcccattgtatttaaaacatttcatgtatttctttagaacaacataaaattaaaatttaacatctgcagtgttctgtgaatagcagtggcaaaatattatgttatgaaaaccctcgatgttcatggaattggtttaaacttttatgcgcaaatacaaaatgattgtctttttcctatgactcaaagatgaaagctgtttcatttgtgtcagcatgtctcagattgaccttaccaagttggtcttactttgttaatttatctgttgtccccttcctctcctctgccctcccttcttgtgcccttaaaaccaaaccctatgccttttgtagctgtcatggtgcaatttgtctttggaaaattcagataatggtaatttagtgtatatgtgattttcaaatatgtaaactttaacttccactttgtataaatttttaagtgtcagactatccattttacacttgctttatttttcattacctgtagctttgggcagatttgcaacagcaaattaatgtgtaaaattggattattactacaaaaccgtttagtcatatctatctaatcagatcttcttttgggaggatttgatgtaagttactgacaagcctcagcaaacccaaagatgttaacagtattttaagaagttgctgcagattcctttggccactgtatttgttaatttcttgcaatttgaaggtacgagtagaggtttaaagaaaaatcagtttttgttcttaaaaatgcatttaagttgtaaacgtctttttaagcctttgaagtgcctctgattctatgtaacttgttgcagactggtgttaatgagtatatgtaacagtttaaaaaaaaagttggtattttataagcacagacaattctaatggtaacttttgtagtcttatgaatagacataaattgtaatttgggaacataaaaactactgaataaatcatgtggcctaatattctgtgcttataaaataccaactttttttttaaactgttacatatactcattaacaccagtctgcaacaagttacatagaatcagaggctcttcggaggcttaaaaagacgtttacaacttaaatgcattttta

SEQ ID NO: 304201 - DNA, 2300 bp, Homo sapiens
aagcttgatatcgaattcggcacgagctcgtgccgtttaatacaatgggattttaaaacatttcatgtatttctttagaacaacataaaattaaaatttaacatctgcagtgttctgtgaatagcagtggcaaaatattatgttatgaaaaccctcgatgttcatggaattggtttaaacttttatgcgcaaatacaaaatgattgtctttttcctatgactcaaagatgaaagctgtttcatttgtgtcagcatgtctcagattgaccttaccaagttggtcttactttgttaatttatctgttgtccccttcctctcctctgccctcccttcttgtgcccttaaaaccaaaccctatgccttttgtagctgtcatggtgcaatttgtctttggaaaattcagataatggtaatttagtgtatatgtgattttcaaatatgtaaactttaacttccactttgtataaatttttaagtgtcagactatccattttacacttgctttatttttcattacctgtagctttgggcagatttgcaacagcaaattaatgtgtaaaattggattattactacaaaaccgtttagtcatatctatctaatcagatcttcttttgggaggatttgatgtaagttactgacaagcctcagcaaacccaaagatgttaacagtattttaagaagttgctgcagattcctttggccactgtatttgttaatttcttgcaatttgaaggtacgagtagaggtttaaagaaaaatcagtttttgttcttaaaaatgcatttaagttgtaaacgtctttttaagcctttgaagtgcctctgattctatgtaacttgttgcagactggtgttaatgagtatatgtaacagtttaaaaaaaaagttggtattttataagcacagacaattctaatggtaacttttgtagtcttatgaatagacataaattgtaatttgggaacataaaaactactgaataaatcatgtggcctaatattgaaaatgtcactgttataaattttgtacatttttgatcaaatgtacatctcccctttgctaacggccgtctgctctcaaggatgacgtgggtttgatttctaagtgtttcacagtgtctgtaaatcaagaccaaagagcctgtcgatgagactgtttattaccagattcacttctgaattggccagaggaaatctgaatgtattatcctgtgtgtgtctaggtagagatattggaaggctgccaggggatttcgaagtttgcaacctttataggataactgatggcaatattaagacagacgcctgcttttgcaaataacttacaagactgtaaattccaaagatctgaatggggctttcctgatgttggtatctaaggcttaggcctatagattgatttacctttggaattgtgctccaaatgtctactgaagcttaaccgaagaactaataaatggactacagtagctcacgttacagggaaggagggtaggcagggaggctctgtgtgttaaaatgagggtctcactgctttaggattgaagtggctggaaagagtgatgcctggggaaggagatggagttatgagggtactgtggctggtactttctgtactaaacatttcctttttctattttaccactaattttgttttaaactgtgagccgtccaagtcagaagaagacagcaaaaaaagcaacttttccaacatacaatttacttttaataaagtatgaatatttcattttgagaacattccctggaattgccacataattcattaaaaacatttttttaagcaacacttggaacagtgtttactttaaatccttaatggccttaattaattctcagattcctgccccatcacttacagaaccaattcactttagagtgactaaaaggaaacgatagcctagctttctaaagccacgctgtgtccctcaattacagagggtaggaatgggtatacctctaactgtgcaaagcagagtgaaattcaattcatagaataacaactgctgggaatatccgtgccaggaaaagaaaaatttctggcaaatattttgtcactgctgtaaagcaaaatatttgtgaaagtgccaaaataaagtctgtcatgccaaaagtaaatcattgtatagactgacatccagttttcttcaactgtacactttctgcttagttttttttttttaagatgcagtaaataatactataaaaagtgttagtaatgattactgagttcaggaaaattttggtaaaatgtaaatattaaagccaatgtgaaaattt

SEQ ID NO: 304202 - DNA, 1968 bp, Homo sapiens
ccggaccggtacttaaaaattacctatgccttttgtagctgtcatggtgcaatttgtctttggaaaattcagataatggtaatttagtgtatatgtgattttcaaatatgtaaactttaacttccactttgtataaatttttaagtgtcagactatccattttacacttgctttatttttcattacctgtagctttgggcagatttgcaacagcaaattaatgtgtaaaattggattattactacaaaaccgtttagtcatatctatctaatcagatcttcttttgggaggatttgatgtaagttactgacaagcctcagcaaacccaaagatgttaacagtattttaagaagttgctgcagattcctttggccactgtatttgttaatttcttgcaatttgaaggtacgagtagaggtttaaagaaaaatcagtttttgttcttaaaaatgcatttaagttgtaaacgtctttttaagcctttgaagtgcctctgattctatgtaacttgttgcagactggtgttaatgagtatatgtaacagtttaaaaaaaaagttggtattttataagcacagacaattctaatggtaacttttgtagtcttatgaatagacataaattgtaatttgggaacataaaaactactgaataaatcatgtggcctaatattgaaaatgtcactgttataaattttgtacatttttgatcaaatgtacatctcccctttgctaacggccgtctgctctcaaggatgacgtgggtttgatttctaagtgtttcacagtgtctgtaaatcaagaccaaagagcctgtcgatgagactgtttattaccagattcacttctgaattggccagaggaaatctgaatgtattatcctgtgtgtgtctaggtagagatattggaaggctgccaggggatttcgaagtttgcaacctttataggataactgatggcaatattaagacagacgcctgcttttgcaaataacttacaagactgtaaattccaaagatctgaatggggctttcctgatgttggtatctaaggcttaggcctatagattgatttacctttggaattgtgctccaaatgtctactgaagcttaaccgaagaactaataaatggactacagtagctcacgttacagggaaggagggtaggcagggaggctctgtgtgttaaaatgagggtctcactgctttaggattgaagtggctggaaagagtgatgcctggggaaggagatggagttatgagggtactgtggctggtactttctgtactaaacatttcctttttctattttaccactaattttgttttaaactgtgagccgtccaagtcagaagaagacagcaaaaaaagcaacttttccaacatacaatttacttttaataaagtatgaatatttcattttgagaacattccctggaattgccacataattcattaaaaacatttttttaagcaacacttggaacagtgtttactttaaatccttaatggccttaattaattctcagattcctgccccatcacttacagaaccaattcactttagagtgactaaaaggaaacgatagcctagctttctaaagccacgctgtgtccctcaattacagagggtaggaatgggtatacctctaactgtgcaaagcagagtgaaattcaattcatagaataacaactgctgggaatatccgtgccaggaaaagaaaaatttctggcaaatattttgtcactgctgtaaagcaaaatatttgtgaaagtgccaaaataaagtctgtcatgccaaaagtaaatcattgtatagactgacatccagttttcttcaactgtacactttctgcttagttttttttttttaagatgcagtaaataatactataaaaagtgttagtaatgattactgagttcaggaaaattttggtaaaatgtaaatattaaagccaatgtgaaaattt

SEQ ID NO: 304203 - DNA, 1612 bp, Homo sapiens
gagcccggagaagcaggctcaggagggagggagccagaggaaaagaagaggaggagaaggaggaggacccggggagggaggcgcggcgcgggaggaggaggggcgcagccgcggagccagtggccccgcttggacgcgctgctctccagatacccccggagctccagccgcgcggatcgcgcgctcccgccgctctgcccctaaacttctgccgtagctccctttcaagccagcgaatttattccttaaaaccagaaactgaacctcggcacgggaaaggagtccgcggaggagcaaaaccacagcagagcaagaagagcttcagagagcagccttcccggagcaccaactccgtgtcgggagtgcagaaaccaacaagtgagagggcgccgcgttcccggggcgcagctgcgggcggcgggagcaggcgcaggaggaggaagcgagcgcccccgagccccgagcccgagtccccgagcctgagccgcaatcgctgcggtactctgctccggattcgtgtgcgcgggctgcgccgagcgctgggcaggaggcttcgttttgccctggttgcaagcagcggctgggagcagccggtccctggggaatatgcggcgcgcgtggatcctgctcaccttgggcttggtggcctgcgtgtcggcggagtcgagagcagagctgacatctgataaagacatgtaccttgacaacagctccattgaagaagcttcaggagtgtatcctattgatgacgatgactacgcttctgcgtctggctcgggagctgatgaggatgtagagagtccagagctgacaacatctcgaccacttccaaagatactgttgactagtgctgctccaaaagtggaaaccacgacgctgaatatacagaacaagatacctgctcagacaaagtcacctgaagaaactgataaagagaaagttcacctctctgactcagaaaggaaaatggacccagccgaagaggatacaaatgtgtatactgagaaacactcagacagtctgtttaaacggacagaagtcctagcagctgtcattgctggtggagttattggctttctctttgcaatttttcttatcctgctgttggtgtatcgcatgagaaagaaggatgaaggaagctatgaccttggagaacgcaaaccatccagtgctgcttatcagaaggcacctactaaggagttttatgcgtaaaactccaacttagtgtctctatttatgagatcactgaacttttcaaaataaagcttttgcatagaataaaaaaaaaaaaaaaccctggacccttgcccaatttgggggccccccgggccgcccgaataaccccaagggggagcgcaggaccgaaaggagggggtggagaccttcgcggacccggctacccgggggctcccttccaaagacttcggccgcctgcgggggacgcggagttgtgtcccgcccaacccttcactatactcaacagggtttaaccatcccggacgtacccggcatgaacacagaaggagttactatgcccgggggccccgcagatatctgcgaactcacgcgatcacctcatgccctaaaaaatctagaccggaatacttctaga

SEQ ID NO: 304204 - DNA, 1911 bp, Homo sapiens
ctttttatcattggactcatcatttaatcttgatttccagcttctcacacttgaaagaagacataatacatttctcacaggattctgggactattaactgaacttatgtgtgtaaaaggaattcatacaatgaaagcactagaaataattattatacttataaccattgtatttttacatgtttaaaatatagccataattagcctactcaaatccaagtgtaaaagtaaaatgatttgctttcgttttgttttccttgcttaggggatcatggacattgaagcatatcttgaaagaattggctataagaagtctaggaacaaattggacttggaaacattaactgacattcttcaacaccagatccgagctgttccctttgagaaccttaacatccattgtggggatgccatggacttaggcttagaggccatttttgatcaagttgtgagaagaaatcggggtggatggtgtctccaggtcaatcatcttctgtactgggctctgaccactattggttttgagaccacgatgttgggagggtatgtttacagcactccagccaaaaaatacagcactggcatgattcaccttctcctgcaggtgaccattgatggcaggaactacattgtcgatgctgggtttggacgctcataccagatgtggcagcctctggagttaatttctgggaaggatcagcctcaggtgccttgtgtcttccgtttgacggaagagaatggattctggtatctagaccaaatcagaagggaacagtacattccaaatgaagaatttcttcattctgatctcctagaagacagcaaataccgaaaaatctactcctttactcttaagcctcgaacaattgaagattttgagtctatgaatacatacctgcagacatctccatcatctgtgtttactagtaaatcattttgttccttgcagaccccagatggggttcactgtttggtgggcttcaccctcacccataggagattcaattataaggacaatacagatctaatagagttcaagactctgagtgaggaagaaatagaaaaagtgctgaaaaatatatttaatatttccttgcagagaaagcttgtgcccaaacatggtgatagattttttactatttagaataaggagtaaaacaatcttgtctatttgtcatccagctcaccagttatcaactgacgacctatcatgtatcttctgtacccttaccttattttgaagaaaatcctagacatcaaatcatttcacctataaaaatgtcatcatatataattaaacagctttttaaagaaacataaccacaaaccttttcaaataataataataataataataataaatgtcttttaaagatggcctgtggttatcttggaaattggtgatttatgctagaaagcttttaatgttggtttattgttgaattcctagaaaagttttatgggtagatgagtaaataaaatattgtaaaaaaacttattgtctataaagtatattaaaacattgttggctaatataatttgaaaaaaagtggttttttggaagacttaggatattatggtgctacataatttttcctcgatgctctcttcctctcatctttcttgtctcttaaattactttacttccttgcacactttgccatacaagaatgaacatgagcttttcttgtgtagatctgagttgaaatcctgtggacactgggcgaattactttttagatctgtagctctgactcctcaggcataaaatgggaataatgcttttacagtttagtggcggaactaaactcccaaaattatttgttatatggatcaagtaataacgtcagtaatgtttttggtacaaagtcattatttaataaaagttattgttccatcttgcttgccccccc

SEQ ID NO: 304205 - DNA, 326 bp, Homo sapiens
ttcccctgcagactttggaagtgagagcacttcctcatagaccttggatgtgggaggattgcattcagtctagttcctggttgccggctgaaataacctgacgtgtacagaagggccatgctgttattactcttacacaaggaggcagccctcgagccacagggtccagctgttggctataatagcctaccggtctctgatgatcaccatgtttctggaattcaagccaggaagaagcagcaatctgtcttctggattaaaactgaagatcaacctactttcaacttactaagaaaggtattaagcgcctttctgagagctctcag

SEQ ID NO: 304206 - DNA, 1826 bp, Homo sapiens
ttcccctgcagactttggaagtgagagcacttcctcatagaccttggatgtgggaggattgcattcagtctagttcctggttgccggctgaaataacctgaattcaagccaggaagaagcagcaatctgtcttctggattaaaactgaagatcaacctactttcaacttactaagaaaggggatcatggacattgaagcatatcttgaaagaattggctataagaagtctaggaacaaattggacttggaaacattaactgacattcttcaacaccagatccgagctgttccctttgagaaccttaacatccattgtggggatgccatggacttaggcttagaggccatttttgatcaagttgtgagaagaaatcggggtggatggtgtctccaggtcaatcatcttctgtactgggctctgaccactattggttttgagaccacgatgttgggagggtatgtttacagcactccagccaaaaaatacagcactggcatgattcaccttctcctgcaggtgaccattgatggcaggaactacattgtcgatgctgggtttggacgctcataccagatgtggcagcctctggagttaatttctgggaaggatcagcctcaggtgccttgtgtcttccgtttgacggaagagaatggattctggtatctagaccaaatcagaagggaacagtacattccaaatgaagaatttcttcattctgatctcctagaagacagcaaataccgaaaaatctactcctttactcttaagcctcgaacaattgaagattttgagtctatgaatacatacctgcagacatctccatcatctgtgtttactagtaaatcattttgttccttgcagaccccagatggggttcactgtttggtgggcttcaccctcacccataggagattcaattataaggacaatacagatctaatagagttcaagactctgagtgaggaagaaatagaaaaagtgctgaaaaatatatttaatatttccttgcagagaaagcttgtgcccaaacatggtgatagattttttactatttagaataaggagtaaaacaatcttgtctatttgtcatccagctcaccagttatcaactgacgacctatcatgtatcttctgtacccttaccttattttgaagaaaatcctagacatcaaatcatttcacctataaaaatgtcatcatatataattaaacagctttttaaagaaacataaccacaaaccttttcaaataataataataataataataataaatgtcttttaaagatggcctgtggttatcttggaaattggtgatttatgctagaaagcttttaatgttggtttattgttgaattcctagaaaagttttatgggtagatgagtaaataaaatattgtaaaaaaacttattgtctataaagtatattaaaacattgttggctaatataatttgaaaaaaagtggttttttggaagacttaggatattatggtgctacataatttttcctcgatgctctcttcctctcatctttcttgtctcttaaattactttacttccttgcacactttgccatacaagaatgaacatgagcttttcttgtgtagatctgagttgaaatcctgtggacactgggcgaattactttttagatctgtagctctgactcctcaggcataaaatgggaataatgcttttacagtttagtggcggaactaaactcccaaaattatttgttatatggatcaagtaataacgtcagtaatgtttttggtacaaagtcattatttaataaaagttattgttccatcttgcttgccccccc

SEQ ID NO: 304207 - DNA, 2210 bp, Homo sapiens
ttcccctgcagactttggaagtgagagcacttcctcatagaccttggatgtgggaggattgcattcagtctagttcctggttgccggctgaaataacctgctctccaaaatgtccacaaaagtgacttaagtcaggttcccccaaaccagacaccaagacaagaatccatgtgtgtgtgactgaaggaagtgctgggagagccccagctgcagcctggatgtgaactgcaactccaaagtgtgtccagactcaaggcaagggcactaggctttccagacctcctactaagtcattgatccagcactgccctgccaggacataaatccctggcacctcttgctctctgcaaaggagggcaaagcagcttcaggagcccttgggagtcctccaaagagagtctagggtacaggtccgaaagtagaagaacacagaaggcaggccaggggcactgtgagatggtaaaagagatctgaagggatccagaattcaagccaggaagaagcagcaatctgtcttctggattaaaactgaagatcaacctactttcaacttactaagaaaggggatcatggacattgaagcatatcttgaaagaattggctataagaagtctaggaacaaattggacttggaaacattaactgacattcttcaacaccagatccgagctgttccctttgagaaccttaacatccattgtggggatgccatggacttaggcttagaggccatttttgatcaagttgtgagaagaaatcggggtggatggtgtctccaggtcaatcatcttctgtactgggctctgaccactattggttttgagaccacgatgttgggagggtatgtttacagcactccagccaaaaaatacagcactggcatgattcaccttctcctgcaggtgaccattgatggcaggaactacattgtcgatgctgggtttggacgctcataccagatgtggcagcctctggagttaatttctgggaaggatcagcctcaggtgccttgtgtcttccgtttgacggaagagaatggattctggtatctagaccaaatcagaagggaacagtacattccaaatgaagaatttcttcattctgatctcctagaagacagcaaataccgaaaaatctactcctttactcttaagcctcgaacaattgaagattttgagtctatgaatacatacctgcagacatctccatcatctgtgtttactagtaaatcattttgttccttgcagaccccagatggggttcactgtttggtgggcttcaccctcacccataggagattcaattataaggacaatacagatctaatagagttcaagactctgagtgaggaagaaatagaaaaagtgctgaaaaatatatttaatatttccttgcagagaaagcttgtgcccaaacatggtgatagattttttactatttagaataaggagtaaaacaatcttgtctatttgtcatccagctcaccagttatcaactgacgacctatcatgtatcttctgtacccttaccttattttgaagaaaatcctagacatcaaatcatttcacctataaaaatgtcatcatatataattaaacagctttttaaagaaacataaccacaaaccttttcaaataataataataataataataataaatgtcttttaaagatggcctgtggttatcttggaaattggtgatttatgctagaaagcttttaatgttggtttattgttgaattcctagaaaagttttatgggtagatgagtaaataaaatattgtaaaaaaacttattgtctataaagtatattaaaacattgttggctaatataatttgaaaaaaagtggttttttggaagacttaggatattatggtgctacataatttttcctcgatgctctcttcctctcatctttcttgtctcttaaattactttacttccttgcacactttgccatacaagaatgaacatgagcttttcttgtgtagatctgagttgaaatcctgtggacactgggcgaattactttttagatctgtagctctgactcctcaggcataaaatgggaataatgcttttacagtttagtggcggaactaaactcccaaaattatttgttatatggatcaagtaataacgtcagtaatgtttttggtacaaagtcattatttaataaaagttattgttccatcttgcttgccccccc

SEQ ID NO: 304208 - DNA, 1733 bp, Homo sapiens
acgagttagtctggtgcgctaataccgaatcagcagagagccgcacgtctctggataaactgagatcaactacttcactactagaagggatcatggacattgaagcatatcttgaaagaattggctataagaagtctaggaacaaattggacttggaaacattaactgacattcttcaacaccagatccgagctgttccctttgagaaccttaacatccattgtggggatgccatggacttaggcttagaggccatttttgatcaagttgtgagaagaaatcggggtggatggtgtctccaggtcaatcatcttctgtactgggctctgaccactattggttttgagaccacgatgttgggagggtatgtttacagcactccagccaaaaaatacagcactggcatgattcaccttctcctgcaggtgaccattgatggcaggaactacattgtcgatgctgggtttggacgctcataccagatgtggcagcctctggagttaatttctgggaaggatcagcctcaggtgccttgtgtcttccgtttgacggaagagaatggattctggtatctagaccaaatcagaagggaacagtacattccaaatgaagaatttcttcattctgatctcctagaagacagcaaataccgaaaaatctactcctttactcttaagcctcgaacaattgaagattttgagtctatgaatacatacctgcagacatctccatcatctgtgtttactagtaaatcattttgttccttgcagaccccagatggggttcactgtttggtgggcttcaccctcacccataggagattcaattataaggacaatacagatctaatagagttcaagactctgagtgaggaagaaatagaaaaagtgctgaaaaatatatttaatatttccttgcagagaaagcttgtgcccaaacatggtgatagattttttactatttagaataaggagtaaaacaatcttgtctatttgtcatccagctcaccagttatcaactgacgacctatcatgtatcttctgtacccttaccttattttgaagaaaatcctagacatcaaatcatttcacctataaaaatgtcatcatatataattaaacagctttttaaagaaacataaccacaaaccttttcaaataataataataataataataataaatgtcttttaaagatggcctgtggttatcttggaaattggtgatttatgctagaaagcttttaatgttggtttattgttgaattcctagaaaagttttatgggtagatgagtaaataaaatattgtaaaaaaacttattgtctataaagtatattaaaacattgttggctaatataatttgaaaaaaagtggttttttggaagacttaggatattatggtgctacataatttttcctcgatgctctcttcctctcatctttcttgtctcttaaattactttacttccttgcacactttgccatacaagaatgaacatgagcttttcttgtgtagatctgagttgaaatcctgtggacactgggcgaattactttttagatctgtagctctgactcctcaggcataaaatgggaataatgcttttacagtttagtggcggaactaaactcccaaaattatttgttatatggatcaagtaataacgtcagtaatgtttttggtacaaagtcattatttaataaaagttattgttccatcttgcttgccccccc

SEQ ID NO: 304209 - DNA, 1976 bp, Homo sapiens
ttcccctgcagactttggaagtgagagcacttcctcatagaccttggatgtgggaggattgcattcagtctagttcctggttgccggctgaaataacctgaccgagagcatcaccccctgaacatggacttgcagaattccacagaagagaggagactggcctagacagacagccccaggagctgagggcccaacaggctttctaccctggatgctgctcccatgccctgacatgaggcccactacaatgaattcaagccaggaagaagcagcaatctgtcttctggattaaaactgaagatcaacctactttcaacttactaagaaaggggatcatggacattgaagcatatcttgaaagaattggctataagaagtctaggaacaaattggacttggaaacattaactgacattcttcaacaccagatccgagctgttccctttgagaaccttaacatccattgtggggatgccatggacttaggcttagaggccatttttgatcaagttgtgagaagaaatcggggtggatggtgtctccaggtcaatcatcttctgtactgggctctgaccactattggttttgagaccacgatgttgggagggtatgtttacagcactccagccaaaaaatacagcactggcatgattcaccttctcctgcaggtgaccattgatggcaggaactacattgtcgatgctgggtttggacgctcataccagatgtggcagcctctggagttaatttctgggaaggatcagcctcaggtgccttgtgtcttccgtttgacggaagagaatggattctggtatctagaccaaatcagaagggaacagtacattccaaatgaagaatttcttcattctgatctcctagaagacagcaaataccgaaaaatctactcctttactcttaagcctcgaacaattgaagattttgagtctatgaatacatacctgcagacatctccatcatctgtgtttactagtaaatcattttgttccttgcagaccccagatggggttcactgtttggtgggcttcaccctcacccataggagattcaattataaggacaatacagatctaatagagttcaagactctgagtgaggaagaaatagaaaaagtgctgaaaaatatatttaatatttccttgcagagaaagcttgtgcccaaacatggtgatagattttttactatttagaataaggagtaaaacaatcttgtctatttgtcatccagctcaccagttatcaactgacgacctatcatgtatcttctgtacccttaccttattttgaagaaaatcctagacatcaaatcatttcacctataaaaatgtcatcatatataattaaacagctttttaaagaaacataaccacaaaccttttcaaataataataataataataataataaatgtcttttaaagatggcctgtggttatcttggaaattggtgatttatgctagaaagcttttaatgttggtttattgttgaattcctagaaaagttttatgggtagatgagtaaataaaatattgtaaaaaaacttattgtctataaagtatattaaaacattgttggctaatataatttgaaaaaaagtggttttttggaagacttaggatattatggtgctacataatttttcctcgatgctctcttcctctcatctttcttgtctcttaaattactttacttccttgcacactttgccatacaagaatgaacatgagcttttcttgtgtagatctgagttgaaatcctgtggacactgggcgaattactttttagatctgtagctctgactcctcaggcataaaatgggaataatgcttttacagtttagtggcggaactaaactcccaaaattatttgttatatggatcaagtaataacgtcagtaatgtttttggtacaaagtcattatttaataaaagttattgttccatcttgcttgccccccc

SEQ ID NO: 304210 - DNA, 1145 bp, Homo sapiens
ttcccctgcagactttggaagtgagagcacttcctcatagaccttggatgtgggaggattgcattcagtctagttcctggttgccggctgaaataacctgaattcaagccaggaagaagcagcaatctgtcttctggattaaaactgaagatcaacctactttcaacttactaagaaaggggatcatggacattgaagcatatcttgaaagaattggctataagaagtctaggaacaaattggacttggaaacattaactgacattcttcaacaccagatccgagctgttccctttgagaaccttaacatccattgtggggatgccatggacttaggcttagaggccatttttgatcaagttgtgagaagaaatcggggtggatggtgtctccaggtcaatcatcttctgtactgggctctgaccactattggttttgagaccacgatgttgggagggtatgtttacagcactccagccaaaaaatacagcactggcatgattcaccttctcctgcaggtgaccattgatggcaggaactacattgtcgatgctgggtttggacgctcataccagatgtggcagcctctggagttaatttctgggaaggatcagcctcaggtgccttgtgtcttccgtttgacggaagagaatggattctggtatctagaccaaatcagaagggaacagtacattccaaatgaagaatttcttcattctgatctcctagaagacagcaaataccgaaaaatctactcctttactcttaagcctcgaacaattgaagattttgagtctatgaatacatacctgcagacatctccatcatctgtgtttactagtaaatcattttgttccttgcagaccccagatggggttcactgtttggtgggcttcaccctcacccataggagattcaattataaggacaatacagatctaatagagttcaagactctgagtgaggaagaaatagaaaaagtgctgaaaaatatatttaatatttccttgcagagaaagcttgtgcccaaacatgataggtcgtcagttgataactggtgagctggatgacaaatagacaagattgttttactccttattctaaatagtaaaaaatctaacaccatgtttgggcacaagctttct

SEQ ID NO: 304211 - DNA, 711 bp, Homo sapiens
ttcccctgcagactttggaagtgagagcacttcctcatagaccttggatgtgggaggattgcattcagtctagttcctggttgccggctgaaataacctgaattcaagccaggaagaagcagcaatctgtcttctggattaaaactgaagatcaacctactttcaacttactaagaaaggggatcatggacattgaagcatatcttgaaagaattggctataagaagtctaggaacaaattggacttggaaacattaactgacattcttcaacaccagatccgagctgttccctttgagaaccttaacatccattgtggggatgccatggacttaggcttagaggccatttttgatcaagttgtgagaagaaatcggggtggatggtgtctccaggtcaatcatcttctgtactgggctctgaccactattggttttgagaccacgatgttgggagggtatgtttacagcactccagccaaaaaatacagcactggcatgattcaccttctcctgcaggtgaccattgatggcaggaactacattgtcgatgctgggtttggacgctcataccagatgtggcagcctctggagttaatttctgggaaggatcagcctcaggtgccttgtgtcttccgtttgacggaagagaatggatgtggtactaagccccctccccctcttccgtacctccaccctaggtgcgcctccc

SEQ ID NO: 304212 - DNA, 460 bp, Homo sapiens
cccaaagtgctgggattacaggcgtgagccaccacactagggacgaagttttattatggccgaaggacacttactggagagggtctccaggaggtatgaatgacaaaaacaattaactccttcaccgtcagaccgagagcatcaccccctgaacatggacttgcagaattccacagaagagaggagactggcctagacagacagccccaggagctgagggcccaacaggctttctaccctggatgctgctcccatgccctgacatgaggcccactacaatggtatacttgtatgctctttcctaattaagaaacaaacaaacaaaaaatcagacatactgtttgctcttgaatgcttgaaacacaaaacaggtgacaccaccttcctcctcaaaaggaactttttaactgtcaactttctacgtgcacgctgcccagagacttattttgtctggcccttg

SEQ ID NO: 304213 - DNA, 513 bp, Homo sapiens
ctgggaaccgggagtagtccaatcagctcttttaccaatgaacacttccttgtgatatagatgtttatggccgagaggatccagtatattaataaaatccctttttgtattcaatgagggaaacacataattttcatcaattagcagcttattggaatatctgcatgatggtttaacacttttaagtgttgactaaagattaattttacagaaaatagaaaaagaaatatgtttctgtctggaggaatgatttattgttgaccctaaattgaaatattttactagtggcttaatggaaagatgatgaaagatgatgaaattaatgtagaagcttaactagaaaatcaggtgacctgatatctacatctgtatccttcattggccacccagcattcattaatgaatcagatgatggaatagatcaagtttcctaggaacacagtgaatattaaaagaaaacaaagggagcctagcacctagaagacctagtttatatttcaaagtatatttgga

SEQ ID NO: 304214 - DNA, 377 bp, Homo sapiens
tacatctgtatccttcattggccacccagcattcattaatgaatcagatgatggaatagatcaagtttcctaggaacacagtgaatattaaaagaaaacaaagggagcctagcacctagaagacctagtttatatttcaaagtatatttggatgtaacccaattttaaacatttcctcacttgtctctcttaaagccttgccaacagcaaggacagagaaccaaaaatagtgtatatatgaataaatgcttattacagaatctgctgactggcacatgctttgtgtgtaatgggttctcataaacacttgttgaatgaacacacataagtgaaagagcatggctaggcttcatcccttggtcaaatatggggtgcta

SEQ ID NO: 304215 - DNA, 1084 bp, Homo sapiens
ggtgtaagtagctgattaagtgttagaatgcaaacagctagaatccatgtttcaggtattaagttttaaacaagtactaaaacagcttttgaaactcatatatttatagctttgccatgcattaatgcaatataaatttccttcctttacaggtggatgattgtggcttttctttgaatcatcctaatcagttcttttgtgagagccaacgtattctaaatggtggtaaagacataaagaaggaacctatccaaccagaaactcctcaacccaaaccaagtgtccagaaaaccaaggatgcatcatctgctctggcctctttaaattcctctctggaaatggatatggaaggactagaagattactttagtgaagattcttaggcagttttataaccctttttcctcaatagcctgtttcctgtttttaagattttgcctttgttgttgaaaaagggtttcactctgtcaccaaggcttagtgcagtgacacaattacagctgattgcagccttgaccttcccagctcaagtgatcctcctacctcagcctcccaagtagttgggaccacaggtgtgcacctcatatccagataatttttttcaatttttttttgtagaggtggggggtctccctatgttgcccaggcagatctcagactcctgggctcaagcgatcctcacacctcagcgtcccagagtgctgggattacagttgtgagccactgtgcctggcctttttttttttttaacctttttgtttaacttctctcttcactgcatcccaatccatctacaggcatgcacacttattaggaaaggaggtttgaggtaacaacagagactttcactatattttgctttgacagaaggaaagaggaggagtttctattaaaatctgtcacttgagtgatgtcatttaagtcctattttaggagataaaaacagctttggggactggttaaagtcccccagaaactacaataaagaacaacttttgttttaactcttaatcactttgtaattttgactcaatccttttctggaccatttttgttaataaatatcaaagtgtaaaagacagtg

SEQ ID NO: 304216 - DNA, 2325 bp, Homo sapiens
ctcttccggtttcatatgaactctcccgccacccgggaacagtggctgccaccgtttgtgttttcccgagtttgaattcttgcaggtgaccaagatggagttttctggaagaaagtggaggaagctgaggttggcaggtgaccagaggaatgcttcctaccctcattgccttcagttttacttgcagccaccttctgaaaacatatctttaatagaatttgaaaacttggctattgatagagttaaattgttaaaatcagttgaaaatcttggagtgagctatgtgaaaggaactgaacaataccagagtaagttggagagtgagcttcggaagctcaagttttcctacagagaaaacttagaagatgaatatgaaccacgaagaagagatcatatttctcattttattttgcggcttgcttattgccagtctgaagaacttagacgctggttcattcaacaagaaatggatctccttcgatttagatttagtattttacccaaggataaaattcaggatttcttaaaggatagccaattgcagtttgaggctataagtgatgaagagaagactcttcgagaacaggagattgttgcctcatcaccaagtttaagtggacttaagttggggttcgagtccatttataagatcccttttgctgatgctctggatttgtttcgaggaaggaaagtctatttggaagatggctttgcttacgtaccacttaaggacattgtggcaatcatcctgaatgaatttagagccaaactgtccaaggctttggcattaacagccaggtccttgcctgctgtgcagtctgatgaaagacttcagcctctgctcaatcacctcagtcattcctacactggccaagattacagtacccagggaaatgttgggaagatttctttagatcagattgatttgctttctaccaaatccttcccaccttgcatgcgtcagttacataaagccttgcgggaaaatcaccatcttcgtcatggaggccgaatgcagtatggcctatttctgaagggcattggtttaactttggaacaggcattgcagttctggaagcaagaatttatcaaaggaaagatggatccagacaagtttgataaaggttactcttacaacatccgtcacagctttggaaaggaaggcaagaggacagactatacacctttcagttgcctgaagattattctgtccaatccaccaagccaaggggattatcatgggtgcccattccgtcacagtgatccagagctgctgaagcaaaagttgcagtcatacaagatctctcctggagggataagccagattttggatttagtaaaggggacacattaccaggtagcctgtcaaaaatactttgagatgatacacaatgtggatgattgtggcttttctttgaatcatcctaatcagttcttttgtgagagccaacgtattctaaatggtggtaaagacataaagaaggaacctatccaaccagaaactcctcaacccaaaccaagtgtccagaaaaccaaggatgcatcatctgctctggcctctttaaattcctctctggaaatggatatggaaggactagaagattactttagtgaagattcttaggcagttttataaccctttttcctcaatagcctgtttcctgtttttaagattttgcctttgttgttgaaaaagggtttcactctgtcaccaaggcttagtgcagtgacacaattacagctgattgcagccttgaccttcccagctcaagtgatcctcctacctcagcctcccaagtagttgggaccacaggtgtgcacctcatatccagataatttttttcaatttttttttgtagaggtggggggtctccctatgttgcccaggcagatctcagactcctgggctcaagcgatcctcacacctcagcgtcccagagtgctgggattacagttgtgagccactgtgcctggcctttttttttttttaacctttttgtttaacttctctcttcactgcatcccaatccatctacaggcatgcacacttattaggaaaggaggtttgaggtaacaacagagactttcactatattttgctttgacagaaggaaagaggaggagtttctattaaaatctgtcacttgagtgatgtcatttaagtcctattttaggagataaaaacagctttggggactggttaaagtcccccagaaactacaataaagaacaacttttgttttaactcttaatcactttgtaattttgactcaatccttttctggaccatttttgttaataaatatcaaagtgtaaaagacagtg

SEQ ID NO: 304217 - DNA, 1160 bp, Homo sapiens
ctcttccggtttcatatgaactctcccgccacccgggaacagtggctgccaccgtttgtgttttcccgagtttgaattcttgcaggtgaccaagatggagttttctggaagaaagtggaggaagctgaggttggcaggtgaccagaggaatgcttcctaccctcattgccttcagttttacttgcagccaccttctgaaaacatatctttaatagaatttgaaaacttggctattgatagagttaaattgttaaaatcagttgaaaatcttggagtgagctatgtgaaaggaactgaacaataccagagtaagttggagagtgagcttcggaagctcaagttttcctacagagaaaacttagaagatgaatatgaaccacgaagaagagatcatatttctcattttattttgcggcttgcttattgccagtctgaagaacttagacgctggttcattcaacaagaaatggatctccttcgatttagatttagtattttacccaaggataaaattcaggatttcttaaaggatagccaattgcagtttgaggctataagtgatgaagagaagactcttcgagaacaggagattgttgcctcatcaccaagtttaagtggacttaagttggggttcgagtccatttataagatcccttttgctgatgctctggatttgtttcgaggaaggaaagtctatttggaagatggctttgcttacgtaccacttaaggacattgtggcaatcatcctgaatgaatttagagccaaactgtccaaggctttggcagtgagtattttacttgatttctgtatctgacatgttcacactttcagttatatacccctggtagttttattctgtgtttctctaggaaataagttaattcagttttcataatgatattcagattacatatgatgttgtactgttaatcccaaaattcctaggtttttatttgttactatccatagttggtttttaagttttttttcttgatcctactaataccaatgctgagtgattaattttgtgagtaacctctgtgggtttcttcatggtcatgtcttttttccttagaaatagacttcgtatatggctcttaacaattagtgtggcctgtggtagatataactcctagatttctgttctgaattagtat

SEQ ID NO: 304218 - DNA, 889 bp, Homo sapiens
ctcttccggtttcatatgaactctcccgccacccgggaacagtggctgccaccgtttgtgttttcccgagtttgaattcttgcaggtgaccaagatggagttttctggaagaaagtggaggaagctgaggttggcaggtgaccagaggaatgcttcctaccctcattgccttcagttttacttgcagccaccttctgaaaacatatctttaatagaatttgaaaacttggctattgatagagttaaattgttaaaatcagttgaaaatcttggagtgagctatgtgaaaggaactgaacaataccagagtaagttggagagtgagcttcggaagctcaagttttcctacagagaaaacttagaagatgaatatgaaccacgaagaagagatcatatttctcattttattttgcggcttgcttattgccagtctgaagaacttagacgctggttcattcaacaagaaatggatctccttcgatttagatttagtattttacccaaggataaaattcaggatttcttaaaggatagccaattgcagtttgaggctgtaagtatattttgtagttatttctaattgttctcaccattcatttttcccttctgtcttaagtgctggtactaatgtgtagtgtgttctctttacattctccaagtacctgcctgaaacagtagctaatagctttggataacaatatatctttccttctctatgactagaagaaaaggactccttaataacaaagtctcacacttacttgctctgttaaatgtgtgctttattaaagcacaagaaggtttagtttataaaggttcatctttaaccaaaattttgtcggccaaaataaagctaataatgtgttaaactagacaagtggtagtttct

SEQ ID NO: 304219 - DNA, 925 bp, Homo sapiens
acagtgatttactgaacatggctgctgaaatgtataacattattgtgcattattgctaccgtgatatgcggatttatattgcaattgcctctggattcagaaaaacacccttcacagtgaggtgaccaagatggagttttctggaagaaagtggaggaagctgaggttggcaggtgaccagaggaatgcttcctaccctcattgccttcagttttacttgcagccaccttctgaaaacatatctttaatagaatttgaaaacttggctattgatagagttaaattgttaaaatcagttgaaaatcttggagtgagctatgtgaaaggaactgaacaataccagagtaagttggagagtgagcttcggaagctcaagttttcctacagagaaaacttagaagatgaatatgaaccacgaagaagagatcatatttctcattttattttgcggcttgcttattgccagtctgaagaacttagacgctggttcattcaacaagaaatggatctccttcgatttagatttagtattttacccaaggataaaattcaggatttcttaaaggatagccaattgcagtttgaggctgtaagtatattttgtagttatttctaattgttctcaccattcatttttcccttctgtcttaagtgctggtactaatgtgtagtgtgttctctttacattctccaagtacctgcctgaaacagtagctaatagctttggataacaatatatctttccttctctatgactagaagaaaaggactccttaataacaaagtctcacacttacttgctctgttaaatgtgtgctttattaaagcacaagaaggtttagtttataaaggttcatctttaaccaaaattttgtcggccaaaataaagctaataatgtgttaaactagacaagtggtagtttct

SEQ ID NO: 304220 - DNA, 178 bp, Homo sapiens
aacaacatgggaaacaataaaacaagaaccagaacaccctgcgtctcaggcagaagaagaggaaaatgatgaatagtagaagctccgcctgtgaagatgattttacctgcagctgaaataccatgacccagatattgaacacacagaataattaaacttttcgtctagaaactttgtg

SEQ ID NO: 304221 - DNA, 1697 bp, Homo sapiens
catgaagagatgcatgctctttttgtaaatgctaattgttttaaaagttgaaaagaaaacctttggaaaactcagaaatcttccttgaaataattttactcagagcattggcctctccctggtttaggaatcattcttgccagagattcaatctcgaaattaacagccaggtccttgcctgctgtgcagtctgatgaaagacttcagcctctgctcaatcacctcagtcattcctacactggccaagattacagtacccagggaaatgttgggaagatttctttagatcagattgatttgctttctaccaaatccttcccaccttgcatgcgtcagttacataaagccttgcgggaaaatcaccatcttcgtcatggaggccgaatgcagtatggcctatttctgaagggcattggtttaactttggaacaggcattgcagttctggaagcaagaatttatcaaaggaaagatggatccagacaagtttgataaaggttactcttacaacatccgtcacagctttggaaaggaaggcaagaggacagactatacacctttcagttgcctgaagattattctgtccaatccaccaagccaaggggattatcatgggtgcccattccgtcacagtgatccagagctgctgaagcaaaagttgcagtcatacaagatctctcctggagggataagccagattttggatttagtaaaggggacacattaccaggtagcctgtcaaaaatactttgagatgatacacaatgtggatgattgtggcttttctttgaatcatcctaatcagttcttttgtgagagccaacgtattctaaatggtggtaaagacataaagaaggaacctatccaaccagaaactcctcaacccaaaccaagtgtccagaaaaccaaggatgcatcatctgctctggcctctttaaattcctctctggaaatggatatggaaggactagaagattactttagtgaagattcttaggcagttttataaccctttttcctcaatagcctgtttcctgtttttaagattttgcctttgttgttgaaaaagggtttcactctgtcaccaaggcttagtgcagtgacacaattacagctgattgcagccttgaccttcccagctcaagtgatcctcctacctcagcctcccaagtagttgggaccacaggtgtgcacctcatatccagataatttttttcaatttttttttgtagaggtggggggtctccctatgttgcccaggcagatctcagactcctgggctcaagcgatcctcacacctcagcgtcccagagtgctgggattacagttgtgagccactgtgcctggcctttttttttttttaacctttttgtttaacttctctcttcactgcatcccaatccatctacaggcatgcacacttattaggaaaggaggtttgaggtaacaacagagactttcactatattttgctttgacagaaggaaagaggaggagtttctattaaaatctgtcacttgagtgatgtcatttaagtcctattttaggagataaaaacagctttggggactggttaaagtcccccagaaactacaataaagaacaacttttgttttaactcttaatcactttgtaattttgactcaatccttttctggaccatttttgttaataaatatcaaagtgtaaaagacagtg

SEQ ID NO: 304222 - DNA, 2395 bp, Homo sapiens
gagcacttcacgcccttactggtgtctggcccagcccgggtcgccccttccccagtcgggacttggggcaggcaaaaagccgaacgttcggccagactggggacgcagcgccgccctcgctccacccctctttcccgcccaccaggcaattccaggtgaccaagatggagttttctggaagaaagtggaggaagctgaggttggcaggtgaccagaggaatgcttcctaccctcattgccttcagttttacttgcagccaccttctgaaaacatatctttaatagaatttgaaaacttggctattgatagagttaaattgttaaaatcagttgaaaatcttggagtgagctatgtgaaaggaactgaacaataccagagtaagttggagagtgagcttcggaagctcaagttttcctacagagaaaacttagaagatgaatatgaaccacgaagaagagatcatatttctcattttattttgcggcttgcttattgccagtctgaagaacttagacgctggttcattcaacaagaaatggatctccttcgatttagatttagtattttacccaaggataaaattcaggatttcttaaaggatagccaattgcagtttgaggctataagtgatgaagagaagactcttcgagaacaggagattgttgcctcatcaccaagtttaagtggacttaagttggggttcgagtccatttataagatcccttttgctgatgctctggatttgtttcgaggaaggaaagtctatttggaagatggctttgcttacgtaccacttaaggacattgtggcaatcatcctgaatgaatttagagccaaactgtccaaggctttggcattaacagccaggtccttgcctgctgtgcagtctgatgaaagacttcagcctctgctcaatcacctcagtcattcctacactggccaagattacagtacccagggaaatgttgggaagatttctttagatcagattgatttgctttctaccaaatccttcccaccttgcatgcgtcagttacataaagccttgcgggaaaatcaccatcttcgtcatggaggccgaatgcagtatggcctatttctgaagggcattggtttaactttggaacaggcattgcagttctggaagcaagaatttatcaaaggaaagatggatccagacaagtttgataaaggttactcttacaacatccgtcacagctttggaaaggaaggcaagaggacagactatacacctttcagttgcctgaagattattctgtccaatccaccaagccaaggggattatcatgggtgcccattccgtcacagtgatccagagctgctgaagcaaaagttgcagtcatacaagatctctcctggagggataagccagattttggatttagtaaaggggacacattaccaggtagcctgtcaaaaatactttgagatgatacacaatgtggatgattgtggcttttctttgaatcatcctaatcagttcttttgtgagagccaacgtattctaaatggtggtaaagacataaagaaggaacctatccaaccagaaactcctcaacccaaaccaagtgtccagaaaaccaaggatgcatcatctgctctggcctctttaaattcctctctggaaatggatatggaaggactagaagattactttagtgaagattcttaggcagttttataaccctttttcctcaatagcctgtttcctgtttttaagattttgcctttgttgttgaaaaagggtttcactctgtcaccaaggcttagtgcagtgacacaattacagctgattgcagccttgaccttcccagctcaagtgatcctcctacctcagcctcccaagtagttgggaccacaggtgtgcacctcatatccagataatttttttcaatttttttttgtagaggtggggggtctccctatgttgcccaggcagatctcagactcctgggctcaagcgatcctcacacctcagcgtcccagagtgctgggattacagttgtgagccactgtgcctggcctttttttttttttaacctttttgtttaacttctctcttcactgcatcccaatccatctacaggcatgcacacttattaggaaaggaggtttgaggtaacaacagagactttcactatattttgctttgacagaaggaaagaggaggagtttctattaaaatctgtcacttgagtgatgtcatttaagtcctattttaggagataaaaacagctttggggactggttaaagtcccccagaaactacaataaagaacaacttttgttttaactcttaatcactttgtaattttgactcaatccttttctggaccatttttgttaataaatatcaaagtgtaaaagacagtg

SEQ ID NO: 304223 - DNA, 2287 bp, Homo sapiens
ctcttccggtttcatatgaactctcccgccacccgggaacagtggctgccaccgtttgtgttttcccgagtttgaattcttgcaggtgaccaagatggagttttctggaagaaagtggaggaagctgaggttggcaggtgaccagaggaatgcttcctaccctcattgccttcagttttacttgcagccaccttctgaaaacatatctttaatagaatttgaaaacttggctattgatagagttaaattgttaaaatcagttgaaaatcttggagtgagctatgtgaaaggaactgaacaataccagagtaagttggagagtgagcttcggaagctcaagttttcctacagagaaaacttagaagatgaatatgaaccacgaagaagagatcatatttctcattttattttgcggcttgcttattgccagtctgaagaacttagacgctggttcattcaacaagaaatggatctccttcgatttagatttagtattttacccaaggataaaattcaggatttcttaaaggatagccaattgcagtttgaggctataagtgatgaagagaagactcttcgagaacaggagattgttgcctcatcaccaagtttaagtggacttaagttggggttcgagtccatttataagatcccttttgctgatgctctggatttgtttcgaggaaggaaagtctatttggaagatggctttgcttacgtaccacttaaggacattgtggcaatcatcctgaatgaatttagagccaaactgtccaaggctttggcattaacagccaggtccttgcctgctgtgcagtctgatgaaagacttcagcctctgctcaatcacctcagtcattcctacactggccaagattacagtacccagggaaatgttgggaagatttctttagatcagattgatttgctttctaccaaatccttcccaccttgcatgcgtcagttacataaagccttgcgggaaaatcaccatcttcgtcatggaggccgaatgcagtatggcctatttctgaagggcattggtttaactttggaacaggcattgcagttctggaagcaagaatttatcaaaggaaagatggatccagacaagtttgataaaggttactcttacaacatccgtcacagctttggaaaggaaggcaagaggacagactatacacctttcagttgcctgaagattattctgtccaatccaccaagccaaggggattatcatgggtgcccattccgtcacagtgatccagagctgctgaagcaaaagttgcagtcatacaagatctctcctggagggataagccagattttggatttagtaaaggggacacattaccaggtagcctgtcaaaaatactttgagatgatacacaatgtggatgattgtggcttttctttgaatcatcctaatcagttcttttgtgagagccaacgtattctaaatggtggtaaagacataaagaaggaacctatccaaccagaaactcctcaacccaaaccaagtgtccagaaaaccaaggatgcatcatctgctctggcctctttaaattcctctctggaaatggatatggaaggactagaagattactttagtgaagattcttaggcagttttataaccctttttcctcaatagcctgtttcctgtttttaagattttgcctttgttgttgaaaaagggtttcactctgtcaccaaggcttagtgcagtgacacaattacagctgattgcagccttgaccttcccagctcaagtgatcctcctacctcagcctcccaagtagttgggaccacaggtgtgcacctcatatccagataatttttttcaatttttttttgtagaggtggggggtctccctatgttgcccaggcagatctcagactcctgggctcaagcgatcctcacacctcagcgtcccagagtgctgggattacagttgtgagccactgtgcctggcctttttttttttttaacctttttgtttaacttctctcttcactgcatcccaatccatctacaggcatgcacacttattaggaaaggaggtttgaggtaacaacagagactttcactatattttgctttgacagaaggaaagaggaggagtttctattaaaatctgtcacttgagtgatgtcatttaagtgacagattttgacagaaggaaagaggaggagtttctattaaaatctgtcacttgagtgatgtcatttaagtcctattttaggagataaaaacggctttgggactttaaccagtccccgtcgac

SEQ ID NO: 304224 - DNA, 983 bp, Homo sapiens
cccacccatcagaatttcacccacgagacgcgatgttaccaccaccagtgagtggatgattgtggcttttctttgaatcatcctaatcagttcttttgtgagagccaacgtattctaaatggtggtaaagacataaagaaggaacctatccaaccagaaactcctcaacccaaaccaagtgtccagaaaaccaaggatgcatcatctgctctggcctctttaaattcctctctggaaatggatatggaaggactagaagattactttagtgaagattcttaggcagttttataaccctttttcctcaatagcctgtttcctgtttttaagattttgcctttgttgttgaaaaagggtttcactctgtcaccaaggcttagtgcagtgacacaattacagctgattgcagccttgaccttcccagctcaagtgatcctcctacctcagcctcccaagtagttgggaccacaggtgtgcacctcatatccagataatttttttcaatttttttttgtagaggtggggggtctccctatgttgcccaggcagatctcagactcctgggctcaagcgatcctcacacctcagcgtcccagagtgctgggattacagttgtgagccactgtgcctggcctttttttttttttaacctttttgtttaacttctctcttcactgcatcccaatccatctacaggcatgcacacttattaggaaaggaggtttgaggtaacaacagagactttcactatattttgctttgacagaaggaaagaggaggagtttctattaaaatctgtcacttgagtgatgtcatttaagtcctattttaggagataaaaacagctttggggactggttaaagtcccccagaaactacaataaagaacaacttttgttttaactcttaatcactttgtaattttgactcaatccttttctggaccatttttgttaataaatatcaaagtgtaaaagacagtg

SEQ ID NO: 304225 - DNA, 1629 bp, Homo sapiens
ctcttccggtttcatatgaactctcccgccacccgggaacagtggctgccaccgtttgtgttttcccgagtttgaattcttgcaggtgaccaagatggagttttctggaagaaagtggaggaagctgaggttggcaggtgaccagaggaatgcttcctaccctcattgccttcagttttacttgcagccaccttctgaaaacatatctttaatagaatttgaaaacttggctattgatagagttaaattgttaaaatcagttgaaaatcttggagtgagctatgtgaaaggaactgaacaataccagagtaagttggagagtgagcttcggaagctcaagttttcctacagagaaaacttagaagatgaatatgaaccacgaagaagagatcatatttctcattttattttgcggcttgcttattgccagtctgaagaacttagacgctggttcattcaacaagaaatggatctccttcgatttagatttagtattttacccaaggataaaattcaggatttcttaaaggatagccaattgcagtttgaggctataagtgatgaagagaagactcttcgagaacaggagattgttgcctcatcaccaagtttaagtggacttaagttggggttcgagtccatttataagatcccttttgctgatgctctggatttgtttcgaggaaggaaagtctatttggaagatggctttgcttacgtaccacttaaggacattgtggcaatcatcctgaatgaatttagagccaaactgtccaaggctttggcattaacagccaggtccttgcctgctgtgcagtctgatgaaagacttcagcctctgctcaatcacctcagtcattcctacactggccaagattacagtacccagggaaatgttgggaagatttctttagatcagattgatttgctttctaccaaatccttcccaccttgcatgcgtcagttacataaagccttgcgggaaaatcaccatcttcgtcatggaggccgaatgcagtatggcctatttctgaagggcattggtttaactttggaacaggcattgcagttctggaagcaagaatttatcaaaggaaagatggatccagacaagtttgataaaggttactcttacaacatccgtcacagctttggaaaggaaggcaagaggacagactatacacctttcagttgcctgaagattattctgtccaatccaccaagccaaggggattatcatgggtgcccattccgtcacagtgatccagagctgctgaagcaaaagttgcagtcatacaagatctctcctggagggataagccagatgagaaagctgaggtttggagaaggcaagaaactgctcagaaccatagaactaatatatgataaggccagaattcgcacctatgcctgacagtgaagctgaagtttcttacaatacattgttctgattctctgtagtatttttctattttaaatccagttgaaattctttttggtttcttctttcatggaaagccatcactgtgaagtgaatggtaattcttatgtacctaaacttaagaaaatgtataatgcattgttgaaacactgacaaatgtgaaacaaagatgagaataattcagaaaa

SEQ ID NO: 304226 - DNA, 1237 bp, Homo sapiens
ctcttccggtttcatatgaactctcccgccacccgggaacagtggctgccaccgtttgtgttttcccgagtttgaattcttgcaggtgaccaagatggagttttctggaagaaagtggaggaagctgaggttggcaggtgaccagaggaatgcttcctaccctcattgccttcagttttacttgcagccaccttctgaaaacatatctttaatagaatttgaaaacttggctattgatagagttaaattgttaaaatcagttgaaaatcttggagtgagctatgtgaaaggaactgaacaataccagagtaagttggagagtgagcttcggaagctcaagttttcctacagagaaaacttagaagatgaatatgaaccacgaagaagagatcatatttctcattttattttgcggcttgcttattgccagtctgaagaacttagacgctggttcattcaacaagaaatggatctccttcgatttagatttagtattttacccaaggataaaattcaggatttcttaaaggatagccaattgcagtttgaggctataagtgatgaagagaagactcttcgagaacaggagattgttgcctcatcaccaagtttaagtggacttaagttggggttcgagtccatttataagatcccttttgctgatgctctggatttgtttcgaggaaggaaagtctatttggaagatggctttgcttacgtaccacttaaggacattgtggcaatcatcctgaatgaatttagagccaaactgtccaaggctttggcattaacagccaggtccttgcctgctgtgcagtctgatgaaagacttcagcctctgctcaatcacctcagtcattcctacactggccaagattacagtacccagggaaatgttgggaagatttctttagatcagattgatttgctttctaccaaatccttcccaccttgcatgcgtcagttacataaagccttgcgggaaaatcaccatcttcgtcatggaggccgaatgcagtatggcctatttctgaagggcattggtttaactttggaacaggcattgcagttctggaagcaagaatttatcaaaggaaagatggatccagacaaggaagaggaaaatgatgaatagtagaagctccgcctgtgaagatgattttacctgcagctgaaataccatgacccagatattgaacacacagaataattaaacttttcgtctagaaactttgtg

SEQ ID NO: 304227 - DNA, 1245 bp, Homo sapiens
ctcttccggtttcatatgaactctcccgccacccgggaacagtggctgccaccgtttgtgttttcccgagtttgaattcttgcaggtgaccaagatggagttttctggaagaaagtggaggaagctgaggttggcaggtgaccagaggaatgcttcctaccctcattgccttcagttttacttgcagccaccttctgaaaacatatctttaatagaatttgaaaacttggctattgatagagttaaattgttaaaatcagttgaaaatcttggagtgagctatgtgaaaggaactgaacaataccagagtaagttggagagtgagcttcggaagctcaagttttcctacagagaaaacttagaagatgaatatgaaccacgaagaagagatcatatttctcattttattttgcggcttgcttattgccagtctgaagaacttagacgctggttcattcaacaagaaatggatctccttcgatttagatttagtattttacccaaggataaaattcaggatttcttaaaggatagccaattgcagtttgaggctataagtgatgaagagaagactcttcgagaacaggagattgttgcctcatcaccaagtttaagtggacttaagttggggttcgagtccatttataagatcccttttgctgatgctctggatttgtttcgaggaaggaaagtctatttggaagatggctttgcttacgtaccacttaaggacattgtggcaatcatcctgaatgaatttagagccaaactgtccaaggctttggcaatatggagtcttgccatgttgcccaggctggtcttgaactcctagcctcaagtgatccacccacctcagcctccgaaagtgctgggattataggcactaggcggcatgcctgggccctctactctgttctgaataaaaagtctctggggatggaccctaggtgattcataggcacactgaaatctgagaaccaggtacaggaaataaaattatttgaaatgcaaaccattgaattttatgactttttcattgcttttggtaagaggctggactgtggaggagatgaaaacttgaccaaaaatggatttctgtgagcaccacagaatttggtgaggtttagtaggactccggaggaataacattcgggaaggacaggatgtctgaactgtatgaccagtcctgtcctttttgctgttctctccctgagactcttttttcacctggatgattccttcccc

SEQ ID NO: 304228 - DNA, 220 bp, Homo sapiens
ttaacagccaggtccttgcctgctgtgcagtctgatgaaagacttcagcctctgctcaatcacctcaggtaatctaaaggcacagccttgttatgcttataaatccaagtgcagtaaagtgaataaagtatattaaagtggtgaaaccgcttcaattactaaaaacttatttttttttcttgctttcattccattattcaaattgaagttcttagtacca

SEQ ID NO: 304229 - DNA, 3948 bp, Homo sapiens
gagccctgacgcccgccctggccgagcgtagctggcggaccagagccggtagcgaggttgggagagacggagcggacctcagcgctgaagcagaagtccccggagctgcggtctccccgccgcggctgagccatgcggctccctgacctgagaccctggacctccctgctgctggtggacgcggctttactgtggctgcttcagggccctctggggactttgcttcctcaagggctgccaggactatggctggaggggaccctgcggctgggagggctgtgggggctgctaaagctaagagggctgctgggatttgtggggacactgctgctcccgctctgtctggccacccccctgactgtctccctgagagccctggtcgcgggggcctcacgtgctcccccagccagagtcgcttcagccccttggagctggctgctggtggggtacggggctgcggggctcagctggtcactgtgggctgttctgagccctcctggagcccaggagaaggagcaggaccaggtgaacaacaaagtcttgatgtggaggctgctgaagctctccaggccggacctgcctctcctcgttgccgccttcttcttccttgtccttgctgttttgggtgagacattaatccctcactattctggtcgtgtgattgacatcctgggaggtgattttgacccccatgcctttgccagtgccatcttcttcatgtgcctcttctcctttggcagctcactgtctgcaggctgccgaggaggctgcttcacctacaccatgtctcgaatcaacttgcggatccgggagcagcttttctcctccctgctgcgccaggacctcggtttcttccaggagactaagacaggggagctgaactcacggctgagctcggataccaccctgatgagtaactggcttcctttaaatgccaatgtgctcttgcgaagcctggtgaaagtggtggggctgtatggcttcatgctcagcatatcgcctcgactcaccctcctttctctgctgcacatgcccttcacaatagcagcggagaaggtgtacaacacccgccatcaggaagtgcttcgggagatccaggatgcagtggccagggcggggcaggtggtgcgggaagccgttggagggctgcagaccgttcgcagttttggggccgaggagcatgaagtctgtcgctataaagaggcccttgaacaatgtcggcagctgtattggcggagagacctggaacgcgccttgtacctgctcgtaaggagggtgctgcacttgggggtgcagatgctgatgctgagctgtgggctgcagcagatgcaggatggggagctcacccagggcagcctgctttcctttatgatctaccaggagagcgtggggagctatgtgcagaccctggtatacatatatggggatatgctcagcaacgtgggagctgcagagaaggttttctcctacatggaccgacagccaaatctgccttcacctggcacgcttgcccccaccactctgcagggggttgtgaaattccaagacgtctcctttgcatatcccaatcgccctgacaggcctgtgctcaaggggctgacgtttaccctacgtcctggtgaggtgacggcgctggtgggacccaatgggtctgggaagagcacagtggctgccctgctgcagaatctgtaccagcccacagggggacaggtgctgctggatgaaaagcccatctcacagtatgaacactgctacctgcacagccaggtggtttcagttgggcaggagcctgtgctgttctccggttctgtgaggaacaacattgcttatgggctgcagagctgcgaagatgataaggtgatggcggctgcccaggctgcccacgcagatgacttcatccaggaaatggagcatggaatatacacagatgtaggggagaagggaagccagctggctgcgggacagaaacaacgtctggccattgcccgggcccttgtacgagacccgcgggtcctcatcctggatgaggctactagtgccctagatgtgcagtgcgagcaggccctgcaggactggaattcccgtggggatcgcacagtgctggtgattgctcacaggctgcagacagttcagcgcgcccaccagatcctggtgctccaggagggcaagctgcagaagcttgcccagctctaggagggacaggacctctattcccgcctggtgcagcagcggctgatggactgaggccccagggatactgggccctcttctcaggggcgtctccaggacccagagctgttcctgctttgagtttccctagagctgtgcggccagatagctgttcctgagttgcaggcacgatggagatttggacactgtgtgcttttggtggggtagagaggtggggtggggtggggtgggggctgtctgtgtccaggaaacttaattccctggtgactagagctttgcctggtgatgaggagtattttgtggcataatacatatattttaaaatattttccttcttacatgaactgtatacattcatatagaaaatttagacaatataaaaaagtacaaagaagaaaagtaaaagtacccattgtttcacttcctggagataaccatagttgctattttgctgcctgtcccatcagtcgtttatctgttgtttgagatagaaattaaccaaaaatgacataaatattcatgagattgccttcctatatccttccttgttcctaccagtgtctgctattttgaagaagctagggtctggagggacagagaacagttccctgattaacagtattaatagcgacattggtaacagctaccatttatagagttttaatgggagtaggagctatgctaagtgtttttcatgtattatcgtttttaatcattatccccaaccctatgaggttggttattatccccattttacagatgaggaaactgaagctcaaagaggctcaatgactttcccaaggtggtcgtagtggtggagttggagtttgaacacaggcctgaccctagagtccacaccctgacccaatcaattatattgcatcttgggtccataaaccctaatccataatcccatcaagaaaagctctgctgctcttagctctaaataattcagaatctattctcttctctccagtcccgttgttatagtcttcactcatagacttaagatgatcccatcaccagagaggtttctctaccattagcttccctcttccggccattcttcacaaagtcatttttctaaattctgtgtcacatacgatgatggcatttctggaaattccttcaggtgctctcaagccctgctgcagagatccttttcagagcacacactgttccagcccatctgtctcaccctctcctgttgtatccagctccacgacaaacttctgccttccccaacacctttgtgcctttgcatatggtgttttcttgcccattttctgctcgactcgcccctgattttcaagttcaagacttaactcagggttcaggtcttccaggaggccttacttatgtcgtcagtctggggaactctccatgtgcttctatcactgtgcggttacctctttcacagcccttttaaagttctatcttccctttcccaccttttttgaccttccactagaccatgagcacctgggcggaaagccatatatcttattaagctttatatctgctacctggccgagggctaattcatagtggagaataaatagtcaattgaataaatgaataaatatctccaccatcgtactaatcttaatcctccctgcccactcccaccactgaaaatgcaacattgtacacatcactggttgttgggagggacttaccttggaaagttgctattctaggaaagagaaaccttcatattcctggaaacagcaggtagtttccagtgctggcaatgaa

SEQ ID NO: 304230 - DNA, 2609 bp, Homo sapiens
gagccctgacgcccgccctggccgagcgtagctggcggaccagagccggtagcgaggttgggagagacggagcggacctcagcgctgaagcagaagtccccggagctgcggtctccccgccgcggctgagccatgcggctccctgacctgagaccctggacctccctgctgctggtggacgcggctttactgtggctgcttcagggccctctggggactttgcttcctcaagggctgccaggactatggctggaggggaccctgcggctgggagggctgtgggggctgctaaagctaagagggctgctgggatttgtggggacactgctgctcccgctctgtctggccacccccctgactgtctccctgagagccctggtcgcgggggcctcacgtgctcccccagccagagtcgcttcagccccttggagctggctgctggtggggtacggggctgcggggctcagctggtcactgtgggctgttctgagccctcctggagcccaggagaaggagcaggaccaggtgaacaacaaagtcttgatgtggaggctgctgaagctctccaggccggacctgcctctcctcgttgccgccttcttcttccttgtccttgctgttttgggtgagacattaatccctcactattctggtcgtgtgattgacatcctgggaggtgattttgacccccatgcctttgccagtgccatcttcttcatgtgcctcttctcctttggcagctcactgtctgcaggctgccgaggaggctgcttcacctacaccatgtctcgaatcaacttgcggatccgggagcagcttttctcctccctgctgcgccaggacctcggtttcttccaggagactaagacaggggagctgaactcacggctgagctcggataccaccctgatgagtaactggcttcctttaaatgccaatgtgctcttgcgaagcctggtgaaagtggtggggctgtatggcttcatgctcagcatatcgcctcgactcaccctcctttctctgctgcacatgcccttcacaatagcagcggagaaggtgtacaacacccgccatcaggaagtgcttcgggagatccaggatgcagtggccagggcggggcaggtggtgcgggaagccgttggagggctgcagaccgttcgcagttttggggccgaggagcatgaagtctgtcgctataaagaggcccttgaacaatgtcggcagctgtattggcggagagacctggaacgcgccttgtacctgctcgtaaggagggtgctgcacttgggggtgcagatgctgatgctgagctgtgggctgcagcagatgcaggatggggagctcacccagggcagcctgctttcctttatgatctaccaggagagcgtggggagctatgtgcagaccctggtatacatatatggggatatgctcagcaacgtgggagctgcagagaaggttttctcctacatggaccgacagccaaatctgccttcacctggcacgcttgcccccaccactctgcagggggttgtgaaattccaagacgtctcctttgcatatcccaatcgccctgacaggcctgtgctcaaggggctgacgtttaccctacgtcctggtgaggtgacggcgctggtgggacccaatgggtctgggaagagcacagtggctgccctgctgcagaatctgtaccagcccacagggggacaggtgctgctggatgaaaagcccatctcacagtatgaacactgctacctgcacagccaggtggtttcagttgggcaggagcctgtgctgttctccggttctgtgaggaacaacattgcttatgggctgcagagctgcgaagatgataaggtgatggcggctgcccaggctgcccacgcagatgacttcatccaggaaatggagcatggaatatacacagatgtaggggagaagggaagccagctggctgcgggacagaaacaacgtctggccattgcccgggcccttgtacgagacccgcgggtcctcatcctggatgaggctactagtgccctagatgtgcagtgcgagcaggccctgcaggactggaattcccgtggggatcgcacagtgctggtgattgctcacaggctgcagacagttcagcgcgcccaccagatcctggtgctccaggagggcaagctgcagaagcttgcccagctctaggagggacaggacctctattcccgcctggtgcagcagcggctgatggactgaggccccagggatactgggccctcttctcaggggcgtctccaggacccagagctgttcctgctttgagtttccctagagctgtgcggccagatagctgttcctgagttgcaggcacgatggagatttggacactgtgtgcttttggtggggtagagaggtggggtggggtggggtgggggctgtctgtgtccaggaaacttaattccctggtgactagagctttgcctggtgatgaggagtattttgtggcataatacatatattttaaaatattttccttcttacatgaactgtatacattcatatagaaaatttagacaatataaaaaagtacaaagaagaaaagtaaaagtacccattgtttc

SEQ ID NO: 304231 - DNA, 2550 bp, Homo sapiens
gagccctgacgcccgccctggccgagcgtagctggcggaccagagccggtagcgaggttgggagagacggagcggacctcagcgctgaagcagaagtccccggagctgcggtctccccgccgcggctgagccatgcggctccctgacctgagaccctggacctccctgctgctggtggacgcggctttactgtggctgcttcagggccctctggggactttgcttcctcaagggctgccaggactatggctggaggggaccctgcggctgggagggctgtgggggctgctaaagctaagagggctgctgggatttgtggggacactgctgctcccgctctgtctggccacccccctgactgtctccctgagagccctggtcgcgggggcctcacgtgctcccccagccagagtcgcttcagccccttggagctggctgctggtggggtacggggctgcggggctcagctggtcactgtgggctgttctgagccctcctggagcccaggagaaggagcaggaccaggtgaacaacaaagtcttgatgtggaggctgctgaagctctccaggccggacctgcctctcctcgttgccgccttcttcttccttgtccttgctgttttgggtgagacattaatccctcactattctggtcgtgtgattgacatcctgggaggtgattttgacccccatgcctttgccagtgccatcttcttcatgtgcctcttctcctttggcagctcactgtctgcaggctgccgaggaggctgcttcacctacaccatgtctcgaatcaacttgcggatccgggagcagcttttctcctccctgctgcgccaggacctcggtttcttccaggagactaagacaggggagctgaactcacggctgagctcggataccaccctgatgagtaactggcttcctttaaatgccaatgtgctcttgcgaagcctggtgaaagtggtggggctgtatggcttcatgctcagcatatcgcctcgactcaccctcctttctctgctgcacatgcccttcacaatagcagcggagaaggtgtacaacacccgccatcaggaagtgcttcgggagatccaggatgcagtggccagggcggggcaggtggtgcgggaagccgttggagggctgcagaccgttcgcagttttggggccgaggagcatgaagtctgtcgctataaagaggcccttgaacaatgtcggcagctgtattggcggagagacctggaacgcgccttgtacctgctcgtaaggagggtgctgcacttgggggtgcagatgctgatgctgagctgtgggctgcagcagatgcaggatggggagctcacccagggcagcctgctttcctttatgatctaccaggagagcgtggggagctatgtgcagaccctggtatacatatatggggatatgctcagcaacgtgggagctgcagagaaggttttctcctacatggaccgacagccaaatctgccttcacctggcacgcttgcccccaccactctgcagggggttgtgaaattccaagacgtctcctttgcatatcccaatcgccctgacaggcctgtgctcaaggggctgacgtttaccctacgtcctggtgaggtgacggcgctggtgggacccaatgggtctgggaagagcacagtggctgccctgctgcagaatctgtaccagcccacagggggacaggtgctgctggatgaaaagcccatctcacagtatgaacactgctacctgcacagccaggtggtttcagttgggcaggagcctgtgctgttctccggttctgtgaggaacaacattgcttatgggctgcagagctgcgaagatgataaggtgatggcggctgcccaggctgcccacgcagatgacttcatccaggaaatggagcatggaatatacacagatgtaggggagaagggaagccagctggctgcgggacagaaacaacgtctggccattgcccgggcccttgtacgagacccgcgggtcctcatcctggatgaggctactagtgccctagatgtgcagtgcgagcaggccaaaaccctttggaagttcatgatattttgaatttcaatggatatttcctgggaataatgagttcaaatgaacgaatatgtggaacaaagcatcaccaacatttattttttcaggatgaggtgatggacaaaaccatcacagggaaattgaggcaaatagtacatgtaaaacaatacttcgggtgagtccacctatcccaaagtcgtatcaaagaagtggctgcagattggagcccaaagcctttggttcctcagtttccaaatggattctcactaggtgggatcatgagtttgctttggacaccccaaattctaactatttcttttgtttcttacatcctttccctcttccccagccccttcccctcatgttacacctcttgctggtttgagacgtcaatcaccactgagaaagaattaaaccagtattttgagctggcaaaattcttagcctagtacaattccttcaattaaactgtagctcaac

SEQ ID NO: 304232 - DNA, 712 bp, Homo sapiens
ggaagaggctgacgattttactatctcatttttttcctttctccagaatgggttctgggtgggtcccctgggtggtggctctgctagtgaatctgacccgactggattcctccatgactcaaggcacagactctccagaagattttgtgattcaggcaaaggctgactgttacttcaccaacgggacagaaaaggtgcagtttgtggtcagattcatctttaacttggaggagtatgtacgtttcgacagtgatgtggggatgtttgtggcattgaccaagctggggcagccagatgctgagcagtggaacagccggctggatctcttggagaggagcagacaggccgtggatggggtctgtagacacaactacaggctgggcgcacccttcactgtggggagaaaagtgcaaccagaggtgacagtgtacccagagaggaccccactcctgcaccagcataatctgctgcactgctctgtgacaggcttctatccagggatatcaagatcaagtggttcctgaatgggcaggaggagagagctggggtcatgtccactggccctatcaggaatggagactggacctttcagactgtggtgatgctagaaatgactcctgaacttggacatgtctacacctgccttgtcgatcactccagcctgctgagccctgtttctgtggagtggagtgagaattagtttctagtactc

SEQ ID NO: 304233 - DNA, 932 bp, Homo sapiens
ggaagaggctgacgattttactatctcatttttttcctttctccagaatgggttctgggtgggtcccctgggtggtggctctgctagtgaatctgacccgactggattcctccatgactcaaggcacagactctccagaagattttgtgattcaggcaaaggctgactgttacttcaccaacgggacagaaaaggtgcagtttgtggtcagattcatctttaacttggaggagtatgtacgtttcgacagtgatgtggggatgtttgtggcattgaccaagctggggcagccagatgctgagcagtggaacagccggctggatctcttggagaggagcagacaggccgtggatggggtctgtagacacaactacaggctgggcgcacccttcactgtggggagaaaagtgcaaccagaggtgacagtgtacccagagaggaccccactcctgcaccagcataatctgctgcactgctctgtgacaggcttctatccagggatatcaagatcaagtggttcctgaatgggcaggaggagagagctggggtcatgtccactggccctatcaggaatggagactggacctttcagactgtggtgatgctagaaatgactcctgaacttggacatgtctacacctgccttgtcgatcactccagcctgctgagccctgtttctgtggagtggagagctcagtctgaatattcttggagaaagatgctgagtggcattgcagccttcctacttgggctaatctccttctggtgggatcgcctccggtagggctcgaaggtttttgggcgcctcttcgggatggggtcaaagaggtggccccgtgtagggcccggagattctctgcccaaaaagaatggccggggaagacaccagacgtggagacctccctgggcccattggttgaaacccccactta

SEQ ID NO: 304234 - DNA, 533 bp, Homo sapiens
ggaagaggctgacgattttactatctcatttttttcctttctccagaatgggttctgggtgggtcccctgggtggtggctctgctagtgaatctgacccgactggattcctccatgactcaaggcacagactctccaggtaagaacagagcaattgtttttttccagtgtgtatgcaagaattggcatgggggagtgatgcctttctttgtaagtccaggccacagaccagactggaagtggcttttggtttcaaagaacagtgttcttccctttggcagaaaggtacgccttgcctctttacatgggatggacttcatataccagagccacctattcaaggggtagggaggcaggaagagggaaacattgtgtcttgtttaggatccttattgtgtgtatcaacctcagtcagtgcctgggcgtgttgaaggccttggcttgggttcgagcctgctgggagaaacaacctgcagtaggctgggtcacagaggcaatctgtgatttttggtcaggacacggaaacaaatctca

SEQ ID NO: 304235 - DNA, 3771 bp, Homo sapiens
gagccctgacgcccgccctggccgagcgtagctggcggaccagagccggtagcgaggttgggagagacggagcggacctcagcgctgaagcagaagtccccggagctgcggtctccccgccgcggctgagccatgcggctccctgacctgagaccctggacctccctgctgctggtggacgcggctttactgtggctgcttcagggccctctggggactttgcttcctcaagggctgccaggactatggctggaggggaccctgcggctgggagggctgtgggggctgctaaagctaagagggctgctgggatttgtggggacactgctgctcccgctctgtctggccacccccctgactgtctccctgagagccctggtcgcgggggcctcacgtgctcccccagccagagtcgcttcagccccttggagctggctgctggtggggtacggggctgcggggctcagctggtcactgtgggctgttctgagccctcctggagcccaggagaaggagcaggaccaggtgaacaacaaagtcttgatgtggaggctgctgaagctctccaggccggacctgcctctcctcgttgccgccttcttcttccttgtccttgctgttttgggtgagacattaatccctcactattctggtcgtgtgattgacatcctgggaggtgattttgacccccatgcctttgccagtgccatcttcttcatgtgcctcttctcctttggcagctcactgtctgcaggctgccgaggaggctgcttcacctacaccatgtctcgaatcaacttgcggatccgggagcagcttttctcctccctgctgcgccaggacctcggtttcttccaggagactaagacaggggagctgaactcacggctgagctcggataccaccctgatgagtaactggcttcctttaaatgccaatgtgctcttgcgaagcctggtgaaagtggtggggctgtatggcttcatgctcagcatatcgcctcgactcaccctcctttctctgctgcacatgcccttcacaatagcagcggagaaggtgtacaacacccgccatcaggaagtgcttcgggagatccaggatgcagtggccagggcggggcaggtggtgcgggaagccgttggagggctgcagaccgttcgcagttttggggccgaggagcatgaagtctgtcgctataaagaggcccttgaacaatgtcggcagctgtattggcggagagacctggaacgcgccttgtacctgctcgtaaggagggtgctgcacttgggggtgcagatgctgatgctgagctgtgggctgcagcagatgcaggatggggagctcacccagggcagcctgctttcctttatgatctaccaggagagcgtggggagctatgtgcagaccctggtatacatatatggggatatgctcagcaacgtgggagctgcagagaaggttttctcctacatggaccgacagccaaatctgccttcacctggcacgcttgcccccaccactctgcagggggttgtgaaattccaagacgtctcctttgcatatcccaatcgccctgacaggcctgtgctcaaggggctgacgtttaccctacgtcctggtgaggtgacggcgctggtgggacccaatgggtctgggaagagcacagtggctgccctgctgcagaatctgtaccagcccacagggggacaggtgctgctggatgaaaagcccatctcacagtatgaacactgctacctgcacagccaggtggtttcagttgggcaggagcctgtgctgttctccggttctgtgaggaacaacattgcttatgggctgcagagctgcgaagatgataaggtgatggcggctgcccaggctgcccacgcagatgacttcatccaggaaatggagcatggaatatacacagatgtaggggagaagggaagccagctggctgcgggacagaaacaacgtctggccattgcccgggcccttgtacgagacccgcgggtcctcatcctggatgaggctactagtgccctagatgtgcagtgcgagcaggccctgcaggactggaattcccgtggggatcgcacagtgctggtgattgctcacaggctgcagacagttcagcgcgcccaccagatcctggtgctccaggagggcaagctgcagaagcttgcccagctctaggagggacaggacctctattcccgcctggtgcagcagcggctgatggactgaggccccagggatactgggccctcttctcaggggcgtctccaggacccagagctgttcctgctttgagtttccctagagctgtgcggccagatagctgttcctgagttgcaggcacgatggagatttggacactgtgtgcttttggtggggtagagaggtggggtggggtggggtgggggctgtctgtgtccaggaaacttaattccctggtgactagagctttgcctggtgatgaggagtattttgtggcataatacatatattttaaaatattttccttcttacatgaactgtatacattcatatagaaaatttagacaatataaaaaagtacaaagaagaaaagtaaaagtacccattgtttcacttcctggagataaccatagttgctattttgctgcctgtcccatcagtcgtttatctgttgtttgagatagaaattaaccaaaaatgacataaatattcatgagattgccttcctatatccttccttgttcctaccagtgtctgctattttgaagaagctagggtctggagggacagagaacagttccctgattaacagtattaatagcgacattggtaacagctaccatttatagagttttaatgggagtaggagctatgctaagtgtttttcatgtattatcgtttttaatcattatccccaaccctatgaggttggttattatccccattttacagatgaggaaactgaagctcaaagaggctcaatgactttcccaaggtggtcgtagtggtggagttggagtttgaacacaggcctgaccctagagtccacaccctgacccaatcaattatattgcatcttgggtccataaaccctaatccataatcccatcaagaaaagctctgctgctcttagctctaaataattcagaatctattctcttctctccagtcccgttgttatagtcttcactcatagacagcccatctgtctcaccctctcctgttgtatccagctccacgacaaacttctgccttccccaacacctttgtgcctttgcatatggtgttttcttgcccattttctgctcgactcgcccctgattttcaagttcaagacttaactcagggttcaggtcttccaggaggccttacttatgtcgtcagtctggggaactctccatgtgcttctatcactgtgcggttacctctttcacagcccttttaaagttctatcttccctttcccaccttttttgaccttccactagaccatgagcacctgggcggaaagccatatatcttattaagctttatatctgctacctggccgagggctaattcatagtggagaataaatagtcaattgaataaatgaataaatatctccaccatcgtactaatcttaatcctccctgcccactcccaccactgaaaatgcaacattgtacacatcactggttgttgggagggacttaccttggaaagttgctattctaggaaagagaaaccttcatattcctggaaacagcaggtagtttccagtgctggcaatgaa

SEQ ID NO: 304236 - DNA, 3894 bp, Homo sapiens
gagccctgacgcccgccctggccgagcgtagctggcggaccagagccggtagcgaggttgggagagacggagcggacctcagcgctgaagcagaagtccccggagctgcggtctccccgccgcggctgagccatgcggctccctgacctgagaccctggacctccctgctgctggtggacgcggctttactgtggctgcttcagggccctctggggactttgcttcctcaagggctgccaggactatggctggaggggaccctgcggctgggagggctgtgggggctgctaaagctaagagggctgctgggatttgtggggacactgctgctcccgctctgtctggccacccccctgactgtctccctgagagccctggtcgcgggggcctcacgtgctcccccagccagagtcgcttcagccccttggagctggctgctggtggggtacggggctgcggggctcagctggtcactgtgggctgttctgagccctcctggagcccaggagaaggagcaggaccaggtgaacaacaaagtcttgatgtggaggctgctgaagctctccaggccggacctgcctctcctcgttgccgccttcttcttccttgtccttgctgttttgggtgagacattaatccctcactattctggtcgtgtgattgacatcctgggaggtgattttgacccccatgcctttgccagtgccatcttcttcatgtgcctcttctcctttggcagctcactgtctgcaggctgccgaggaggctgcttcacctacaccatgtctcgaatcaacttgcggatccgggagcagcttttctcctccctgctgcgccaggacctcggtttcttccaggagactaagacaggggagctgaactcacggctgagctcggataccaccctgatgagtaactggcttcctttaaatgccaatgtgctcttgcgaagcctggtgaaagtggtggggctgtatggcttcatgctcagcatatcgcctcgactcaccctcctttctctgctgcacatgcccttcacaatagcagcggagaaggtgtacaacacccgccatcaggaagtgcttcgggagatccaggatgcagtggccagggcggggcaggtggtgcgggaagccgttggagggctgcagaccgttcgcagttttggggccgaggagcatgaagtctgtcgctataaagaggcccttgaacaatgtcggcagctgtattggcggagagacctggaacgcgccttgtacctgctcgtaaggagggtgctgcacttgggggtgcagatgctgatgctgagctgtgggctgcagcagatgcaggatggggagctcacccagggcagcctgctttcctttatgatctaccaggagagcgtggggagctatgtgcagaccctggtatacatatatggggatatgctcagcaacgtgggagctgcagagaaggttttctcctacatggaccgacagccaaatctgccttcacctggcacgcttgcccccaccactctgcagggggttgtgaaattccaagacgtctcctttgcatatcccaatcgccctgacaggcctgtgctcaaggggctgacgtttaccctacgtcctggtgaggtgacggcgctggtgggacccaatgggtctgggaagagcacagtggctgccctgctgcagaatctgtaccagcccacagggggacaggtgctgctggatgaaaagcccatctcacagtatgaacactgctacctgcacagccaggtggtttcagttgggcaggagcctgtgctgttctccggttctgtgaggaacaacattgcttatgggctgcagagctgcgaagatgataaggtgatggcggctgcccaggctgcccacgcagatgacttcatccaggaaatggagcatggaatatacacagatgtaggggagaagggaagccagctggctgcgggacagaaacaacgtctggccattgcccgggcccttgtacgagacccgcgggtcctcatcctggatgaggctactagtgccctagatgtgcagtgcgagcaggccctgcaggactggaattcccgtggggatcgcacagtgctggtgattgctcacaggctgcagacagttcagcgcgcccaccagatcctggtgctccaggagggcaagctgcagaagcttgcccagctctaggagggacaggacctctattcccgcctggtgcagcagcggctgatggactgaggccccagggatactgggccctcttctcaggggcgtctccaggacccagagctgttcctgctttgagtttccctagagctgtgcggccagatagctgttcctgagttgcaggcacgatggagatttggacactgtgtgcttttggtggggtagagaggtggggtggggtggggtgggggctgtctgtgtccaggaaacttaattccctggtgactagagctttgcctggtgatgaggagtattttgtggcataatacatatattttaaaatattttccttcttacatgaactgtatacattcatatagaaaatttagacaatataaaaaagtacaaagaagaaaagtaaaagtacccattgtttcacttcctggagataaccatagttgctattttgctgcctgtcccatcagtcgtttatctgttgtttgagatagaaattaaccaaaaatgacataaatattcatgagattgccttcctatatccttccttgttcctaccagtgtctgctattttgaagaagctagggtctggagggacagagaacagttccctgattaacagtattaatagcgacattggtaacagctaccatttatagagttttaatgggagtaggagctatgctaagtgtttttcatgtattatcgtttttaatcattatccccaaccctatgaggttggttattatccccattttacagatgaggaaactgaagctcaaagaggctcaatgactttcccaaggtggtcgtagtggtggagttggagtttgaacacaggcctgaccctagagtccacaccctgacccaatcaattatattgcatcttgggtccataaaccctaatccataatcccatcaagaatcccgttgttatagtcttcactcatagacttaagatgatcccatcaccagagaggtttctctaccattagcttccctcttccggccattcttcacaaagtcatttttctaaattctgtgtcacatacgatgatggcatttctggaaattccttcaggtgctctcaagccctgctgcagagatccttttcagagcacacactgttccagcccatctgtctcaccctctcctgttgtatccagctccacgacaaacttctgccttccccaacacctttgtgcctttgcatatggtgttttcttgcccattttctgctcgactcgcccctgattttcaagttcaagacttaactcagggttcaggtcttccaggaggccttacttatgtcgtcagtctggggaactctccatgtgcttctatcactgtgcggttacctctttcacagcccttttaaagttctatcttccctttcccaccttttttgaccttccactagaccatgagcacctgggcggaaagccatatatcttattaagctttatatctgctacctggccgagggctaattcatagtggagaataaatagtcaattgaataaatgaataaatatctccaccatcgtactaatcttaatcctccctgcccactcccaccactgaaaatgcaacattgtacacatcactggttgttgggagggacttaccttggaaagttgctattctaggaaagagaaaccttcatattcctggaaacagcaggtagtttccagtgctggcaatgaa

SEQ ID NO: 304237 - DNA, 180 bp, Homo sapiens
tgtgaggagttgggagggtggtttctggtagaagtgtgtttaattagccggctctcccattcctgttttccagaccctggtatacatatatggggatatgctcagcaacgtgggagctgcagagaaggttttctcctacatggaccgacagccaaatctgccttcacctggcacgcttgc

SEQ ID NO: 304238 - DNA, 486 bp, Homo sapiens
caaatctgccttcacctggcacgcttgcccccaccactctgcagggggttgtgaaattccaagacgtctcctttgcatatcccaatcgccctgacaggcctgtgctcaaggtgcctgaaagagggaggaaacctggacccttgctctctgctgctaatgcataattggacatcacagcctatagttcatttgcctctgagaacctggtcttgcctctgctaagaagagaaatggagggattttgagggagaaggggcaggcccttaactctttttctggttttctaggggctgacgtttaccctacgtcctggtgaggtgacggcgctggtgggacccaatgggtctgggaagagcacagtggctgccctgctgcagaatctgtaccagcccacagggggacaggtgctgctggatgaaaagcccatctcacagtatgaacactgctacctgcacagccaggtgggtgaggagggagaagacaggg

SEQ ID NO: 304239 - DNA, 3216 bp, Homo sapiens
  misc_feature (2040)..(2040): n is a, c, g, or t
tcgatttacaagcacttattttattttacttcatttcacatgcacgtctgttttacgcagttacttgtttacacgctcttcttctagactttgggattccagaagacagaggtttgagtgtaaaacacaaaataacaaaaccacaacaaaaacaactctgtattctcgtccccaccattaccatctctcctttgtgatgtcaaagagaccagaggaagtggacagactcggggaagaataggtaagtattagagacagaaaaagtatgaagtcccttctgtgaggactaacaatagtgatgccattttacaaccttgatgactgtgttctcaagaaacaaagcaaatgtcaaccccgtccatagcttcaacagagcataacagctctaaccgcaacagagcctaacggccctaaccacatctgtccccagttggaaagtgtccaaacagttccaactagccagcacttccccaacccctccccaacagaaactttattataaaagcctcagcttgtaagcgatcaggatctcagccagattcctaactggaactcttcgcaggcttttcctgtaaataaacctgtttggccgtggaattgcctcctgttactcgctctctacgtttatatcttcctaacaccttccggctctaatgttttgggtctcgatgaccatctaactcctaaatgctgggggccgctccccatagaaatgcctcgccggatttctccgcctcgcacccagtgggactgggatttttggccccggggtttgcaataagggagtcaccaagcagcagccacctctggaattcctagaaaggaaagagttgcctggcttcagccagtgggctcagaacggctgacgcatttccggcctttgcggttgatcggtcattggggtgctgcagccccgccacctgttccgtagcttgccggtgccccgaaggctccagaccatgaacatggacattctgaagtgctcttggaggatgtggaacatctgaaggtcaagcaggaaccaacagacatacagcttcagcctatggtgacacagctcagatatgaatctttttgcctccaccaatttcaagaacaagatggtgaaagtatacctgagaaccaggagttggcatcaaagcaagaaatcttaaaagaaatggaacatttgggggatagcaaactccaaagagatgtatctttggattctaagtacagagaaacttgtaaacgagacagcaaggcagaaaagcagcaggcacattccactggagagagacgccacaggtgcaatgaatgtgggaaaagcttcactaagagttcagtactcattgagcaccagagaatccacactggggagaagccatatgaatgtgaagaatgtgggaaggccttcagccggaggtcaagcctgaatgaacatcggcggagccacactggagagaaaccctatcaatgtaaggagtgtgggaaagccttcagtgccagcaatggcctcactcgacacagaagaatccacacaggggaaaaaccatatgaatgcaaagtgtgtgggaaggctttcctcctcagctcatgccttgttcagcatcagaggatacacactggagagaagcgctatcagtgtcgtgagtgtggcaaagccttcattcagaatgcagggcttttccagcatctccgagtccacactggtgagaaaccctatcagtgcagtcagtgcagtaaactctttagtaagcggacacttcttaagaaacatcagaaaatccacactggagagagaccataagggtgatgagtttgggaaagccttcagtcatcattgcaaccttattaggcattttagaatccatactgttccagcagaactggactaattctgtggaccctcagacccctaaatggggccgtcttggaaagtaagattttcaagtggcttattctgttcttataaaatttattttgtattgcattgaaccacttgtctacaaaccaggtgttggtgtctcctgtgtggatgactgtgattgtagggggttnctgggtggccttcttattccctagcctttggtccatttcttatgatttcctttaaaggcaccaaatcttatctggaaataaattgttatggaggggctgtttttgagcaatactgcatattgaacaattctaaaagaccagtatctatgtatacttttaaaaaaaagatttgctaagatcaaaggatattcagaggtgcatctttttctgtaagagtgacattttaaacaaatgtaaggttttggggaataagaatcgtccacattcccacaggaaatcattgctatggtctcccctaggaatgtgatagatagcttctataattatgcagcattatccatagtatgaaacctgtagttttaatggtttagaaatctatgtctcatttcatatctaactcatgtttttgatacgaatcaatatatatgttgatatcatgagttaatatgagtttgacatgaatcatcaacatagtatatacatatcaacataactatgttgatgattcatatcaaattctcaatgcaggtcattactgtaagttttccatttttgttacaaataataagtaagatgatactttaaaatctctgttcttcacaaggtacctctttaattcatagccttttatgtcagcattattcttcttttgggggttggtcagcaactttgagtgccattgcaagcagcatcatttaagtagttttataaagaaaagaagtctgatatcttgggcagcttgctgcttactggggagaccagcatgcttagacacttattgccagggttaaacatatgctctggcaccaagttcaaatctttcctccccatttgtgagctgtgggactttaggcaagttatctaaatgctgctatgctatagtctccccacctgtaaaacagaggatgataccaataccttcctcatagggtacataagattaaataaatacaaacttgtacttaaaatgtagctctcaataaatgtgcattatgatttacatacgaaataatagcatttaacaaatgtaggtagaattttaagtatcatgttaaaattaggatacgaaatgcctctgctgacattcttgttactcttttctccacagtcaaaacctgaatcagaatatttcaaaagagaggaaataaaagttcagcttaaaactgttctgcccta

SEQ ID NO: 304240 - DNA, 3692 bp, Homo sapiens
  misc_feature (2516)..(2516): n is a, c, g, or t
tcgatttacaagcacttattttattttacttcatttcacatgcacgtctgttttacgcagttacttgtttacacgctcttcttctagactttgggattccagaagacagaggtttgagtgtaaaacacaaaataacaaaaccacaacaaaaacaactctgtattctcgtccccaccattaccatctctcctttgtgatgtcaaagagaccagaggaagtggacagactcggggaagaataggtaagtattagagacagaaaaagtatgaagtcccttctgtgaggactaacaatagtgatgccattttacaaccttgatgactgtgttctcaagaaacaaagcaaatgtcaaccccgtccatagcttcaacagagcataacagctctaaccgcaacagagcctaacggccctaaccacatctgtccccagttggaaagtgtccaaacagttccaactagccagcacttccccaacccctccccaacagaaactttattataaaagcctcagcttgtaagcgatcaggatctcagccagattcctaactggaactcttcgcaggcttttcctgtaaataaacctgtttggccgtggaattgcctcctgttactcgctctctacgtttatatcttcctaacaccttccggctctaatgttttgggtctcgatgaccatctaactcctaaatgctgggggccgctccccatagaaatgcctcgccggatttctccgcctcgcacccagtgggactgggatttttggccccggggtttgcaataagggagtcaccaagcagcagccacctctggaattcctagaaaggaaagagttgcctggcttcagccagtgggctcagaacggctgacgcatttccggcctttgcggttgatcggtcattggggtgctgcagccccgccacctgttccgtagcttgccggtgccccgaaggtgtcttctcctaaggaagattaaatcagaaaattttaaatcacagttatccctttacttaaagccagagtaagccttccaaattaaccccaggaatggcttcaacagaggaacagtacgatcttaagattgtgaaagtggaggaagaccctatctgggaccaagaaacccaccttcgagggaacaacttttctggccaagaagcctcccgacaactttttaggcagttttgttaccaagagactcctggtccccgagaagctctgagccggctccgagaactctgtcatcagtggctaaggccagaaatccacaccaaagagcaaatcttggagctgctggtgctggagcaattcctgactatcctgcctgaggagctccaggcctgggtgcgggagcaccatccggagagtggggaggaggctgtggctgtagttgaagatctggaacaagagcttagtgagccagggaaccaggctccagaccatgaacatggacattctgaagtgctcttggaggatgtggaacatctgaaggtcaagcaggaaccaacagacatacagcttcagcctatggtgacacagctcagatatgaatctttttgcctccaccaatttcaagaacaagatggtgaaagtatacctgagaaccaggagttggcatcaaagcaagaaatcttaaaagaaatggaacatttgggggatagcaaactccaaagagatgtatctttggattctaagtacagagaaacttgtaaacgagacagcaaggcagaaaagcagcaggcacattccactggagagagacgccacaggtgcaatgaatgtgggaaaagcttcactaagagttcagtactcattgagcaccagagaatccacactggggagaagccatatgaatgtgaagaatgtgggaaggccttcagccggaggtcaagcctgaatgaacatcggcggagccacactggagagaaaccctatcaatgtaaggagtgtgggaaagccttcagtgccagcaatggcctcactcgacacagaagaatccacacaggggaaaaaccatatgaatgcaaagtgtgtgggaaggctttcctcctcagctcatgccttgttcagcatcagaggatacacactggagagaagcgctatcagtgtcgtgagtgtggcaaagccttcattcagaatgcagggcttttccagcatctccgagtccacactggtgagaaaccctatcagtgcagtcagtgcagtaaactctttagtaagcggacacttcttaagaaacatcagaaaatccacactggagagagaccataagggtgatgagtttgggaaagccttcagtcatcattgcaaccttattaggcattttagaatccatactgttccagcagaactggactaattctgtggaccctcagacccctaaatggggccgtcttggaaagtaagattttcaagtggcttattctgttcttataaaatttattttgtattgcattgaaccacttgtctacaaaccaggtgttggtgtctcctgtgtggatgactgtgattgtagggggttnctgggtggccttcttattccctagcctttggtccatttcttatgatttcctttaaaggcaccaaatcttatctggaaataaattgttatggaggggctgtttttgagcaatactgcatattgaacaattctaaaagaccagtatctatgtatacttttaaaaaaaagatttgctaagatcaaaggatattcagaggtgcatctttttctgtaagagtgacattttaaacaaatgtaaggttttggggaataagaatcgtccacattcccacaggaaatcattgctatggtctcccctaggaatgtgatagatagcttctataattatgcagcattatccatagtatgaaacctgtagttttaatggtttagaaatctatgtctcatttcatatctaactcatgtttttgatacgaatcaatatatatgttgatatcatgagttaatatgagtttgacatgaatcatcaacatagtatatacatatcaacataactatgttgatgattcatatcaaattctcaatgcaggtcattactgtaagttttccatttttgttacaaataataagtaagatgatactttaaaatctctgttcttcacaaggtacctctttaattcatagccttttatgtcagcattattcttcttttgggggttggtcagcaactttgagtgccattgcaagcagcatcatttaagtagttttataaagaaaagaagtctgatatcttgggcagcttgctgcttactggggagaccagcatgcttagacacttattgccagggttaaacatatgctctggcaccaagttcaaatctttcctccccatttgtgagctgtgggactttaggcaagttatctaaatgctgctatgctatagtctccccacctgtaaaacagaggatgataccaataccttcctcatagggtacataagattaaataaatacaaacttgtacttaaaatgtagctctcaataaatgtgcattatgatttacatacgaaataatagcatttaacaaatgtaggtagaattttaagtatcatgttaaaattaggatacgaaatgcctctgctgacattcttgttactcttttctccacagtcaaaacctgaatcagaatatttcaaaagagaggaaataaaagttcagcttaaaactgttctgcccta

SEQ ID NO: 304241 - DNA, 3044 bp, Homo sapiens
  misc_feature (1868)..(1868): n is a, c, g, or t
agagaaaaactgctgaccctgtaagagagaactggccatcttgcagacagacagagccccgagtgttctttcaactacctgccacccatccaacaactcccctcggacctcagtatgggctggaacctgacacttggcatgacagtgactttgggattccagaagacagaggtttgagtgtaaaacacaaaataacaaaaccacaacaaaaacaactctgtattctcgtccccaccattaccatctctcctttgtgatgtcaaagagaccagaggaagtggacagactcggggaagaataggtgtcttctcctaaggaagattaaatcagaaaattttaaatcacagttatccctttacttaaagccagagtaagccttccaaattaaccccaggaatggcttcaacagaggaacagtacgatcttaagattgtgaaagtggaggaagaccctatctgggaccaagaaacccaccttcgagggaacaacttttctggccaagaagcctcccgacaactttttaggcagttttgttaccaagagactcctggtccccgagaagctctgagccggctccgagaactctgtcatcagtggctaaggccagaaatccacaccaaagagcaaatcttggagctgctggtgctggagcaattcctgactatcctgcctgaggagctccaggcctgggtgcgggagcaccatccggagagtggggaggaggctgtggctgtagttgaagatctggaacaagagcttagtgagccagggaaccaggctccagaccatgaacatggacattctgaagtgctcttggaggatgtggaacatctgaaggtcaagcaggaaccaacagacatacagcttcagcctatggtgacacagctcagatatgaatctttttgcctccaccaatttcaagaacaagatggtgaaagtatacctgagaaccaggagttggcatcaaagcaagaaatcttaaaagaaatggaacatttgggggatagcaaactccaaagagatgtatctttggattctaagtacagagaaacttgtaaacgagacagcaaggcagaaaagcagcaggcacattccactggagagagacgccacaggtgcaatgaatgtgggaaaagcttcactaagagttcagtactcattgagcaccagagaatccacactggggagaagccatatgaatgtgaagaatgtgggaaggccttcagccggaggtcaagcctgaatgaacatcggcggagccacactggagagaaaccctatcaatgtaaggagtgtgggaaagccttcagtgccagcaatggcctcactcgacacagaagaatccacacaggggaaaaaccatatgaatgcaaagtgtgtgggaaggctttcctcctcagctcatgccttgttcagcatcagaggatacacactggagagaagcgctatcagtgtcgtgagtgtggcaaagccttcattcagaatgcagggcttttccagcatctccgagtccacactggtgagaaaccctatcagtgcagtcagtgcagtaaactctttagtaagcggacacttcttaagaaacatcagaaaatccacactggagagagaccataagggtgatgagtttgggaaagccttcagtcatcattgcaaccttattaggcattttagaatccatactgttccagcagaactggactaattctgtggaccctcagacccctaaatggggccgtcttggaaagtaagattttcaagtggcttattctgttcttataaaatttattttgtattgcattgaaccacttgtctacaaaccaggtgttggtgtctcctgtgtggatgactgtgattgtagggggttnctgggtggccttcttattccctagcctttggtccatttcttatgatttcctttaaaggcaccaaatcttatctggaaataaattgttatggaggggctgtttttgagcaatactgcatattgaacaattctaaaagaccagtatctatgtatacttttaaaaaaaagatttgctaagatcaaaggatattcagaggtgcatctttttctgtaagagtgacattttaaacaaatgtaaggttttggggaataagaatcgtccacattcccacaggaaatcattgctatggtctcccctaggaatgtgatagatagcttctataattatgcagcattatccatagtatgaaacctgtagttttaatggtttagaaatctatgtctcatttcatatctaactcatgtttttgatacgaatcaatatatatgttgatatcatgagttaatatgagtttgacatgaatcatcaacatagtatatacatatcaacataactatgttgatgattcatatcaaattctcaatgcaggtcattactgtaagttttccatttttgttacaaataataagtaagatgatactttaaaatctctgttcttcacaaggtacctctttaattcatagccttttatgtcagcattattcttcttttgggggttggtcagcaactttgagtgccattgcaagcagcatcatttaagtagttttataaagaaaagaagtctgatatcttgggcagcttgctgcttactggggagaccagcatgcttagacacttattgccagggttaaacatatgctctggcaccaagttcaaatctttcctccccatttgtgagctgtgggactttaggcaagttatctaaatgctgctatgctatagtctccccacctgtaaaacagaggatgataccaataccttcctcatagggtacataagattaaataaatacaaacttgtacttaaaatgtagctctcaataaatgtgcattatgatttacatacgaaataatagcatttaacaaatgtaggtagaattttaagtatcatgttaaaattaggatacgaaatgcctctgctgacattcttgttactcttttctccacagtcaaaacctgaatcagaatatttcaaaagagaggaaataaaagttcagcttaaaactgttctgcccta

SEQ ID NO: 304242 - DNA, 3478 bp, Homo sapiens
  misc_feature (2516)..(2516): n is a, c, g, or t
tcgatttacaagcacttattttattttacttcatttcacatgcacgtctgttttacgcagttacttgtttacacgctcttcttctagactttgggattccagaagacagaggtttgagtgtaaaacacaaaataacaaaaccacaacaaaaacaactctgtattctcgtccccaccattaccatctctcctttgtgatgtcaaagagaccagaggaagtggacagactcggggaagaataggtaagtattagagacagaaaaagtatgaagtcccttctgtgaggactaacaatagtgatgccattttacaaccttgatgactgtgttctcaagaaacaaagcaaatgtcaaccccgtccatagcttcaacagagcataacagctctaaccgcaacagagcctaacggccctaaccacatctgtccccagttggaaagtgtccaaacagttccaactagccagcacttccccaacccctccccaacagaaactttattataaaagcctcagcttgtaagcgatcaggatctcagccagattcctaactggaactcttcgcaggcttttcctgtaaataaacctgtttggccgtggaattgcctcctgttactcgctctctacgtttatatcttcctaacaccttccggctctaatgttttgggtctcgatgaccatctaactcctaaatgctgggggccgctccccatagaaatgcctcgccggatttctccgcctcgcacccagtgggactgggatttttggccccggggtttgcaataagggagtcaccaagcagcagccacctctggaattcctagaaaggaaagagttgcctggcttcagccagtgggctcagaacggctgacgcatttccggcctttgcggttgatcggtcattggggtgctgcagccccgccacctgttccgtagcttgccggtgccccgaaggtgtcttctcctaaggaagattaaatcagaaaattttaaatcacagttatccctttacttaaagccagagtaagccttccaaattaaccccaggaatggcttcaacagaggaacagtacgatcttaagattgtgaaagtggaggaagaccctatctgggaccaagaaacccaccttcgagggaacaacttttctggccaagaagcctcccgacaactttttaggcagttttgttaccaagagactcctggtccccgagaagctctgagccggctccgagaactctgtcatcagtggctaaggccagaaatccacaccaaagagcaaatcttggagctgctggtgctggagcaattcctgactatcctgcctgaggagctccaggcctgggtgcgggagcaccatccggagagtggggaggaggctgtggctgtagttgaagatctggaacaagagcttagtgagccagggaaccaggctccagaccatgaacatggacattctgaagtgctcttggaggatgtggaacatctgaaggtcaagcaggaaccaacagacatacagcttcagcctatggtgacacagctcagatatgaatctttttgcctccaccaatttcaagaacaagatggtgaaagtatacctgagaaccaggagttggcatcaaagcaagaaatcttaaaagaaatggaacatttgggggatagcaaactccaaagagatgtatctttggattctaagtacagagaaacttgtaaacgagacagcaaggcagaaaagcagcaggcacattccactggagagagacgccacaggtgcaatgaatgtgggaaaagcttcactaagagttcagtactcattgagcaccagagaatccacactggggagaagccatatgaatgtgaagaatgtgggaaggccttcagccggaggtcaagcctgaatgaacatcggcggagccacactggagagaaaccctatcaatgtaaggagtgtgggaaagccttcagtgccagcaatggcctcactcgacacagaagaatccacacaggggaaaaaccatatgaatgcaaagtgtgtgggaaggctttcctcctcagctcatgccttgttcagcatcagaggatacacactggagagaagcgctatcagtgtcgtgagtgtggcaaagccttcattcagaatgcagggcttttccagcatctccgagtccacactggtgagaaaccctatcagtgcagtcagtgcagtaaactctttagtaagcggacacttcttaagaaacatcagaaaatccacactggagagagaccataagggtgatgagtttgggaaagccttcagtcatcattgcaaccttattaggcattttagaatccatactgttccagcagaactggactaattctgtggaccctcagacccctaaatggggccgtcttggaaagtaagattttcaagtggcttattctgttcttataaaatttattttgtattgcattgaaccacttgtctacaaaccaggtgttggtgtctcctgtgtggatgactgtgattgtagggggttnctgggtggccttcttattccctagcctttggtccatttcttatgatttcctttaaaggcaccaaatcttatctggaaataaattgttatggaggggctgtttttgagcaatactgcatattgaacaattctaaaagaccagtatctatgtatacttttaaaaaaaagatttgctaagatcaaaggatattcagaggtgcatctttttctgtaagagtgacattttaaacaaatgtaaggttttggggaataagaatcgtccacattcccacaggaaatcattgctatggtctcccctaggaatgtgatagatagcttctataattatgcagcattatccatagtatgaaacctgtagttttaatggtttagaaatctatgtctcatttcatatctaactcatgtttttgatacgaatcaatatatatgttgatatcatgagttaatatgagtttgacatgaatcatcaacatagtatatacatatcaacataactatgttgatgattcatatcaaattctcaatgcaggtcattactgtaagttttccatttttgttacaaataataagtaagatgatactttaaaatctctgttcttcacaaggtacctctttaattcatagccttttatgtcagcattattcttcttttgggggttggtcagcaactttgagtgccattgcaagcagcatcatttaagtagttttataaagaaaagaagtctgatatcttgggcagcttgctgcttactggggagaccagcatgcttagacacttattgccagggttaaacatatgctctggcaccaagttcaaatctttcctccccatttgtgagctgtgggactttaggcaagttatctaaatgctgctatgctatagtctccccacctgtaaaacagaggatgataccaataccttcctcatagggtacataagattaaataaatacaaacttgtac

SEQ ID NO: 304243 - DNA, 3266 bp, Homo sapiens
  misc_feature (2040)..(2040): n is a, c, g, or t
tcgatttacaagcacttattttattttacttcatttcacatgcacgtctgttttacgcagttacttgtttacacgctcttcttctagactttgggattccagaagacagaggtttgagtgtaaaacacaaaataacaaaaccacaacaaaaacaactctgtattctcgtccccaccattaccatctctcctttgtgatgtcaaagagaccagaggaagtggacagactcggggaagaataggtaagtattagagacagaaaaagtatgaagtcccttctgtgaggactaacaatagtgatgccattttacaaccttgatgactgtgttctcaagaaacaaagcaaatgtcaaccccgtccatagcttcaacagagcataacagctctaaccgcaacagagcctaacggccctaaccacatctgtccccagttggaaagtgtccaaacagttccaactagccagcacttccccaacccctccccaacagaaactttattataaaagcctcagcttgtaagcgatcaggatctcagccagattcctaactggaactcttcgcaggcttttcctgtaaataaacctgtttggccgtggaattgcctcctgttactcgctctctacgtttatatcttcctaacaccttccggctctaatgttttgggtctcgatgaccatctaactcctaaatgctgggggccgctccccatagaaatgcctcgccggatttctccgcctcgcacccagtgggactgggatttttggccccggggtttgcaataagggagtcaccaagcagcagccacctctggaattcctagaaaggaaagagttgcctggcttcagccagtgggctcagaacggctgacgcatttccggcctttgcggttgatcggtcattggggtgctgcagccccgccacctgttccgtagcttgccggtgccccgaaggctccagaccatgaacatggacattctgaagtgctcttggaggatgtggaacatctgaaggtcaagcaggaaccaacagacatacagcttcagcctatggtgacacagctcagatatgaatctttttgcctccaccaatttcaagaacaagatggtgaaagtatacctgagaaccaggagttggcatcaaagcaagaaatcttaaaagaaatggaacatttgggggatagcaaactccaaagagatgtatctttggattctaagtacagagaaacttgtaaacgagacagcaaggcagaaaagcagcaggcacattccactggagagagacgccacaggtgcaatgaatgtgggaaaagcttcactaagagttcagtactcattgagcaccagagaatccacactggggagaagccatatgaatgtgaagaatgtgggaaggccttcagccggaggtcaagcctgaatgaacatcggcggagccacactggagagaaaccctatcaatgtaaggagtgtgggaaagccttcagtgccagcaatggcctcactcgacacagaagaatccacacaggggaaaaaccatatgaatgcaaagtgtgtgggaaggctttcctcctcagctcatgccttgttcagcatcagaggatacacactggagagaagcgctatcagtgtcgtgagtgtggcaaagccttcattcagaatgcagggcttttccagcatctccgagtccacactggtgagaaaccctatcagtgcagtcagtgcagtaaactctttagtaagcggacacttcttaagaaacatcagaaaatccacactggagagagaccataagggtgatgagtttgggaaagccttcagtcatcattgcaaccttattaggcattttagaatccatactgttccagcagaactggactaattctgtggaccctcagacccctaaatggggccgtcttggaaagtaagattttcaagtggcttattctgttcttataaaatttattttgtattgcattgaaccacttgtctacaaaccaggtgttggtgtctcctgtgtggatgactgtgattgtagggggttnctgggtggccttcttattccctagcctttggtccatttcttatgatttcctttaaaggcaccaaatcttatctggaaataaattgttatggaggggctgtttttgagcaatactgcatattgaacaattctaaaagaccagtatctatgtatacttttaaaaaaaagatttgctaagatcaaaggatattcagaggtgcatctttttctgtaagagtgacattttaaacaaatgtaaggttttggggaataagaatcgtccacattcccacaggaaatcattgctatggtctcccctaggaatgtgatagatagcttctataattatgcagcattatccatagtatgaaacctgtagttttaatggtttagaaatctatgtctcatttcatatctaactcatgtttttgatacgaatcaatatatatgttgatatcatgagttaatatgagtttgacatgaatcatcaacatagtatatacatatcaacataactatgttgatgattcatatcaaattctcaatgcaggtcattactgtaagttttccatttttgttacaaataataagtaagatgatactttaaaatctctgttcttcacaaggtacctctttaattcatagccttttatgtcagcattattcttcttttgggggttggtcagcaactttgagtgccattgcaagcagcatcatttaagtagttttataaagaaaagaagtctgatatcttgggcagcttgctgcttactggggagaccagcatgcttagacacttattgccagggttaaacatatgctctggcaccaagttcaaatctttcctccccatttgtgagctgtgggactttaggcaagttatctaaatgctgctatgctatagtctccccacctgtaaaacagaggatgataccaataccttcctcatagggtacataagattaaataaatacaaacttgtacttaaaatgtagctctcaataaatgtgcattatgatttacatacgaaataatagcatttaacaaatgtaggtagaattttaagtatcatgttaaaattaggatacgaaatgcctctgctgacattcttgttactcttttctccacagtcaaaacctgaatcagaatatttcaaaagagaggaaataaaagttcagcttaaaactgttctgccctaaaaatttggctttgaagtttatttttaaagcgttaaagaatacatacata

SEQ ID NO: 304244 - DNA, 2037 bp, Homo sapiens
tcgatttacaagcacttattttattttacttcatttcacatgcacgtctgttttacgcagttacttgtttacacgctcttcttctagactttgggattccagaagacagaggtttgagtgtaaaacacaaaataacaaaaccacaacaaaaacaactctgtattctcgtccccaccattaccatctctcctttgtgatgtcaaagagaccagaggaagtggacagactcggggaagaataggtaagtattagagacagaaaaagtatgaagtcccttctgtgaggactaacaatagtgatgccattttacaaccttgatgactgtgttctcaagaaacaaagcaaatgtcaaccccgtccatagcttcaacagagcataacagctctaaccgcaacagagcctaacggccctaaccacatctgtccccagttggaaagtgtccaaacagttccaactagccagcacttccccaacccctccccaacagaaactttattataaaagcctcagcttgtaagcgatcaggatctcagccagattcctaactggaactcttcgcaggcttttcctgtaaataaacctgtttggccgtggaattgcctcctgttactcgctctctacgtttatatcttcctaacaccttccggctctaatgttttgggtctcgatgaccatctaactcctaaatgctgggggccgctccccatagaaatgcctcgccggatttctccgcctcgcacccagtgggactgggatttttggccccggggtttgcaataagggagtcaccaagcagcagccacctctggaattcctagaaaggaaagagttgcctggcttcagccagtgggctcagaacggctgacgcatttccggcctttgcggttgatcggtcattggggtgctgcagccccgccacctgttccgtagcttgccggtgccccgaaggctccagaccatgaacatggacattctgaagtgctcttggaggatgtggaacatctgaaggtcaagcaggaaccaacagacatacagcttcagcctatggtgacacagctcagatatgaatctttttgcctccaccaatttcaagaacaagatggtgaaagtatacctgagaaccaggagttggcatcaaagcaagaaatcttaaaagaaatggaacatttgggggatagcaaactccaaagagatgtatctttggattctaagtacagagaaacttgtaaacgagacagcaaggcagaaaagcagcaggcacattccactggagagagacgccacaggtgcaatgaatgtgggaaaagcttcactaagagttcagtactcattgagcaccagagaatccacactggggagaagccatatgaatgtgaagaatgtgggaaggccttcagccggaggtcaagcctgaatgaacatcggcggagccacactggagagaaaccctatcaatgtaaggagtgtgggaaagccttcagtgccagcaatggcctcactcgacacagaagaatccacacaggggaaaaaccatatgaatgcaaagtgtgtgggaaggctttcctcctcagctcatgccttgttcagcatcagaggatacacactggagagaagcgctatcagtgtcgtgagtgtggcaaagccttcattcagaatgcagggcttttccagcatctccgagtccacactggtgagaaaccctatcagtgcagtcagtgcagtaaactctttagtaagcggacacttcttaagaaacatcagaaaatccacactggagagagaccataagggtgatgagtttgggaaagccttcagtcatcattgcaaccttattaggcattttagaatccatactgttccagcagaactggactaattctgtggaccctcagacccctaaatggggccgtcttggaaatcaaaacctgaatcagaatatttcaaaagagaggaaataaaagttcagcttaaaactgttctgccctaaaaatttggctttgaagtttatttttaaagcgttaaagaatacatacata

SEQ ID NO: 304245 - DNA, 1809 bp, Homo sapiens
tcgatttacaagcacttattttattttacttcatttcacatgcacgtctgttttacgcagttacttgtttacacgctcttcttctagactttgggattccagaagacagaggtttgagtgtaaaacacaaaataacaaaaccacaacaaaaacaactctgtattctcgtccccaccattaccatctctcctttgtgatgtcaaagagaccagaggaagtggacagactcggggaagaataggtaagtattagagacagaaaaagtatgaagtcccttctgtgaggactaacaatagtgatgccattttacaaccttgatgactgtgttctcaagaaacaaagcaaatgtcaaccccgtccatagcttcaacagagcataacagctctaaccgcaacagagcctaacggccctaaccacatctgtccccagttggaaagtgtccaaacagttccaactagccagcacttccccaacccctccccaacagaaactttattataaaagcctcagcttgtaagcgatcaggatctcagccagattcctaactggaactcttcgcaggcttttcctgtaaataaacctgtttggccgtggaattgcctcctgttactcgctctctacgtttatatcttcctaacaccttccggctctaatgttttgggtctcgatgaccatctaactcctaaatgctgggggccgctccccatagaaatgcctcgccggatttctccgcctcgcacccagtgggactgggatttttggccccggggtttgcaataagggagtcaccaagcagcagccacctctggaattcctagaaaggaaagagttgcctggcttcagccagtgggctcagaacggctgacgcatttccggcctttgcggttgatcggtcattggggtgctgcagccccgccacctgttccgtagcttgccggtgccccgaaggctccagaccatgaacatggacattctgaagtgctcttggaggatgtggaacatctgaaggtcaagcaggaaccaacagacatacagcttcagcctatggtgacacagctcagatatgaatctttttgcctccaccaatttcaagaacaagatggtgaaagtatacctgagaaccaggagttggcatcaaagcaagaaatcttaaaagaaatggaacatttgggggatagcaaactccaaagagatgtatctttggattctaagtacagagaaacttgtaaacgagacagcaaggcagaaaagcagcaggcacattccactggagagagacgccacaggtgcaatgaatgtgggaaaagcttcactaagagttcagtactcattgagcaccagagaatccacactggggagaagccatatgaatgtgaagaatgtgggaaggccttcagccggaggtcaagcctgaatgaacatcggcggagccacactggagagaaaccctatcaatgtaaggagtgtgggaaagccttcagtgccagcaatggcctcactcgacacagaagaatccacacaggggaaaaaccatatgaatgcaaagtgtgtgggaaggctttcctcctcagctcatgccttgttcagcatcagaggatacacactggagagaagcgctatcagtgtcgtgagtgtggcaaagccttcattcagaatgcagggcttttccagcatctccgagtccacactgtcaaaacctgaatcagaatatttcaaaagagaggaaataaaagttcagcttaaaactgttctgccctaaaaatttggctttgaagtttatttttaaagcgttaaagaatacatacata

SEQ ID NO: 304246 - DNA, 2051 bp, Homo sapiens
tcgatttacaagcacttattttattttacttcatttcacatgcacgtctgttttacgcagttacttgtttacacgctcttcttctagactttgggattccagaagacagaggtttgagtgtaaaacacaaaataacaaaaccacaacaaaaacaactctgtattctcgtccccaccattaccatctctcctttgtgatgtcaaagagaccagaggaagtggacagactcggggaagaataggtaagtattagagacagaaaaagtatgaagtcccttctgtgaggactaacaatagtgatgccattttacaaccttgatgactgtgttctcaagaaacaaagcaaatgtcaaccccgtccatagcttcaacagagcataacagctctaaccgcaacagagcctaacggccctaaccacatctgtccccagttggaaagtgtccaaacagttccaactagccagcacttccccaacccctccccaacagaaactttattataaaagcctcagcttgtaagcgatcaggatctcagccagattcctaactggaactcttcgcaggcttttcctgtaaataaacctgtttggccgtggaattgcctcctgttactcgctctctacgtttatatcttcctaacaccttccggctctaatgttttgggtctcgatgaccatctaactcctaaatgctgggggccgctccccatagaaatgcctcgccggatttctccgcctcgcacccagtgggactgggatttttggccccggggtttgcaataagggagtcaccaagcagcagccacctctggaattcctagaaaggaaagagttgcctggcttcagccagtgggctcagaacggctgacgcatttccggcctttgcggttgatcggtcattggggtgctgcagccccgccacctgttccgtagcttgccggtgccccgaaggtgtcttctcctaaggaagattaaatcagaaaattttaaatcacagttatccctttacttaaagccagagtaagccttccaaattaaccccaggaatggcttcaacagaggaacagtacgatcttaagattgtgaaagtggaggaagaccctatctgggaccaagaaacccaccttcgagggaacaacttttctggccaagaagcctcccgacaactttttaggcagttttgttaccaagagactcctggtccccgagaagctctgagccggctccgagaactctgtcatcagtggctaaggccagaaatccacaccaaagagcaaatcttggagctgctggtgctggagcaattcctgactatcctgcctgaggagctccaggcctgggtgcgggagcaccatccggagagtggggaggaggctgtggctgtagttgaagatctggaacaagagcttagtgagccagggaaccaggctccagaccatgaacatggacattctgaagtgctcttggaggatgtggaacatctgaaggtcaagcaggaaccaacagacatacagcttcagcctatggtgacacagctcagatatgaatctttttgcctccaccaatttcaagaacaagatggtgaaagtatacctgagaaccaggagttggcatcaaagcaagaaatcttaaaagaaatggaacatttgggggatagcaaactccaaagagatgtatctttggattctaagtacagagaaacttgtaaacgagacagcaaggcagaaaagcagcaggcacattccactggagagagacgccacaggtgcaatgaatgtgggaaaagcttcactaagagttcagtactcattgagcaccagagaatccacactggggagaagccatatgaatgtgaagaatgtgggaaggccttcagccggaggtcaagcctgaatgaacatcggcggagccacactggagagaaaccctatcaattcaaaacctgaatcagaatatttcaaaagagaggaaataaaagttcagcttaaaactgttctgccctaaaaatttggctttgaagtttatttttaaagcgttaaagaatacatacata

SEQ ID NO: 304247 - DNA, 250 bp, Homo sapiens
gacttgtgcccagagagagagagaaaaactgctgaccctgtaagagagaactggccatcttgcagacagacagaggtgagccaggaattaacaagcatgccaaggagtacagctgtaagtgtgggagcggcaggagccacagagccgtttgctgagaagggctgcggtcggaggaggcagccgagacagaggcagacagtgtgagagctgcagcagctgctgctgaataaaatcatattttacctgccta

SEQ ID NO: 304248 - DNA, 808 bp, Homo sapiens
ccctccccaacagaaactttattataaaagcctcagcttgtaagcgatcaggatctcagccagattcctaactggaactcttcgcaggcttttcctgtaaataaacctgtttggccgtggaattgcctcctgttactcgctctctacgtttatatcttcctaacaccttccggctctaatgttttgggtctcgatgaccatctaactcctaaatgctgggggccgctccccatagaaatgcctcgccggatttctccgcctcgcacccagtgggactgggatttttggccccggggtttgcaataagggagtcaccaagcagcagccacctctggaattcctagaaaggaaagagttgcctggcttcagccagtgggctcagaacggctgacgcatttccggcctttgcggttgatcggtcattggggtgctgcagccccgccacctgttccgtagcttgccggtgccccgaaggtgagtcttggccccttgtcgcgacccgccaggttcccagaagatttcaggtctgtgccttggagtaggcggggagggaacgtctgcgcaggcgtgacccccgcccctacacattcactggcctgaagcccccgtggagtaggtggaggtcccgccccttatcctgaagattaaacagcctttctttgtctgagataacgcccggagttctttgtcctgcctccaagacgataaaggagcgcagacacaaaggtgaggttagagcgaaagtttaataagcgaaaggaaaaagctctctgccagcagagaaggggtcccgaccgggagtacccat

SEQ ID NO: 304249 - DNA, 2424 bp, Homo sapiens
cagcaggggaagtgtgtacactatgtgcactgagggtgacacttctgagtgtgggggccctggctagggagtgggactggcaggcttgggtggggttcccaagctttaatcttcctaccccacagaatgttttctctgcccttcaggcagcctgagccgggcagggcccctgcctctgctacggcagcccccgatcatgcagcccccactggacctcaagcagatcctgcccttcccactcgagccagcccctacccttggcctcttcagcaactacagcaccatggaccctgtgcagaaggctgtgctctcccacacttttgggggacccttgctcaagaccaagcggcccgtcatttcctgtaatatctgtcaaatccgcttcaattctcagagccaggctgaggcgcactacaaaggtaatcgccacgcccgacgagtcaaaggcattgaggctgccaagaccagaggcagggagcctggcgtccgagaacctggagacccagctcccccaggcagcaccccaacaaatggggatggtgtagcaccccgtccagtttccatggagaatggactggggccagccccaggatccccagagaaacagcctggctccccatcccctcccagcattccggagactggtcagggtgtaaccaagggtgaaggggggactccagccccggcttccttgcctgggggtagcaaggaagaggaggagaaagccaagcggctgctctactgtgctctgtgcaaggtggctgtgaactccctgtcccagcttgaggcacataacaaaggtactaagcacaagacaattctggaggcccgaagtgggctcgggcccatcaaagcttaccctcggctggggcctcccaccccgggggaaccagaggctcctgcccaggaccgaactttccactgtgagatctgcaatgtcaaggtcaactcggaggtccaactgaaacagcacatctccagccggcggcaccgagacggcgtggccgggaagcccaacccactactgagccgtcacaagaagtctaggggcgccggggagctggcgggcacgctgactttctccaaggagctgcccaagtccctggcgggcggcctgctccccagccccctggcggtggctgcagtgatggcagcggcagcaggctcgccgctgtccctgcgcccggctccagccgcacctcttctccagggaccgccgatcactcaccctctgcttcacccggcccccggacccatccgaactgcgcacggacccatcctcttctccccgtactgacctcaaccctgaacccctcccattcaactccccacctccagccgggacccaggcgtccgggctcccagcccgcccctcctcccggcactccctaaatgatctctccttccccccccccaccccgagatacggggttccaggaaaggggaggggtagcgggggaggggggcttcagaagggggggaacaccccagatctcagggaaccccgccccctgcctttccctctcccctagaaaagggggggccgtctcacccccgagcccccttggagacaccccccctcccaaaagccatgtccatccagcccttccccccaaacctagcacaaaacggggttcacaagccatggtcggggtccgggggggacagaaatggattttcttggcaataagcggactctgggactccggctccctaccccaaactgaagcgcttccgtgaacacccccgtcctccgtagggggaggggagcaggcgggatcctgggtccctcataagcactttggttttaccgcctgcaacctcactgtgcccgccccgcaccatgccctagccccaggtctagccgggcccattgcagggggcagcacttgggggcatctccggcacttgggtgggaccaaggagatgccaccatagacctttccctcgccttcttcctccctagtccgggttccattcttttcaccagcacccatcgcccaaggggtaccgaggggggcaaggggtgtccagtccaagcccacccccgcctcgccttccgcaaaactgtgagcaaaaagcaatagaagcctcgcccccgcccttccccttcgcaggattcgccgagtctgtagcctccccgatccaagttcctagacctcatggctgtcccctcccaccagtcacctccactgcacaactcgggcgggggtgtgacacctctcccccacccccgactccgtggtttccgtatcgtcaacccttcagccgccgacccgggaggggtctggcctacactggtcttccccttcccatcaactctttctgcttgacaatgtagcaacccaggccccccacccacggtcctcccctttttcctctccctgacaataaagtctgaatttgttctgccctccgccccta

SEQ ID NO: 304250 - DNA, 2086 bp, Homo sapiens
ggacagagcgacgcggaaccccgggcgcctgggtccccagcatgatcctcggcagcctgagccgggcagggcccctgcctctgctacggcagcccccgatcatgcagcccccactggacctcaagcagatcctgcccttcccactcgagccagcccctacccttggcctcttcagcaactacagcaccatggaccctgtgcagaaggctgtgctctcccacacttttgggggacccttgctcaagaccaagcggcccgtcatttcctgtaatatctgtcaaatccgcttcaattctcagagccaggctgaggcgcactacaaaggtaatcgccacgcccgacgagtcaaaggcattgaggctgccaagaccagaggcagggagcctggcgtccgagaacctggagacccagctcccccaggcagcaccccaacaaatggggatggtgtagcaccccgtccaggtactaagcacaagacaattctggaggcccgaagtgggctcgggcccatcaaagcttaccctcggctggggcctcccaccccgggggaaccagaggctcctgcccaggaccgaactttccactgtgagatctgcaatgtcaaggtcaactcggaggtccaactgaaacagcacatctccagccggcggcaccgagacggcgtggccgggaagcccaacccactactgagccgtcacaagaagtctaggggcgccggggagctggcgggcacgctgactttctccaaggagctgcccaagtccctggcgggcggcctgctccccagccccctggcggtggctgcagtgatggcagcggcagcaggctcgccgctgtccctgcgcccggctccagccgcacctcttctccagggaccgccgatcactcaccctctgcttcacccggcccccggacccatccgaactgcgcacggacccatcctcttctccccgtactgacctcaaccctgaacccctcccattcaactccccacctccagccgggacccaggcgtccgggctcccagcccgcccctcctcccggcactccctaaatgatctctccttccccccccccaccccgagatacggggttccaggaaaggggaggggtagcgggggaggggggcttcagaagggggggaacaccccagatctcagggaaccccgccccctgcctttccctctcccctagaaaagggggggccgtctcacccccgagcccccttggagacaccccccctcccaaaagccatgtccatccagcccttccccccaaacctagcacaaaacggggttcacaagccatggtcggggtccgggggggacagaaatggattttcttggcaataagcggactctgggactccggctccctaccccaaactgaagcgcttccgtgaacacccccgtcctccgtagggggaggggagcaggcgggatcctgggtccctcataagcactttggttttaccgcctgcaacctcactgtgcccgccccgcaccatgccctagccccaggtctagccgggcccattgcagggggcagcacttgggggcatctccggcacttgggtgggaccaaggagatgccaccatagacctttccctcgccttcttcctccctagtccgggttccattcttttcaccagcacccatcgcccaaggggtaccgaggggggcaaggggtgtccagtccaagcccacccccgcctcgccttccgcaaaactgtgagcaaaaagcaatagaagcctcgcccccgcccttccccttcgcaggattcgccgagtctgtagcctccccgatccaagttcctagacctcatggctgtcccctcccaccagtcacctccactgcacaactcgggcgggggtgtgacacctctcccccacccccgactccgtggtttccgtatcgtcaacccttcagccgccgacccgggaggggtctggcctacactggtcttccccttcccatcaactctttctgcttgacaatgtagcaacccaggccccccacccacggtcctcccctttttcctctccctgacaataaagtctgaatttgttctgccctccgccccta

SEQ ID NO: 304251 - DNA, 1085 bp, Homo sapiens
ggagttcccctcccacaagctccccacccccactgccagcctcgccatgacccggaaactggatcagctgctggagcaagaatgggagcgctagagtttcccctgtacagaggccagaacccagcactgaggcctagggctgttgcatctttaatcaagccatgaattatagagcagcctacatccctgtttcttccctctccggttctgatgtttctatttcccttttgccatgcctgtgtttatctctccagacctttcctcaccctgcctctgccccttcctagggctctttcgtgtacttcctgggggctgggcaagactccagggaaggggctgtcctggcaggaagcccagactggctggcaggccactgaggggtatatccttgttgcatgcctctccccctggctgggctggctgccagcttcaccctgaaggtaggctggtgaggctggaccccttggccattcccagctaatggagaatgagccaagcattggagtttcacacccagcctgcggcagctggaccacatctggctctggaccagggcatgagagcatgcatgttgtaacagggtggggactcctggtcccttgccctccaggaaatggggggggtctcttccacatgaagagtcttctccaagagccatctagggtgatccccatgtttctcccccaacaacagtttccatggagaatggactggggccagccccaggatccccagagaaacagcgggcatcaagatatgatggcagcagtacggagtgttgttcaaggaataaccaaagagtaaaggatgttgagcaagaagcgtagattctaatgtatagactagaagataagcagatattagatagaacattacaagtgggaagcaccatgatttggacaagaatgtgtgataccctggacctctcttaataccattcacgagatcagcggtggatacaaccgtgtgaagagataactgtcattacacaaggtatatactagataagtctcaattctaagacataacgaggcagtgacagaatgatacagccaaatgtatctggtcgagaatcaagatctcac

SEQ ID NO: 304252 - DNA, 357 bp, Homo sapiens
taaggaaaaaaactttattccttttttcctaggaacttgtcaggatactttagtgaccattccctcactataactctcacccagacccacctaactgatgcataagaagagccactagctgatgtggcccacagctcagactgagccagcatggcttgtgcaggggtaggtagcacagcatcatccagacactgcctcccctggtagcttccattacatcatggcctacactggtcttccccttcccatcaactctttctgcttgacaatgtagcaacccaggccccccacccacggtcctcccctttttcctctccctgacaataaagtctgaatttgttctgccctccgccccta

SEQ ID NO: 304253 - DNA, 2277 bp, Homo sapiens
ggccgggccgcacagccccgagccgcccgggcaacgagcgccgcgtccctggcctgcccggcccggccaggcgcggccccccagcccgggtccgccaccccgggccatggagccgcggcccccagggtctcgcaggatggaccctgtgcagaaggctgtgctctcccacacttttgggggacccttgctcaagaccaagcggcccgtcatttcctgtaatatctgtcaaatccgcttcaattctcagagccaggctgaggcgcactacaaaggtaatcgccacgcccgacgagtcaaaggcattgaggctgccaagaccagaggcagggagcctggcgtccgagaacctggagacccagctcccccaggcagcaccccaacaaatggggatggtgtagcaccccgtccagtttccatggagaatggactggggccagccccaggatccccagagaaacagcctggctccccatcccctcccagcattccggagactggtcagggtgtaaccaagggtgaaggggggactccagccccggcttccttgcctgggggtagcaaggaagaggaggagaaagccaagcggctgctctactgtgctctgtgcaaggtggctgtgaactccctgtcccagcttgaggcacataacaaaggtactaagcacaagacaattctggaggcccgaagtgggctcgggcccatcaaagcttaccctcggctggggcctcccaccccgggggaaccagaggctcctgcccaggaccgaactttccactgtgagatctgcaatgtcaaggtcaactcggaggtccaactgaaacagcacatctccagccggcggcaccgagacggcgtggccgggaagcccaacccactactgagccgtcacaagaagtctaggggcgccggggagctggcgggcacgctgactttctccaaggagctgcccaagtccctggcgggcggcctgctccccagccccctggcggtggctgcagtgatggcagcggcagcaggctcgccgctgtccctgcgcccggctccagccgcacctcttctccagggaccgccgatcactcaccctctgcttcacccggcccccggacccatccgaactgcgcacggacccatcctcttctccccgtactgacctcaaccctgaacccctcccattcaactccccacctccagccgggacccaggcgtccgggctcccagcccgcccctcctcccggcactccctaaatgatctctccttccccccccccaccccgagatacggggttccaggaaaggggaggggtagcgggggaggggggcttcagaagggggggaacaccccagatctcagggaaccccgccccctgcctttccctctcccctagaaaagggggggccgtctcacccccgagcccccttggagacaccccccctcccaaaagccatgtccatccagcccttccccccaaacctagcacaaaacggggttcacaagccatggtcggggtccgggggggacagaaatggattttcttggcaataagcggactctgggactccggctccctaccccaaactgaagcgcttccgtgaacacccccgtcctccgtagggggaggggagcaggcgggatcctgggtccctcataagcactttggttttaccgcctgcaacctcactgtgcccgccccgcaccatgccctagccccaggtctagccgggcccattgcagggggcagcacttgggggcatctccggcacttgggtgggaccaaggagatgccaccatagacctttccctcgccttcttcctccctagtccgggttccattcttttcaccagcacccatcgcccaaggggtaccgaggggggcaaggggtgtccagtccaagcccacccccgcctcgccttccgcaaaactgtgagcaaaaagcaatagaagcctcgcccccgcccttccccttcgcaggattcgccgagtctgtagcctccccgatccaagttcctagacctcatggctgtcccctcccaccagtcacctccactgcacaactcgggcgggggtgtgacacctctcccccacccccgactccgtggtttccgtatcgtcaacccttcagccgccgacccgggaggggtctggcctacactggtcttccccttcccatcaactctttctgcttgacaatgtagcaacccaggccccccacccacggtcctcccctttttcctctccctgacaataaagtctgaatttgttctgccctccgccccta

SEQ ID NO: 304254 - DNA, 2329 bp, Homo sapiens
ggacagagcgacgcggaaccccgggcgcctgggtccccagcatgatcctcggcagcctgagccgggcagggcccctgcctctgctacggcagcccccgatcatgcagcccccactggacctcaagcagatcctgcccttcccactcgagccagcccctacccttggcctcttcagcaactacagcaccatggaccctgtgcagaaggctgtgctctcccacacttttgggggacccttgctcaagaccaagcggcccgtcatttcctgtaatatctgtcaaatccgcttcaattctcagagccaggctgaggcgcactacaaaggtaatcgccacgcccgacgagtcaaaggcattgaggctgccaagaccagaggcagggagcctggcgtccgagaacctggagacccagctcccccaggcagcaccccaacaaatggggatggtgtagcaccccgtccagtttccatggagaatggactggggccagccccaggatccccagagaaacagcctggctccccatcccctcccagcattccggagactggtcagggtgtaaccaagggtgaaggggggactccagccccggcttccttgcctgggggtagcaaggaagaggaggagaaagccaagcggctgctctactgtgctctgtgcaaggtggctgtgaactccctgtcccagcttgaggcacataacaaaggtactaagcacaagacaattctggaggcccgaagtgggctcgggcccatcaaagcttaccctcggctggggcctcccaccccgggggaaccagaggctcctgcccaggaccgaactttccactgtgagatctgcaatgtcaaggtcaactcggaggtccaactgaaacagcacatctccagccggcggcaccgagacggcgtggccgggaagcccaacccactactgagccgtcacaagaagtctaggggcgccggggagctggcgggcacgctgactttctccaaggagctgcccaagtccctggcgggcggcctgctccccagccccctggcggtggctgcagtgatggcagcggcagcaggctcgccgctgtccctgcgcccggctccagccgcacctcttctccagggaccgccgatcactcaccctctgcttcacccggcccccggacccatccgaactgcgcacggacccatcctcttctccccgtactgacctcaaccctgaacccctcccattcaactccccacctccagccgggacccaggcgtccgggctcccagcccgcccctcctcccggcactccctaaatgatctctccttccccccccccaccccgagatacggggttccaggaaaggggaggggtagcgggggaggggggcttcagaagggggggaacaccccagatctcagggaaccccgccccctgcctttccctctcccctagaaaagggggggccgtctcacccccgagcccccttggagacaccccccctcccaaaagccatgtccatccagcccttccccccaaacctagcacaaaacggggttcacaagccatggtcggggtccgggggggacagaaatggattttcttggcaataagcggactctgggactccggctccctaccccaaactgaagcgcttccgtgaacacccccgtcctccgtagggggaggggagcaggcgggatcctgggtccctcataagcactttggttttaccgcctgcaacctcactgtgcccgccccgcaccatgccctagccccaggtctagccgggcccattgcagggggcagcacttgggggcatctccggcacttgggtgggaccaaggagatgccaccatagacctttccctcgccttcttcctccctagtccgggttccattcttttcaccagcacccatcgcccaaggggtaccgaggggggcaaggggtgtccagtccaagcccacccccgcctcgccttccgcaaaactgtgagcaaaaagcaatagaagcctcgcccccgcccttccccttcgcaggattcgccgagtctgtagcctccccgatccaagttcctagacctcatggctgtcccctcccaccagtcacctccactgcacaactcgggcgggggtgtgacacctctcccccacccccgactccgtggtttccgtatcgtcaacccttcagccgccgacccgggaggggtctggcctacactggtcttccccttcccatcaactctttctgcttgacaatgtagcaacccaggccccccacccacggtcctcccctttttcctctccctgacaataaagtctgaatttgttctgccctccgccccta

SEQ ID NO: 304255 - DNA, 2308 bp, Homo sapiens
cagaactggacctgtagctgagcattcctggcagcctgagccgggcagggcccctgcctctgctacggcagcccccgatcatgcagcccccactggacctcaagcagatcctgcccttcccactcgagccagcccctacccttggcctcttcagcaactacagcaccatggaccctgtgcagaaggctgtgctctcccacacttttgggggacccttgctcaagaccaagcggcccgtcatttcctgtaatatctgtcaaatccgcttcaattctcagagccaggctgaggcgcactacaaaggtaatcgccacgcccgacgagtcaaaggcattgaggctgccaagaccagaggcagggagcctggcgtccgagaacctggagacccagctcccccaggcagcaccccaacaaatggggatggtgtagcaccccgtccagtttccatggagaatggactggggccagccccaggatccccagagaaacagcctggctccccatcccctcccagcattccggagactggtcagggtgtaaccaagggtgaaggggggactccagccccggcttccttgcctgggggtagcaaggaagaggaggagaaagccaagcggctgctctactgtgctctgtgcaaggtggctgtgaactccctgtcccagcttgaggcacataacaaaggtactaagcacaagacaattctggaggcccgaagtgggctcgggcccatcaaagcttaccctcggctggggcctcccaccccgggggaaccagaggctcctgcccaggaccgaactttccactgtgagatctgcaatgtcaaggtcaactcggaggtccaactgaaacagcacatctccagccggcggcaccgagacggcgtggccgggaagcccaacccactactgagccgtcacaagaagtctaggggcgccggggagctggcgggcacgctgactttctccaaggagctgcccaagtccctggcgggcggcctgctccccagccccctggcggtggctgcagtgatggcagcggcagcaggctcgccgctgtccctgcgcccggctccagccgcacctcttctccagggaccgccgatcactcaccctctgcttcacccggcccccggacccatccgaactgcgcacggacccatcctcttctccccgtactgacctcaaccctgaacccctcccattcaactccccacctccagccgggacccaggcgtccgggctcccagcccgcccctcctcccggcactccctaaatgatctctccttccccccccccaccccgagatacggggttccaggaaaggggaggggtagcgggggaggggggcttcagaagggggggaacaccccagatctcagggaaccccgccccctgcctttccctctcccctagaaaagggggggccgtctcacccccgagcccccttggagacaccccccctcccaaaagccatgtccatccagcccttccccccaaacctagcacaaaacggggttcacaagccatggtcggggtccgggggggacagaaatggattttcttggcaataagcggactctgggactccggctccctaccccaaactgaagcgcttccgtgaacacccccgtcctccgtagggggaggggagcaggcgggatcctgggtccctcataagcactttggttttaccgcctgcaacctcactgtgcccgccccgcaccatgccctagccccaggtctagccgggcccattgcagggggcagcacttgggggcatctccggcacttgggtgggaccaaggagatgccaccatagacctttccctcgccttcttcctccctagtccgggttccattcttttcaccagcacccatcgcccaaggggtaccgaggggggcaaggggtgtccagtccaagcccacccccgcctcgccttccgcaaaactgtgagcaaaaagcaatagaagcctcgcccccgcccttccccttcgcaggattcgccgagtctgtagcctccccgatccaagttcctagacctcatggctgtcccctcccaccagtcacctccactgcacaactcgggcgggggtgtgacacctctcccccacccccgactccgtggtttccgtatcgtcaacccttcagccgccgacccgggaggggtctggcctacactggtcttccccttcccatcaactctttctgcttgacaatgtagcaacccaggccccccacccacggtcctcccctttttcctctccctgacaataaagtctgaatttgttctgccctccgccccta

SEQ ID NO: 304256 - DNA, 2328 bp, Homo sapiens
cagcaggggaagtgtgtacactatgtgcactgagggtgacacttctgagtgcagcctgagccgggcagggcccctgcctctgctacggcagcccccgatcatgcagcccccactggacctcaagcagatcctgcccttcccactcgagccagcccctacccttggcctcttcagcaactacagcaccatggaccctgtgcagaaggctgtgctctcccacacttttgggggacccttgctcaagaccaagcggcccgtcatttcctgtaatatctgtcaaatccgcttcaattctcagagccaggctgaggcgcactacaaaggtaatcgccacgcccgacgagtcaaaggcattgaggctgccaagaccagaggcagggagcctggcgtccgagaacctggagacccagctcccccaggcagcaccccaacaaatggggatggtgtagcaccccgtccagtttccatggagaatggactggggccagccccaggatccccagagaaacagcctggctccccatcccctcccagcattccggagactggtcagggtgtaaccaagggtgaaggggggactccagccccggcttccttgcctgggggtagcaaggaagaggaggagaaagccaagcggctgctctactgtgctctgtgcaaggtggctgtgaactccctgtcccagcttgaggcacataacaaaggtactaagcacaagacaattctggaggcccgaagtgggctcgggcccatcaaagcttaccctcggctggggcctcccaccccgggggaaccagaggctcctgcccaggaccgaactttccactgtgagatctgcaatgtcaaggtcaactcggaggtccaactgaaacagcacatctccagccggcggcaccgagacggcgtggccgggaagcccaacccactactgagccgtcacaagaagtctaggggcgccggggagctggcgggcacgctgactttctccaaggagctgcccaagtccctggcgggcggcctgctccccagccccctggcggtggctgcagtgatggcagcggcagcaggctcgccgctgtccctgcgcccggctccagccgcacctcttctccagggaccgccgatcactcaccctctgcttcacccggcccccggacccatccgaactgcgcacggacccatcctcttctccccgtactgacctcaaccctgaacccctcccattcaactccccacctccagccgggacccaggcgtccgggctcccagcccgcccctcctcccggcactccctaaatgatctctccttccccccccccaccccgagatacggggttccaggaaaggggaggggtagcgggggaggggggcttcagaagggggggaacaccccagatctcagggaaccccgccccctgcctttccctctcccctagaaaagggggggccgtctcacccccgagcccccttggagacaccccccctcccaaaagccatgtccatccagcccttccccccaaacctagcacaaaacggggttcacaagccatggtcggggtccgggggggacagaaatggattttcttggcaataagcggactctgggactccggctccctaccccaaactgaagcgcttccgtgaacacccccgtcctccgtagggggaggggagcaggcgggatcctgggtccctcataagcactttggttttaccgcctgcaacctcactgtgcccgccccgcaccatgccctagccccaggtctagccgggcccattgcagggggcagcacttgggggcatctccggcacttgggtgggaccaaggagatgccaccatagacctttccctcgccttcttcctccctagtccgggttccattcttttcaccagcacccatcgcccaaggggtaccgaggggggcaaggggtgtccagtccaagcccacccccgcctcgccttccgcaaaactgtgagcaaaaagcaatagaagcctcgcccccgcccttccccttcgcaggattcgccgagtctgtagcctccccgatccaagttcctagacctcatggctgtcccctcccaccagtcacctccactgcacaactcgggcgggggtgtgacacctctcccccacccccgactccgtggtttccgtatcgtcaacccttcagccgccgacccgggaggggtctggcctacactggtcttccccttcccatcaactctttctgcttgacaatgtagcaacccaggccccccacccacggtcctcccctttttcctctccctgacaataaagtctgaatttgttctgccctccgccccta

SEQ ID NO: 304257 - DNA, 2376 bp, Homo sapiens
agagggcagaaccaagggaaggggacgctgtcaggcccaggcccctggggggcaggggcaggccactgcctgggggcagcaggcatcagaaactaaaggcagcctgagccgggcagggcccctgcctctgctacggcagcccccgatcatgcagcccccactggacctcaagcagatcctgcccttcccactcgagccagcccctacccttggcctcttcagcaactacagcaccatggaccctgtgcagaaggctgtgctctcccacacttttgggggacccttgctcaagaccaagcggcccgtcatttcctgtaatatctgtcaaatccgcttcaattctcagagccaggctgaggcgcactacaaaggtaatcgccacgcccgacgagtcaaaggcattgaggctgccaagaccagaggcagggagcctggcgtccgagaacctggagacccagctcccccaggcagcaccccaacaaatggggatggtgtagcaccccgtccagtttccatggagaatggactggggccagccccaggatccccagagaaacagcctggctccccatcccctcccagcattccggagactggtcagggtgtaaccaagggtgaaggggggactccagccccggcttccttgcctgggggtagcaaggaagaggaggagaaagccaagcggctgctctactgtgctctgtgcaaggtggctgtgaactccctgtcccagcttgaggcacataacaaaggtactaagcacaagacaattctggaggcccgaagtgggctcgggcccatcaaagcttaccctcggctggggcctcccaccccgggggaaccagaggctcctgcccaggaccgaactttccactgtgagatctgcaatgtcaaggtcaactcggaggtccaactgaaacagcacatctccagccggcggcaccgagacggcgtggccgggaagcccaacccactactgagccgtcacaagaagtctaggggcgccggggagctggcgggcacgctgactttctccaaggagctgcccaagtccctggcgggcggcctgctccccagccccctggcggtggctgcagtgatggcagcggcagcaggctcgccgctgtccctgcgcccggctccagccgcacctcttctccagggaccgccgatcactcaccctctgcttcacccggcccccggacccatccgaactgcgcacggacccatcctcttctccccgtactgacctcaaccctgaacccctcccattcaactccccacctccagccgggacccaggcgtccgggctcccagcccgcccctcctcccggcactccctaaatgatctctccttccccccccccaccccgagatacggggttccaggaaaggggaggggtagcgggggaggggggcttcagaagggggggaacaccccagatctcagggaaccccgccccctgcctttccctctcccctagaaaagggggggccgtctcacccccgagcccccttggagacaccccccctcccaaaagccatgtccatccagcccttccccccaaacctagcacaaaacggggttcacaagccatggtcggggtccgggggggacagaaatggattttcttggcaataagcggactctgggactccggctccctaccccaaactgaagcgcttccgtgaacacccccgtcctccgtagggggaggggagcaggcgggatcctgggtccctcataagcactttggttttaccgcctgcaacctcactgtgcccgccccgcaccatgccctagccccaggtctagccgggcccattgcagggggcagcacttgggggcatctccggcacttgggtgggaccaaggagatgccaccatagacctttccctcgccttcttcctccctagtccgggttccattcttttcaccagcacccatcgcccaaggggtaccgaggggggcaaggggtgtccagtccaagcccacccccgcctcgccttccgcaaaactgtgagcaaaaagcaatagaagcctcgcccccgcccttccccttcgcaggattcgccgagtctgtagcctccccgatccaagttcctagacctcatggctgtcccctcccaccagtcacctccactgcacaactcgggcgggggtgtgacacctctcccccacccccgactccgtggtttccgtatcgtcaacccttcagccgccgacccgggaggggtctggcctacactggtcttccccttcccatcaactctttctgcttgacaatgtagcaacccaggccccccacccacggtcctcccctttttcctctccctgacaataaagtctgaatttgttctgccctccgccccta

SEQ ID NO: 304258 - DNA, 2560 bp, Homo sapiens
ggagttcccctcccacaagctccccacccccactgccagcctcgccatgacccggaaactggatcagctgctggagcaagaatgggagcgctagagtttcccctgtacagaggccagaacccagcactgaggcctagggctgttgcatctttaatcaagccatgaattatagagcagcctacatccctgtttcttccctctccggttctgatgtttctatttcccttttgccatgcctgtgtttatctctccagacctttcctcaccctgcctctgccccttcctagggctctttcgtgtacttcctgggggctgggcaagactccagggaaggggctgtcctggcaggaagcccagactggctggcaggccactgaggggtatatccttgttgcatgcctctccccctggctgggctggctgccagcttcaccctgaaggtaggctggtgaggctggaccccttggccattcccagctaatggagaatgagccaagcattggagtttcacacccagcctgcggcagctggaccacatctggctctggaccagggcatgagagcatgcatgttgtaacagggtggggactcctggtcccttgccctccaggaaatggggggggtctcttccacatgaagagtcttctccaagagccatctagggtgatccccatgtttctcccccaacaacagtttccatggagaatggactggggccagccccaggatccccagagaaacagcctggctccccatcccctcccagcattccggagactggtcagggtgtaaccaagggtgaaggggggactccagccccggcttccttgcctgggggtagcaaggaagaggaggagaaagccaagcggctgctctactgtgctctgtgcaaggtggctgtgaactccctgtcccagcttgaggcacataacaaaggtactaagcacaagacaattctggaggcccgaagtgggctcgggcccatcaaagcttaccctcggctggggcctcccaccccgggggaaccagaggctcctgcccaggaccgaactttccactgtgagatctgcaatgtcaaggtcaactcggaggtccaactgaaacagcacatctccagccggcggcaccgagacggcgtggccgggaagcccaacccactactgagccgtcacaagaagtctaggggcgccggggagctggcgggcacgctgactttctccaaggagctgcccaagtccctggcgggcggcctgctccccagccccctggcggtggctgcagtgatggcagcggcagcaggctcgccgctgtccctgcgcccggctccagccgcacctcttctccagggaccgccgatcactcaccctctgcttcacccggcccccggacccatccgaactgcgcacggacccatcctcttctccccgtactgacctcaaccctgaacccctcccattcaactccccacctccagccgggacccaggcgtccgggctcccagcccgcccctcctcccggcactccctaaatgatctctccttccccccccccaccccgagatacggggttccaggaaaggggaggggtagcgggggaggggggcttcagaagggggggaacaccccagatctcagggaaccccgccccctgcctttccctctcccctagaaaagggggggccgtctcacccccgagcccccttggagacaccccccctcccaaaagccatgtccatccagcccttccccccaaacctagcacaaaacggggttcacaagccatggtcggggtccgggggggacagaaatggattttcttggcaataagcggactctgggactccggctccctaccccaaactgaagcgcttccgtgaacacccccgtcctccgtagggggaggggagcaggcgggatcctgggtccctcataagcactttggttttaccgcctgcaacctcactgtgcccgccccgcaccatgccctagccccaggtctagccgggcccattgcagggggcagcacttgggggcatctccggcacttgggtgggaccaaggagatgccaccatagacctttccctcgccttcttcctccctagtccgggttccattcttttcaccagcacccatcgcccaaggggtaccgaggggggcaaggggtgtccagtccaagcccacccccgcctcgccttccgcaaaactgtgagcaaaaagcaatagaagcctcgcccccgcccttccccttcgcaggattcgccgagtctgtagcctccccgatccaagttcctagacctcatggctgtcccctcccaccagtcacctccactgcacaactcgggcgggggtgtgacacctctcccccacccccgactccgtggtttccgtatcgtcaacccttcagccgccgacccgggaggggtctggcctacactggtcttccccttcccatcaactctttctgcttgacaatgtagcaacccaggccccccacccacggtcctcccctttttcctctccctgacaataaagtctgaatttgttctgccctccgccccta

SEQ ID NO: 304259 - DNA, 2562 bp, Homo sapiens
cagcaggggaagtgtgtacactatgtgcactgagggtgacacttctgagtgtgggggccctggctagggagtgggactggcaggcttgggtggggttcccaagctttaatcttcctaccccacagaatgttttctctgcccttcaggcagcctgagccgggcagggcccctgcctctgctacggcagcccccgatcatgcagcccccactggacctcaagcagatcctgcccttcccactcgagccagcccctacccttggcctcttcagcaactacagcaccatggaccctgtgcagaaggctgtgctctcccacacttttgggggacccttgctcaagaccaagcggcccgtcatttcctgtaatatctgtcaaatccgcttcaattctcagagccaggctgaggcgcactacaaaggtaatcgccacgcccgacgagtcaaaggcattgaggctgccaagaccagaggcagggagcctggcgtccgagaacctggagacccagctcccccaggcagcaccccaacaaatggggatggtgtagcaccccgtccagagtctcactctgtcgcccaggctagagtgcagtggcacaatctcagctcactgcaacctccacctcccaggttcaagcgattctcctgcctcagcctcctgagtagctgggattacaggcacctgccaccacacccggtttccatggagaatggactggggccagccccaggatccccagagaaacagcctggctccccatcccctcccagcattccggagactggtcagggtgtaaccaagggtgaaggggggactccagccccggcttccttgcctgggggtagcaaggaagaggaggagaaagccaagcggctgctctactgtgctctgtgcaaggtggctgtgaactccctgtcccagcttgaggcacataacaaaggtactaagcacaagacaattctggaggcccgaagtgggctcgggcccatcaaagcttaccctcggctggggcctcccaccccgggggaaccagaggctcctgcccaggaccgaactttccactgtgagatctgcaatgtcaaggtcaactcggaggtccaactgaaacagcacatctccagccggcggcaccgagacggcgtggccgggaagcccaacccactactgagccgtcacaagaagtctaggggcgccggggagctggcgggcacgctgactttctccaaggagctgcccaagtccctggcgggcggcctgctccccagccccctggcggtggctgcagtgatggcagcggcagcaggctcgccgctgtccctgcgcccggctccagccgcacctcttctccagggaccgccgatcactcaccctctgcttcacccggcccccggacccatccgaactgcgcacggacccatcctcttctccccgtactgacctcaaccctgaacccctcccattcaactccccacctccagccgggacccaggcgtccgggctcccagcccgcccctcctcccggcactccctaaatgatctctccttccccccccccaccccgagatacggggttccaggaaaggggaggggtagcgggggaggggggcttcagaagggggggaacaccccagatctcagggaaccccgccccctgcctttccctctcccctagaaaagggggggccgtctcacccccgagcccccttggagacaccccccctcccaaaagccatgtccatccagcccttccccccaaacctagcacaaaacggggttcacaagccatggtcggggtccgggggggacagaaatggattttcttggcaataagcggactctgggactccggctccctaccccaaactgaagcgcttccgtgaacacccccgtcctccgtagggggaggggagcaggcgggatcctgggtccctcataagcactttggttttaccgcctgcaacctcactgtgcccgccccgcaccatgccctagccccaggtctagccgggcccattgcagggggcagcacttgggggcatctccggcacttgggtgggaccaaggagatgccaccatagacctttccctcgccttcttcctccctagtccgggttccattcttttcaccagcacccatcgcccaaggggtaccgaggggggcaaggggtgtccagtccaagcccacccccgcctcgccttccgcaaaactgtgagcaaaaagcaatagaagcctcgcccccgcccttccccttcgcaggattcgccgagtctgtagcctccccgatccaagttcctagacctcatggctgtcccctcccaccagtcacctccactgcacaactcgggcgggggtgtgacacctctcccccacccccgactccgtggtttccgtatcgtcaacccttcagccgccgacccgggaggggtctggcctacactggtcttccccttcccatcaactctttctgcttgacaatgtagcaacccaggccccccacccacggtcctcccctttttcctctccctgacaataaagtctgaatttgttctgccctccgccccta

SEQ ID NO: 304260 - DNA, 3101 bp, Homo sapiens
cagcaggggaagtgtgtacactatgtgcactgagggtgacacttctgagtgtgggggccctggctagggagtgggactggcaggcttgggtggggttcccaagctttaatcttcctaccccacagaatgttttctctgcccttcaggcagcctgagccgggcagggcccctgcctctgctacggcagcccccgatcatgcagcccccactggacctcaagcagatcctgcccttcccactcgagccagcccctacccttggcctcttcagcaactacagcaccatggaccctgtgcagaaggctgtgctctcccacacttttgggggacccttgctcaagaccaagcggcccgtcatttcctgtaatatctgtcaaatccgcttcaattctcagagccaggctgaggcgcactacaaaggtaatcgccacgcccgacgagtcaaaggcattgaggctgccaagaccagaggcagggagcctggcgtccgagaacctggagacccagctcccccaggcagcaccccaacaaatggggatggtgtagcaccccgtccagtttccatggagaatggactggggccagccccaggatccccagagaaacagcctggctccccatcccctcccagcattccggagactggtcagggtgtaaccaagggtgaaggggggactccagccccggcttccttgcctgggggtagcaaggaagaggaggagaaagccaagcggctgctctactgtgctctgtgcaaggtggctgtgaactccctgtcccagcttgaggcacataacaaaggtactaagcacaagacaattctggaggcccgaagtgggctcgggcccatcaaagcttaccctcggctggggcctcccaccccgggggaaccagaggctcctgcccaggaccgaactttccactgtgagatctgcaatgtcaaggtcaactcggaggtccaactgaaacagcacatctccagccggcggcaccgagacggcgtggccgggaagcccaacccactactgagccgtcacaagaagtctaggggcgccggggagctggcgggcacgctgactttctccaaggagctgcccaagtccctggcgggcggcctgctccccagccccctggcggtggctgcagtgatggcagcggcagcaggctcgccgctgtccctgcgcccggctccagccgcacctcttctccagggaccgccgatcactcaccctctgcttcacccggcccccggacccatccgaactgcgcacggacccatcctcttctccccgtactgacctcaaccctgaacccctcccattcaactccccacctccagccgggacccaggcgtccgggctcccagcccgcccctcctcccggcactccctaaatgatctctccttccccccccccaccccgagatacggggttccaggaaaggggaggggtagcgggggaggggggcttcagaagggggggaacaccccagatctcagggaaccccgccccctgcctttccctctcccctagaaaagggggggccgtctcacccccgagcccccttggagacaccccccctcccaaaagccatgtccatccagcccttccccccaaacctagcacaaaacggggttcacaagccatggtcggggtccgggggggacagaaatggattttcttggcaataagcggactctgggactccggctccctaccccaaactgaagcgcttccgtgaacacccccgtcctccgtagggggaggggagcaggcgggatcctgggtccctcataagcactttggttttaccgcctgcaacctcactgtgcccgccccgcaccatgccctagccccaggtctagccgggcccattgcagggggcagcacttgggggcatctccggcacttgggtgggaccaaggagatgccaccatagacctttccctcgccttcttcctccctagtccgggttccattcttttcaccagcacccatcgcccaaggggtaccgaggggggcaaggggtgtccagtccaagcccacccccgcctcgccttccgcaaaactgtgagcaaaaagcaatagaagcctcgcccccgcccttccccttcgcaggattcgccgagtctgtagcctccccgatccaagttcctagacctcatggctgtcccctcccaccagtcacctccactgcacaactcgggcgggggtgtgacacctctcccccacccccgactccgtggtttccgtatcgtcaacccttcagccgccgacccgggaggggtctggcctacactggtcttccccttcccatcaactctttctgcttgacaatgtagcaacccaggccccccacccacggtcctcccctttttcctctccctgacaataaagtctgaatttgttctgccctccgcccctaaaaaaaaaaaaaaacaaacaaaaaaaaaaaaaaaaaaacaaaaaagagaaaacgaaacaagaagagagcagccaagacgaaagagagacagaagagacaaaaaaatagggggagggggcgggaggaagagagagcccccggggggagaagaagaggggcgggcggagcgaaggagagagagaggaaaggaagggcgcggcagaccacgcgacgcgagggccggcgaaacgaagcgaagagagagaccgcagccgcgacgcagcagcggagacaaggagccagccgcacgagagcgacgggaacgacaggcgcacgaagcggagggagaagaaggcggccagggggccccacacgaccccaaccgcacgaagcgagccgaggaaggcgagaacggcaagcgggggagaggacacgaaaaacgcaacaaacagaaagaccacgaaaggcccccaaggaccacaaaggggcagggacgcgagcccaggcaagcagagaggcaagaggagcagtgaggaggagagagagagaaaaggagaggacaggacgaaaggagcgaaaacagggcaacggagcagcgagcgcgagggagagagaacggaaaaggaggagaaggcggacgacaagaagcagcaagcagagaaagagagtaggccaacgcagcgcctcctaccccccgg

SEQ ID NO: 304261 - DNA, 2373 bp, Homo sapiens
cagcaggggaagtgtgtacactatgtgcactgagggtgacacttctgagtgtgggggccctggctagggagtgggactggcaggcttgggtggggttcccaagctttaatcttcctaccccacagaatgttttctctgcccttcaggcagcctgagccgggcagggcccctgcctctgctacggcagcccccgatcatgcagcccccactggacctcaagcagatcctgcccttcccactcgagccagcccctacccttggcctcttcagcaactacagcaccatggaccctgtgcagaaggctgtgctctcccacacttttgggggacccttgctcaagaccaagcggcccgtcatttcctgtaatatctgtcaaatccgcttcaattctcagagccaggctgaggcgcactacaaaggtaatcgccacgcccgacgagtcaaaggcattgaggctgccaagaccagaggcagggagcctggcgtccgagaacctggagacccagctcccccaggcagcaccccaacaaatggggatggtgtagcaccccgtccagtttccatggagaatggactggggccagccccaggatccccagagaaacagcctggctccccatcccctcccagcattccggagactggtcagggtgtaaccaagggtgaaggggggactccagccccggcttccttgcctgggggtagcaaggaagaggaggagaaagccaagcggctgctctactgtgctctgtgcaaggtggctgtgaactccctgtcccagcttgaggcacataacaaaggtactaagcacaagacaattctggaggcccgaagtgggctcgggcccatcaaagcttaccctcggctggggcctcccaccccgggggaaccagaggctcctgcccaggaccgaactttccactgtgagatctgcaatgtcaaggtcaactcggaggtccaactgaaacagcacatctccagccggcggcaccgagacggcgtggccgggaagcccaacccactactgagccgtcacaagaagtctaggggcgccggggagctggcgggcacgctgactttctccaaggagctgcccaagtccctggcgggcggcctgctccccagccccctggcggtggctgcagtgatggcagcggcagcaggctcgccgctgtccctgcgcccggctccagccgcacctcttctccagggaccgccgatcactcaccctctgcttcacccggcccccggacccatccgaactgcgcacggacccatcctcttctccccgtactgacctcaaccctgaacccctcccattcaactccccacctccagccgggacccaggcgtccgggctcccagcccgcccctcctcccggcactccctaaatgatctctccttccccccccccaccccgagatacggggttccaggaaaggggaggggtagcgggggaggggggcttcagaagggggggaacaccccagatctcagggaaccccgccccctgcctttccctctcccctagaaaagggggggccgtctcacccccgagcccccttggagacaccccccctcccaaaagccatgtccatccagcccttccccccaaacctagcacaaaacggggttcacaagccatggtcggggtccgggggggacagaaatggattttcttggcaataagcggactctgggactccggctccctaccccaaactgaagcgcttccgtgaacacccccgtcctccgtagggggaggggagcaggcgggatcctgggtccctcataagcactttggttttaccgcctgcaacctcactgtgcccgccccgcaccatgccctagccccaggtctagccgggcccattgcagggggcagcacttgggggcatctccggcacttgggtgggaccaaggagatgccaccatagacctttccctcgccttcttcctccctagtccgggttccattcttttcaccagcacccatcgcccaaggggtaccgaggggggcaaggggtgtccagtccaagcccacccccgcctcgccttccgcaaaactgtgagcaaaaagcaatagaagcctcgcccccgcccttccccttcgcaggattcgccgagtctgtagcctccccgatccaagttcctagacctcatggctgtcccctcccaccagtcactccgtggtttccgtatcgtcaacccttcagccgccgacccgggaggggtctggcctacactggtcttccccttcccatcaactctttctgcttgacaatgtagcaacccaggccccccacccacggtcctcccctttttcctctccctgacaataaagtctgaatttgttctgccctccgccccta

SEQ ID NO: 304262 - DNA, 234 bp, Homo sapiens
ctaagcacaagacaattctggaggcccgaagtgggctcgggcccatcaaagcttaccctcggctggggcctcccaccccgggggaaccagaggctcctgcccaggaccgaactttccactgtgagatctgcaatgtcaaggtcaactcggaggtccaactgaaacaggtgggtctaaggcccttcccaggaattctgggacgctccacccgctaagtggggaaggggagcaagg

SEQ ID NO: 304263 - DNA, 1066 bp, Homo sapiens
ggagtcgggttacaccacttgtgtctgagttcacgcagcatgttcctctgtcagggattccgcaaatatctccctgaggtaaaaaaggaaagtgtgctgcgctccagcacccagagcagtgagcccagtcccgagtcccggagagagctccagcaataggggccatgtcgccatagccccagcctctcggtccgcagcctcagcagcgtcccagccggctggcttcatgctgcggtgcagctgcaccatgttcctgggttgagggggcaatcgggcacgctcctccccatgggttgcccatcatgtctaatggatatcgcactctgtcccagcacctcaatgacctgaagaaggagaacttcagcctcaagctgctcatctacttcctggaggagcgcatgcaacagaagtatgaggccagccgggaggacatctacaagcggaacactgagctgaaggttgaagtggagagcttgaaacgagaactccaggacaagaaacagcatctggataaaacatgggctgatgtggagaatctcaacagtcagaatgaagctgagctccgacgccagtttgaggagcgacagcaggagacggagcatgtttatgagctcttggagaataagatgcagcttctgcaggaggaatccaggctagcaaagaatgaagctgcgcggatggcagctctggtggaagcagagaaggagtgtaacctggagctctcagagaaactgaagggagtcaccaaaaactgggaagatgtaccaggagaccaggtcaagcccgaccaatacactgaggccctggcccagagggacaagatctaaaaaaaataatgctgggaagtcctaaccacatcaagaatgcctcagatcagtgacccaaggaccttccagaatggatgaaatagacccaaagctgaattcacctaattttagggccaaaaacccaaaaaacaaaacaagaccaaaaaaatcttcagatactgggagaacaaatctcaattgctcaattgtatcttatgaaaacaatttttcaaaataaaacaagagatatttaagattca

SEQ ID NO: 304264 - DNA, 4167 bp, Homo sapiens
  misc_feature (3169)..(3169): n is a, c, g, or t
  misc_feature (3194)..(3194): n is a, c, g, or t
  misc_feature (3224)..(3224): n is a, c, g, or t
  misc_feature (3248)..(3248): n is a, c, g, or t
  misc_feature (3384)..(3384): n is a, c, g, or t
ggagtcgggttacaccacttgtgtctgagttcacgcagcatgttcctctgtcagggattccgcaaatatctccctgaggtaaaaaaggaaagtgtgctgcgctccagcacccagagcagtgagcccagtcccgagtcccggagagagctccagcaataggggccatgtcgccatagccccagcctctcggtccgcagcctcagcagcgtcccagccggctggcttcatgctgcggtgcagctgcaccatgttcctgggttgagggggcaatcgggcacgctcctccccatgggttgcccatcatgtctaatggatatcgcactctgtcccagcacctcaatgacctgaagaaggagaacttcagcctcaagctgctcatctacttcctggaggagcgcatgcaacagaagtatgaggccagccgggaggacatctacaagcggaacactgagctgaaggttgaagtggagagcttgaaacgagaactccaggacaagaaacagcatctggataaaacatgggctgatgtggagaatctcaacagtcagaatgaagctgagctccgacgccagtttgaggagcgacagcaggagacggagcatgtttatgagctcttggagaataagatgcagcttctgcaggaggaatccaggctagcaaagaatgaagctgcgcggatggcagctctggtggaagcagagaaggagtgtaacctggagctctcagagaaactgaagggagtcaccaaaaactgggaagatgtaccaggagaccaggtcaagcccgaccaatacactgaggccctggcccagagggacaagatctaaaaaaaataatgctgggaagtcctaaccacatcaagaatgcctcagatcagtgacccaaggaccttccagaatggatgaaatagacccaaagctgaattcacctaattttagggccaaaaacccaaaaaacaaaacaagaccaaaaaaatcttcagatactgggagaacaaatctcaattgctcaattgtatcttatgaaaacaatttttcaaaataaaacaagagatatttaagattcattaagttcttgtcatttcaaattttaagaaaaatattttctaatggaattacatatatttatatgattcttctagttatatccatggtaataaatactcttttcagttggaaataaaacccatttgtgctatattattagggaaaatatctacataaattagtttttaatttaactaaagtctatcttttgaattcataagcataaaattttaaccacttgcaaaatttataacacacttaaggtagtcagatgccttgtcaagtagtttaacaaaagtgattttcacctgtttgttttaataacagtgcatcgattttatgaaaatcaggcatgccctcgggtcctaacaaagtatacgaagctgaatggatctatgccaaatatgccagattttactttctgagtctgattttatacttctgtcctctttcttaccacatggcttccagtatcacttacagactaacccttcaaaaggagaaggctaagttactaacatttggaaggcttatgaaagtgaagcatagttatgagccagcaatgtttttatttatggaatgtgtgcaaaccacacacttaagcaagctctggggaatgagagttggggggaatcaactgttttatttgctaattggtatttcctttaaaagatagagttcttccagattttaactgtgttaatagttactctagaaaaattggagatttgtgtgcatatattttatgttgtaaacagacacatacccagagacactgagagagacagacagacagtaaacagaggagcactaaccacaaacggtttacaaatgacctctgtgctcattcacctgtctgttccccaccttgccttttatagcaactatagcaacagccatgagagtcattgtggaaagaaataaaataaaattaaaaaatcctggaagcttgtaaagaatgtgagcaaaggggaggaagttgtgaaaaaaatgaataaagggcaccgatccagagtattgaagaaggcagagtggagagcctagtaatgagtatctggtaccccagtatcctctcccacagaatctgtacagctctccgtttatgacagtttaaacttaatttaaattatcaaacagacactttcctcaaacatataaatgatgaggcagttcattcaggctgtatgtataaagctgttccagccacctttttctaacggcttctctatatcttttacatggagacaatgagagatttgcttaggacaatttgactgtaatttagaagtaggaaatgggaagtatttgtatcttctttgcctaactcacattagttactcaagtaagcatttcttccgttattgcattttcctgattacaagttttatgttttctctaaaacacatatcaaaagaaatgtcctaagcactatgcagggggaagccatgacatttatctaccactgtcagcaaaaacatgaacttagccctcaacagaatatttcacttcattctagtgtcacctctgcgtcacctgcactggagtcaccacttgcctgttgggtaagaccaggatgcaccactgaaataaaaaggggtcagacaatacaagaaaagccagtagaaattgccaaatgtatcagaatacacacaggctttctaaggatatggcccaagaggaaggctctagagcccaccctgaaacaggatttttgacttcacagataaattatttaattttcaataacacaattcaattaaagaaagggaaatacaaggctaaacaaataagaaatgaagacaaaaacccaacctttcaaatctaaagaaaataatctgttttaaagacacagatgaagatcaggaacccaaaacagaagaaaggaaaagcaattaacgctggcatctgataacaacgaaaagtatggagtctggagaatcgctagactctaaaaattataaaggtttagacttgggctttgtacactgaagaaaagaaaactgcatgcatttatactgaccaatgtacactattgctgctttttaacttttgtgtatatgtagggtagatttttttttaagtgaaagcaagcttattaagaaagtaaaagaataaaaaggtgncttctccataggcagaaaactagcntagtttttttattagaaattgttattcaanaatagtacatgttacaaataaatnccattttaaactgaaaaaattgtagactttcaaatcagttagggtggtcaccctaaaaaagggcattttttccccttagtctccttgttcatgttgctcacaacaagaaatgggctaatgctatgaataataatancaaacactgccttctgtcaggccctgtgctgaataccgtctgcatatgtataggaaagggttaactcagcaggtcttgtttgcccagactctgtacatttccaagaaaggtctgcctttaggactggtccttggccagctcctggagaatgagctctcagcttttagaaaattctatctgctaagaatagttttgcatgtctcaggtcttgggccacaaaatatcagtttaatcagatggtttatgttaacaagtatgatttatggcaaacatagatctctaatctccatttctctctcatatatctatatttatctatccatatatatgtacctatatatatcaaatataaagatatgtttatagcaattgtatatacgtagagagataatatgtagtatgaagagagacatagatattattcttcattttagaatgttatcttggtatgtttaaaaggaaaaacttaagatgtgttgcaattgcagtatgagtttcaggtatgtacatgttatgtgtgtgtgtgagagacacacacaaacacatttcaaacatgttttatgtttaagctcaatattcaaacacagaaatataacatctattcttaatatgttttatgtaagtacagcagcagcattattaaatactgtatttctatggtgattgaaaattagtaggcagagaatttttgtaatggttcttaataatttttgtaatagtaaatgattactttttgtttagtatagttttataatctatacatgaataaagtggatatttcta

SEQ ID NO: 304265 - DNA, 1295 bp, Homo sapiens
ctggagagtgcgcgcaccgccgcccgggcagccgctggctccagctcacgaaacagccccgggcgccgcgccgctccgagtccagcctcctactgagaacagtccctccctcgtgcgggtcgcacggctagccgcaggttcggccacgtcaaatccattttctaaaaaagcagggagcagagctctctcttcgccgccgacgcagaaaggagctggggaggaaaaagctgctgccttttgcgctggagattcgtgggcaaggcttctcattttcccaggctgcttcccctcccgggtgaggagcgtcctgagactaaggaaagagcctggaaaatggagcagacctggacgagagattattttgcagaggatgatggggagatggtacccagaacgagtcacacagcagcttttcttagtgacactaaagatcgaggccctccagtgcagtcacagatctggagaagtggtgaaaaggtcccgtttgtgcagacatattccttgagagcatttgagaaaccccctcaggtacagacccaggctcttcgagactttgagaagcacctcaatgacctgaagaaggagaacttcagcctcaagctgctcatctacttcctggaggagcgcatgcaacagaagtatgaggccagccgggaggacatctacaagcggaacactgagctgaaggttgaagtggagagcttgaaacgagaactccaggacaagaaacagcatctggataaaacatgggctgatgtggagaatctcaacagtcagaatgaagctgagctccgacgccagtttgaggagcgacagcaggagacggagcatgtttatgagctcttggagaataagatgcagcttctgcaggaggaatccaggctagcaaagaatgaagctgcgcggatggcagctctggtggaagcagagaaggagtgtaacctggagctctcagagaaactgaagggagtcaccaaaaactgggaagatgtaccaggagaccaggtcaagcccgaccaatacactgaggccctggcccagagggacaagatctaaaaaaaataatgctgggaagtcctaaccacatcaagaatgcctcagatcagtgacccaaggaccttccagaatggatgaaatagacccaaagctgaattcacctaattttagggccaaaaacccaaaaaacaaaacaagaccaaaaaaatcttcagatactgggagaacaaatctcaattgctcaattgtatcttatgaaaacaatttttcaaaataaaacaagagatatttaagattca

SEQ ID NO: 304266 - DNA, 1390 bp, Homo sapiens
ctggagagtgcgcgcaccgccgcccgggcagccgctggctccagctcacgaaacagccccgggcgccgcgccgctccgagtccagcctcctactgagaacagtccctccctcgtgcgggtcgcacggctagccgcaggttcggccacgtcaaatccattttctaaaaaagcagggagcagagctctctcttcgccgccgacgcagaaaggagctggggaggaaaaagctgctgccttttgcgctggagattcgtgggcaaggcttctcattttcccaggctgcttcccctcccgggtgaggagcgtcctgagactaaggaaagagcctggaaaatggagcagacctggacgagagattattttgcagaggatgatggggagatggtacccagaacgagtcacacagcagcagaaatgaatttccatcttttctgaacataaaaaaaagaagaattctaagaagttgactgaagcatctgggtgctttttcttgggctccttctgcttttcttagtgacactaaagatcgaggccctccagtgcagtcacagatctggagaagtggtgaaaaggtcccgtttgtgcagacatattccttgagagcatttgagaaaccccctcaggtacagacccaggctcttcgagactttgagaagcacctcaatgacctgaagaaggagaacttcagcctcaagctgctcatctacttcctggaggagcgcatgcaacagaagtatgaggccagccgggaggacatctacaagcggaacactgagctgaaggttgaagtggagagcttgaaacgagaactccaggacaagaaacagcatctggataaaacatgggctgatgtggagaatctcaacagtcagaatgaagctgagctccgacgccagtttgaggagcgacagcaggagacggagcatgtttatgagctcttggagaataagatgcagcttctgcaggaggaatccaggctagcaaagaatgaagctgcgcggatggcagctctggtggaagcagagaaggagtgtaacctggagctctcagagaaactgaagggagtcaccaaaaactgggaagatgtaccaggagaccaggtcaagcccgaccaatacactgaggccctggcccagagggacaagatctaaaaaaaataatgctgggaagtcctaaccacatcaagaatgcctcagatcagtgacccaaggaccttccagaatggatgaaatagacccaaagctgaattcacctaattttagggccaaaaacccaaaaaacaaaacaagaccaaaaaaatcttcagatactgggagaacaaatctcaattgctcaattgtatcttatgaaaacaatttttcaaaataaaacaagagatatttaagattca

SEQ ID NO: 304267 - DNA, 4519 bp, Homo sapiens
  misc_feature (3429)..(3429): n is a, c, g, or t
  misc_feature (3454)..(3454): n is a, c, g, or t
  misc_feature (3484)..(3484): n is a, c, g, or t
  misc_feature (3508)..(3508): n is a, c, g, or t
  misc_feature (3644)..(3644): n is a, c, g, or t
ggagtcgggttacaccacttgtgtctgagttcacgcagcatgttcctctgtcagggattccgcaaatatctccctgaggtaaaaaaggaaagtgtgctgcgctccagcacccagagcagtgagcccagtcccgagtcccggagagagctccagcaataggggccatgtcgccatagccccagcctctcggtccgcagcctcagcagcgtcccagccggctggcttcatgctgcggtgcagctgcaccatgttcctgggttgagggggcaatcgggcacgctcctccccatgggttgcccatcatgtctaatggatatcgcactctgtcccagcacctcaatgacctgaagaaggagaacttcagcctcaagctgctcatctacttcctggaggagcgcatgcaacagaagtatgaggccagccgggaggacatctacaagcggaacactgagctgaaggttgaagtggagagcttgaaacgagaactccaggacaagaaacagcatctggataaaacatgggctgatgtggagaatctcaacagtcagaatgaagctgagctccgacgccagtttgaggagcgacagcaggagacggagcatgtttatgagctcttggagaataagatgcagcttctgcaggaggaatccaggctagcaaagaatgaagctgcgcggatggcagctctggtggaagcagagaaggagtgtaacctggagctctcagagaaactgaagggagtcaccaaaaactgggaagatgtaccaggagaccaggtcaagcccgaccaatacactgaggccctggcccagagggacaatccttcaactgacagcttaaagaacttcaggttgttctgattcttgagcctcctctacagcttcagagaggactttcattttattttggatcaaatgctccacaactagttgaaactggaattaaattttatatgaagttcctagatgatttaaagctgtaagaagaagaataatgaatcataagaaaacttgctgctacagacatcaaaaaggaatgttaccatccctcatgctaatccttttcattttaaataaacaggatctaaaaaaaataatgctgggaagtcctaaccacatcaagaatgcctcagatcagtgacccaaggaccttccagaatggatgaaatagacccaaagctgaattcacctaattttagggccaaaaacccaaaaaacaaaacaagaccaaaaaaatcttcagatactgggagaacaaatctcaattgctcaattgtatcttatgaaaacaatttttcaaaataaaacaagagatatttaagattcattaagttcttgtcatttcaaattttaagaaaaatattttctaatggaattacatatatttatatgattcttctagttatatccatggtaataaatactcttttcagttggaaataaaacccatttgtgctatattattagggaaaatatctacataaattagtttttaatttaactaaagtctatcttttgaattcataagcataaaattttaaccacttgcaaaatttataacacacttaaggtagtcagatgccttgtcaagtagtttaacaaaagtgattttcacctgtttgttttaataacagtgcatcgattttatgaaaatcaggcatgccctcgggtcctaacaaagtatacgaagctgaatggatctatgccaaatatgccagattttactttctgagtctgattttatacttctgtcctctttcttaccacatggcttccagtatcacttacagactaacccttcaaaaggagaaggctaagttactaacatttggaaggcttatgaaagtgaagcatagttatgagccagcaatgtttttatttatggaatgtgtgcaaaccacacacttaagcaagctctggggaatgagagttggggggaatcaactgttttatttgctaattggtatttcctttaaaagatagagttcttccagattttaactgtgttaatagttactctagaaaaattggagatttgtgtgcatatattttatgttgtaaacagacacatacccagagacactgagagagacagacagacagtaaacagaggagcactaaccacaaacggtttacaaatgacctctgtgctcattcacctgtctgttccccaccttgccttttatagcaactatagcaacagccatgagagtcattgtggaaagaaataaaataaaattaaaaaatcctggaagcttgtaaagaatgtgagcaaaggggaggaagttgtgaaaaaaatgaataaagggcaccgatccagagtattgaagaaggcagagtggagagcctagtaatgagtatctggtaccccagtatcctctcccacagaatctgtacagctctccgtttatgacagtttaaacttaatttaaattatcaaacagacactttcctcaaacatataaatgatgaggcagttcattcaggctgtatgtataaagctgttccagccacctttttctaacggcttctctatatcttttacatggagacaatgagagatttgcttaggacaatttgactgtaatttagaagtaggaaatgggaagtatttgtatcttctttgcctaactcacattagttactcaagtaagcatttcttccgttattgcattttcctgattacaagttttatgttttctctaaaacacatatcaaaagaaatgtcctaagcactatgcagggggaagccatgacatttatctaccactgtcagcaaaaacatgaacttagccctcaacagaatatttcacttcattctagtgtcacctctgcgtcacctgcactggagtcaccacttgcctgttgggtaagaccaggatgcaccactgaaataaaaaggggtcagacaatacaagaaaagccagtagaaattgccaaatgtatcagaatacacacaggctttctaaggatatggcccaagaggaaggctctagagcccaccctgaaacaggatttttgacttcacagataaattatttaattttcaataacacaattcaattaaagaaagggaaatacaaggctaaacaaataagaaatgaagacaaaaacccaacctttcaaatctaaagaaaataatctgttttaaagacacagatgaagatcaggaacccaaaacagaagaaaggaaaagcaattaacgctggcatctgataacaacgaaaagtatggagtctggagaatcgctagactctaaaaattataaaggtttagacttgggctttgtacactgaagaaaagaaaactgcatgcatttatactgaccaatgtacactattgctgctttttaacttttgtgtatatgtagggtagatttttttttaagtgaaagcaagcttattaagaaagtaaaagaataaaaaggtgncttctccataggcagaaaactagcntagtttttttattagaaattgttattcaanaatagtacatgttacaaataaatnccattttaaactgaaaaaattgtagactttcaaatcagttagggtggtcaccctaaaaaagggcattttttccccttagtctccttgttcatgttgctcacaacaagaaatgggctaatgctatgaataataatancaaacactgccttctgtcaggccctgtgctgaataccgtctgcatatgtataggaaagggttaactcagcaggtcttgtttgcccagactctgtacatttccaagaaaggtctgcctttaggactggtccttggccagctcctggagaatgagctctcagcttttagaaaattctatctgctaagaatagttttgcatgtctcaggtcttgggccacaaaatatcagtttaatcagatggtttatgttaacaagtatgatttatggcaaacatagatctctaatctccatttctctctcatatatctatatttatctatccatatatatgtacctatatatatcaaatataaagatatgtttatagcaattgtatatacgtagagagataatatgtagtatgaagagagacatagatattattcttcattttagaatgttatcttggtatgtttaaaaggaaaaacttaagatgtgttgcaattgcagtatgagtttcaggtatgtacatgttatgtgtgtgtgtgagagacacacacaaacacatttcaaacatgttttatgtttaagctcaatattcaaacacagaaatataacatctattcttaatatgttttatgtaagtacagcagcagcattattaaatactgtatttctatggtgattgaaaattagtaggcagagaatttttgtaatggttcttaataatttttgtaatagtaaatgattactttttgtttagtatagttttataatctatacatgaataaagtggatatttctattcatatagaaatgtgatttactctcatgtacttatctacatgctaaaaccataagttatcaattttagttctgtgccaaggcacttttact

SEQ ID NO: 304268 - DNA, 1675 bp, Homo sapiens
  misc_feature (1537)..(1537): n is a, c, g, or t
  misc_feature (1541)..(1541): n is a, c, g, or t
ggagtcgggttacaccacttgtgtctgagttcacgcagcatgttcctctgtcagggattccgcaaatatctccctgaggtaaaaaaggaaagtgtgctgcgctccagcacccagagcagtgagcccagtcccgagtcccggagagagctccagcaataggggccatgtcgccatagccccagcctctcggtccgcagcctcagcagcgtcccagccggctggcttcatgctgcggtgcagctgcaccatgttcctgggttgagggggcaatcgggcacgctcctccccatgggttgcccatcatgtctaatggatatcgcactctgtcccagcacctcaatgacctgaagaaggagaacttcagcctcaagctgctcatctacttcctggaggagcgcatgcaacagaagtatgaggccagccgggaggacatctacaagcggaacactgagctgaaggttgaagtggagagcttgaaacgagaactccaggacaagaaacagcatctggataaaacatgggctgatgtggagaatctcaacagtcagaatgaagctgagctccgacgccagtttgaggagcgacagcaggagacggagcatgtttatgagctcttggagaataagatgcagcttctgcaggaggaatccaggctagcaaagaatgaagctgcgcggatggcagctctggtggaagcagagaaggagtgtaacctggagctctcagagaaactgaagggagtcaccaaaaactgggaagatgtaccaggagaccaggtcaagcccgaccaatacactgaggccctggcccagagggacaagatctaaaaaaaataatgctgggaagtcctaaccacatcaagaatgcctcagatcagtgacccaaggaccttccagaatggatgaaatagacccaaagctgaattcacctaattttagggccaaaaacccaaaaaacaaaacaagaccaaaaaaatcttcagatactgggagaacaaatctcaattgctcaattgtatcttatgaaaacaatttttcaaaataaaacaagagatatttaagattcattaagttcttgtcatttcaaattttaagaaaaatattttctaatggaattacatatatttatatgattcttctagttatatccatggtaataaatactcttttcagttggaaataaaacccatttgtgctatattattagggaaaatatctacataaattagtttttaatttaactaaagtctatcttttgaattcataagcataaaattttaaccacttgcaaaatttataacacacttaaggtagtcagatgccttgtcaagtagtttaacaaaagtgattttcacctgtttgttttaataacagtgcatcgattttatgaaaatcaggcatgccctcgggtcctaacaaagtatacgaagctgaatggatctatgccaaatatgccagattttactttctgagtctgattttatacttctgtcctctttcttaccacatggcttccagtatcacttacagatacctcnaagngagggtggtccactgggcagtctgcaggcgcctttgggccccaggttttgggggggcccccctccctcgggagggggggaccgctttctgggtcccagagtccccggggcaccaggggggtttttttccccccg

SEQ ID NO: 304269 - DNA, 1326 bp, Homo sapiens
ggagtcgggttacaccacttgtgtctgagttcacgcagcatgttcctctgtcagggattccgcaaatatctccctgaggtaaaaaaggaaagtgtgctgcgctccagcacccagagcagtgagcccagtcccgagtcccggagagagctccagcaataggggccatgtcgccatagccccagcctctcggtccgcagcctcagcagcgtcccagccggctggcttcatgctgcggtgcagctgcaccatgttcctgggttgagggggcaatcgggcacgctcctccccatgggttgcccatcatgtctaatggatatcgcactctgtcccagcacctcaatgacctgaagaaggagaacttcagcctcaagctgctcatctacttcctggaggagcgcatgcaacagaagtatgaggccagccgggaggacatctacaagcggaacactgagctgaaggttgaagtggagagcttgaaacgagaactccaggacaagaaacagcatctggataaaacatgggctgatgtggagaatctcaacagtcagaatgaagctgagctccgacgccagtttgaggagcgacagcaggagacggagcatgtttatgagctcttggagaataagatgcagcttctgcaggaggaatccaggctagcaaagaatgaagctgcgcggatggcagctctggtggaagcagagaaggagtgtaacctggagctctcagagaaactgaagggagtcaccaaaaactgggaagatgtaccaggagaccaggtcaagcccgaccaatacactgaggccctggcccagagggacaatccttcaactgacagcttaaagaacttcaggttgttctgattcttgagcctcctctacagcttcagagaggactttcattttattttggatcaaatgctccacaactagttgaaactggaattaaattttatatgaagttcctagatgatttaaagctgtaagaagaagaataatgaatcataagaaaacttgctgctacagacatcaaaaaggaatgttaccatccctcatgctaatccttttcattttaaataaacaggatctaaaaaaaataatgctgggaagtcctaaccacatcaagaatgcctcagatcagtgacccaaggaccttccagaatggatgaaatagacccaaagctgaattcacctaattttagggccaaaaacccaaaaaacaaaacaagaccaaaaaaatcttcagatactgggagaacaaatctcaattgctcaattgtatcttatgaaaacaatttttcaaaataaaacaagagatatttaagattca

SEQ ID NO: 304270 - DNA, 730 bp, Homo sapiens
ggagtcgggttacaccacttgtgtctgagttcacgcagcatgttcctctgtcagggattccgcaaatatctccctgaggtaaaaaaggaaagtgtgctgcgctccagcacccagagcagtgagcccagtcccgagtcccggagagagctccagcaataggggccatgtcgccatagccccagcctctcggtccgcagcctcagcagcgtcccagccggctggcttcatgctgcggtgcagctgcaccatgttcctgggttgagggggcaatcgggcacgctcctccccatgggttgcccatcatgtctaatggatatcgcactctgtcccagcacctcaatgacctgaagaaggagaacttcagcctcaagctgctcatctacttcctggaggagcgcatgcaacagaagtatgaggccagccgggaggacatctacaagcggaacactgagctgaaggttgaagtggagagcttgaaacgagaactccaggacaagaaacagcatctggataaaacatgggctgatgtggagaatctcaacagtcagaatgaagctgagctccgacgccagtttgaggagcgacagcaggagacggagcatgtttatgagctcttggagaataagatgcagcttctgcaggaggaatccaggctagcaaagaatgaagctgcgcggatggcagctccaggttccactccttctctgcttccaccagagctggtctgacc

SEQ ID NO: 304271 - DNA, 1873 bp, Homo sapiens
  misc_feature (783)..(783): n is a, c, g, or t
  misc_feature (808)..(808): n is a, c, g, or t
  misc_feature (838)..(838): n is a, c, g, or t
  misc_feature (862)..(862): n is a, c, g, or t
  misc_feature (998)..(998): n is a, c, g, or t
cctttaaaaaataacatcagggatgaccctttcaagacattaagtaaatccaaaagggccaatattatatgaatcccttgatgtgaggtacctagactagtgaaattcataaagacaaagtagaacaaagattacgttttgtcacagggggcaggagggaatgggaatttattgtttaaggggcacagagattagtgtgggatcatgaaaaagttccggaggtgcatagtggtgactggtacatacaacgaatgtatttaatgcctttaaactgtaacttcaaaatggttaaaatttaaatcttacgaacattttgccacagtaaatttgaaaaataactattccattaatttaacaatactcaagaatgaagaaagccaatgatggtgggggaaaaaaagtttaggttcataaactgtcttaaatctgtatacaaggctaaacaaataagaaatgaagacaaaaacccaacctttcaaatctaaagaaaataatctgttttaaagacacagatgaagatcaggaacccaaaacagaagaaaggaaaagcaattaacgctggcatctgataacaacgaaaagtatggagtctggagaatcgctagactctaaaaattataaaggtttagacttgggctttgtacactgaagaaaagaaaactgcatgcatttatactgaccaatgtacactattgctgctttttaacttttgtgtatatgtagggtagatttttttttaagtgaaagcaagcttattaagaaagtaaaagaataaaaaggtgncttctccataggcagaaaactagcntagtttttttattagaaattgttattcaanaatagtacatgttacaaataaatnccattttaaactgaaaaaattgtagactttcaaatcagttagggtggtcaccctaaaaaagggcattttttccccttagtctccttgttcatgttgctcacaacaagaaatgggctaatgctatgaataataatancaaacactgccttctgtcaggccctgtgctgaataccgtctgcatatgtataggaaagggttaactcagcaggtcttgtttgcccagactctgtacatttccaagaaaggtctgcctttaggactggtccttggccagctcctggagaatgagctctcagcttttagaaaattctatctgctaagaatagttttgcatgtctcaggtcttgggccacaaaatatcagtttaatcagatggtttatgttaacaagtatgatttatggcaaacatagatctctaatctccatttctctctcatatatctatatttatctatccatatatatgtacctatatatatcaaatataaagatatgtttatagcaattgtatatacgtagagagataatatgtagtatgaagagagacatagatattattcttcattttagaatgttatcttggtatgtttaaaaggaaaaacttaagatgtgttgcaattgcagtatgagtttcaggtatgtacatgttatgtgtgtgtgtgagagacacacacaaacacatttcaaacatgttttatgtttaagctcaatattcaaacacagaaatataacatctattcttaatatgttttatgtaagtacagcagcagcattattaaatactgtatttctatggtgattgaaaattagtaggcagagaatttttgtaatggttcttaataatttttgtaatagtaaatgattactttttgtttagtatagttttataatctatacatgaataaagtggatatttctattcatatagaaatgtgatttactctcatgtacttatctacatgctaaaaccataagttatcaattttagttctgtgccaaggcacttttact

SEQ ID NO: 304272 - DNA, 594 bp, Homo sapiens
tcttttcttcttttttctttttccagtttttccaacttcccctttccctgcatcagactttcttttatcccagaatacagcaatagcctttatatctataatcttaaaatcctttctttcctcaagtctgtatattatctgcagcagtaattcttcatttctttcatttctctcagttttcttacatcatcgccaatgaattagccaagatgttctcctgtgctcttttggtgaaattttcagaacaaaacaagaaaaaggagatccctttggtacattagaatcctggaacttctttcttctctctctttctttctctctctcgtttccttgtagacagaatatagatttttgtttctttcttataatgggcctgttcaccttcaccctgtcttcaaattttttctttctctttagcagaaatgaatttccatcttttctgaacataaaaaaaagaagaattctaagaagttgactgaagcatctgggtgctttttcttgggctccttctggcaagttggcagaacgaaggaaagaaggcagggaaggagggagagaggagggaggggaggaaggaaggaagggagggaggga

SEQ ID NO: 304273 - DNA, 989 bp, Homo sapiens
ggagtcgggttacaccacttgtgtctgagttcacgcagcatgttcctctgtcagggattccgcaaatatctccctgaggtaaaaaaggaaagtgtgctgcgctccagcacccagagcagtgagcccagtcccgagtcccggagagagctccagcaataggggccatgtcgccatagccccagcctctcggtccgcagcctcagcagcgtcccagccggctggcttcatgctgcggtgcagctgcaccatgttcctgggttgagggggcaatcgggcacgctcctccccatgggttgcccatcatgtctaatggatatcgcactctgtcccagcacctcaatgacctgaagaaggagaacttcagcctcaagctgctcatctacttcctggaggagcgcatgcaacagaagtatgaggccagccgggaggacatctacaagcggggctgatgtggagaatctcaacagtcagaatgaagctgagctccgacgccagtttgaggagcgacagcaggagacggagcatgtttatgagctcttggagaataagatgcagcttctgcaggaggaatccaggctagcaaagaatgaagctgcgcggatggcagctctggtggaagcagagaaggagtgtaacctggagctctcagagaaactgaagggagtcaccaaaaactgggaagatgtaccaggagaccaggtcaagcccgaccaatacactgaggccctggcccagagggacaagatctaaaaaaaataatgctgggaagtcctaaccacatcaagaatgcctcagatcagtgacccaaggaccttccagaatggatgaaatagacccaaagctgaattcacctaattttagggccaaaaacccaaaaaacaaaacaagaccaaaaaaatcttcagatactgggagaacaaatctcaattgctcaattgtatcttatgaaaacaatttttcaaaataaaacaagagatatttaagattca

SEQ ID NO: 304274 - DNA, 1206 bp, Homo sapiens
ggagtcgggttacaccacttgtgtctgagttcacgcagcatgttcctctgtcagggattccgcaaatatctccctgaggtaaaaaaggaaagtgtgctgcgctccagcacccagagcagtgagcccagtcccgagtcccggagagagctccagcaataggggccatgtcgccatagccccagcctctcggtccgcagcctcagcagcgtcccagccggctggcttcatgctgcggtgcagctgcaccatgttcctgggttgagggggcaatcgggcacgctcctccccatgggttgcccatcatgtctaatggatatcgcactctgtcccagcacctcaatgacctgaagaaggagaacttcagcctcaagctgctcatctacttcctggaggagcgcatgcaacagaagtatgaggccagccgggaggacatctacaagcggaacactgagctgaaggttgaagtggagagcttgaaacgagaactccaggacaagaaacagcatctggataaaacatgggctgatgtggagaatctcaacagtcagaatgaagctgagctccgacgccagtttgaggagcgacagcaggagacggagcatgtttatgagctcttggagaataagatgcagcttctgcaggaggaatccaggctagcaaagaatgaagctgcgcggatggcagctctggtggaagcagagaaggagtgtaacctggagctctcagagaaactgaagggagtcaccaaaaactgggaagatgtaccaggagaccaggtcaagcccgaccaatacactgaggccctggcccagagggacaaatctaggtttctccactcaggaaaagaggagaatgtacccatacttgggaaaacaagtttccgatggcacagctttgatcaaacagcaaaattctatccatctatgtattgccatctgacagtatgacaaatggtcccatgtgcgatattcacactgcattgcagtcaaacctgtaagtcaaaggatatgaaataatagtaactatacattaagcacagaagaaaatgaaacaaacaaaaaggttttaaaccaaccaaaaatatgtcttattttggatgttctatatgttcttacattctctcaggtcttttgtgtcattatgaacacaattctaacaagcttgattattttatttccattcacatattacaggcaagctgaaaaa

SEQ ID NO: 304275 - DNA, 953 bp, Homo sapiens
aaccgaggaggtggaggttgcagtgagccgagatcacaccactgcactccagcctggtgacagagcgagactccgtctcaaaaaaaaaaaaaaaaaaagaaattagtggggcatggtggtgtacgcttatggtcccagctacttgggatgctgaggtgggaggatcacttggacccaggagttagaggttgcagtgggctgtgatcactgcacttcagcctgggcgaaagaacaagatggacgctgtctcaaaaaataaacttttatgaacatggttgtacatgtgtctatatgccttaggttactgttcctaagagaagttataaaatgagaaattaataaaaggattgctgggaggacatgcaccttttaaattttgatattactgccaaaattgcccttcaagagtttgatagtatttttccatatttttctttttaatttttgctaatttcgtagacaaaagatagtctcttgttaaaatttgtatttctttattagtgaggttgaatgtctttttatgttaattgaccatttgaatttcttgtatgacttttgactcttcatatgctttcttcattgtttcttttctctttggtttgttgaagtttttttgcacattcccttaagtttggcagtctaatctgtatctttggcataaatattttaaaacaaaaaatgctggccaagtgtggtggctcaggcctataatcccagaacttgggaggctgaggtgggagtattgcttgagctcaggagtttgagaccagtcggggcaatatagtgggacctcatctccacaaaaagaagaaacagccaaaaaaaaaaaaaaaaaaaaaagtactaccagtatttatctaagggcagaagaccagtaatggcttttaagagtccattttgtcattgtctccctagttaattacaggtgggggatcttttgcctctggtctctt

SEQ ID NO: 304276 - DNA, 3526 bp, Homo sapiens
acggaccggcaggcctagctccggggctgcggcggctgaggcgcggggatggagcccctgcgggtgctggagctatacagcggcgtgggcggcatgcaccacgcgctgagagaaagctgtatacctgcacaagtggtggctgccattgatgtcaacactgtcgctaatgaagtatacaagtataattttcctcacacacagttacttgccaagacgattgaaggcattacactcgaagagtttgacagattatcttttgatatgattttaatgagccctccctgccagccattcacaaggattggccggcagggtgatatgactgattcaaggacgaatagcttcttacatattctagatattctcccaagattacaaaaattaccaaagtatattcttttggaaaatgttaaaggttttgaagtatcttctacaagagacctcttgatacaaacaatagaaaattgtggctttcagtaccaagagtttctattatctccaacctctcttggcattccaaattcaaggctacgatattttcttattgcaaagcttcagtcagagccattaccctttcaagcccctggtcaggtactgatggagttccccaaaattgaatctgtacatccacaaaaatatgcaatggatgtagaaaataaaattcaagaaaagaacgttgaaccaaatattagctttgatggcagcatacagtgttctggaaaagatgccattctttttaagcttgaaactgcagaagaaattcacaggaaaaatcaacaagatagtgatctctctgtgaaaatgctaaaagattttcttgaagatgacactgacgtgaaccagtatcttttaccaccaaagtcattgctgcgatatgctcttctgttagacattgttcagcccacttgtagaaggtccgtgtgctttaccaaaggatatggaagctacatagaagggacagggtctgtgttacagactgcagaggatgtgcaggttgagaatatctacaaatcccttaccaatttgtcacaagaagaacagataacaaagctgttaatacttaaactgcgatatttcactcctaaagaaatagcaaatctccttggatttcctccagagttcggatttcctgagaagataacagtgaaacagcgttatcgcctacttggaaatagtctcaacgtgcatgtagtagctaaactaatcaaaatcttatatgaataattttgaaataactctgaaagatggtcatatgatattccttcattttcagagagtaattctgaaattctgttttgaactaattctggtgaaatttaactaaattattttaatctgtccttattaagaaatttggattttattaaaaaaatccatgtgtttcatcaaatttatattactgtattttataaaatacgaactattgttatgctttatggagagtatattttcatatgaaactgataaatatatatgtggaatattctttttaaaaacaattttataaacaaatcaaggagcactagagctttagtgtctacatgagtatcttgtgaagtgtcataacaggcataacatatttttatgttaattaaagaagttttttatttctaattttaaaataatgattctaattctagcccattgaatgttttacttaatttccaatcctgtaaatatttctttatttcatctaaacaaatgcatatgatatgtaaaccaaattatcatcattcagtttatacagcagactgaagaatatgtcaggaaaaataatcctaaatgtttgattacctctccatgaagcggccacagaaactgttggtgcacattatctacattttcctcagcctctatctgaaggacaaaactcatttttccttcttcattttgtatgtactttcctttagttgactattatcaaagcttgtttttgtcttctcagcttctgagttgaatttgcctttgcacgctgaggaatgtagcatgacgttaagatttcagggaggaagctgccctctgatcccatgtcatatgacagtactcccctccccccagttgttctttattgtagcaacatacactctcaatgaacttttatgacttttaactttctctgtctctcttcctcagcagacctcttggaattagggtttctaatcaaactaagtcttgcatcataaattctatggtttgtgataaaagcaagtgacaaagagaagagagatgaaaagaaacaagtccagaaatcatattacaagattttaattcaaatttttcttcttaaaaatcagctatttagaggtggataaattggaagtttgtgcattgcttgtgggaacgtaaaatggttcagctgctgttggaaaacgctatggaggttcgtcacaaaattcaacatagaattaccctatgattcagcgattccacctctggctatagatccaaaagaattgaaagcagggacttgaacagatatttgtacaccagtgtttataacaccattatttacagtagccaaaaggtagaagcagcccaagtgtcatcccattcacccatgaatggatgcaggaattgtgttccgtgcatgcagtggaatagtaccagccttccgcaggaaggaaattctgacatatgcggtgacatggatgaaccttgagtacattatgcgaagtgaaataagccaccctgtggggatggagaatgggtagttagtgcataatggatacaaagtttctgattggggtgatgagaaagttctggaggtggatggggaggatggttgcacaacagtgtgagtgtacttaatgccactgcaactgtatatttaaaaatagttaaaatgataaattttacattatgtatattttactgcaattgaaaaaatcatactctattaccaatttttcagaactcatagataaatatgaatgtagggaagctgtaagccagcccatatacagaaactatcactatctacatttttcatatgtgttcagacagagcctattacaagtctcataaatttcagtaaacaatcacaaattattttggcacactttcatgtaggttctgttcactgctgaaatattctaaataaaatggtttagagttttactgtaactatgaataattatgctataattatagtatcccacattcggttgagcaacattatacaaaataagtgtcgagttactgtgcaccaactataaatacttgaaaggtctgtagagacatttgcttacaaactggtagacagaatgtagcttagtggaattcttaaattatgggaatgtattcacaggaagacggtgattcttgcccttaattcataattgaaaatatgcagtaacaagcataaaactcacatcttaatgaagatgtatctaccagtgtcattcaattagcagatgtatatgtatgcataattaatttggaaaatgttattttatggaatgtctgctatatgcttttggtaataatgctgtatataaaatttgcactggaaattctgtttcctgat

SEQ ID NO: 304277 - DNA, 1435 bp, Homo sapiens
acggaccggcaggcctagctccggggctgcggcggctgaggcgcggggatggagcccctgcgggtgctggagctatacagcggcgtgggcggcatgcaccacgcgctgagagaaagctgtatacctgcacaagtggtggctgccattgatgtcaacactgtcgctaatgaagtatacaagtataattttcctcacacacagttacttgccaagacgattgaaggcattacactcgaagagtttgacagattatcttttgatatgattttaatgagccctccctgccagccattcacaaggattggccggcagggtgatatgactgattcaaggacgaatagcttcttacatattctagatattctcccaagattacaaaaattaccaaagtatattcttttggaaaatgttaaaggttttgaagtatcttctacaagagacctcttgatacaaacaatagaaaattgtggctttcagtaccaagagtttctattatctccaacctctcttggcattccaaattcaaggctacgatattttcttattgcaaagcttcagtcagagccattaccctttcaagcccctggtcaggtactgatggagttccccaaaattgaatctgtacatccacaaaaatatgcaatggatgtagaaaataaaattcaagaaaagaacgttgaaccaaatattagctttgatggcagcatacagtgttctggaaaagatgccattctttttaagcttgaaactgcagaagaaattcacaggaaaaatcaacaagatagtgatctctctgtgaaaatgctaaaagattttcttgaagatgacactgacgtgaaccagtatcttttaccaccaaagtcattgctgcgatatgctcttctgttagacattgttcagcccacttgtagaaggtccgtgtgctttaccaaaggatatggaagctacatagaagggacagggtctgtgttacagactgcagaggatgtgcaggttgagaatatctacaaatcccttaccaatttgtcacaagaagaacagataacaaagctgttaatacttaaactgcgatatttcactcctaaagaaatagcaaatctccttggatttcctccagagttcggatttcctgagaagataacagtgaaacagcgttatcgcctacttggaaatagtctcaacgtgcatgtagtagctaaactaatcaaaatcttatatgaataattttgaaataactctgaaagatggtcatatgatattccttcattttcagagagtaattctgaaattctgttttgaactaattctggtgaaatttaactaaattattttaatctgtccttattaagaaatttggattttattaaaaaaatccatgtgtttcatcaaatttatattactgtattttataaaatacgaactattgttatgcttt

SEQ ID NO: 304278 - DNA, 363 bp, Homo sapiens
gaaacttccctgcttccttatttaggaccaagagtaacaagagtaactaaagctgtatacctgcacaagtggtggctgccattgatgtcaacactgtcgctaatgaagtatacaagtataattttcctcacacacagttacttgccaagacgattgaattacatactgtagagtaaatgatagctaccgaagacagagtgatccgtgataaatatcattaatgcctctgaagaggagaatgactccagtggaacaaaaactcttaataaaaatagataaaaatttttctagaatgaaatttacaatataacatccatgagcccttctggaacagatgactgcatcacttaatctagctgagca

SEQ ID NO: 304279 - DNA, 3454 bp, Homo sapiens
acggaccggcaggcctagctccggggctgcggcggctgaggcgcggggatggagcccctgcgggtgctggagctatacagcggcgtgggcggcatgcaccacgcgctgagagaaagctgtatacctgcacaagtggtggctgccattgatgtcaacactgtcgctaatgaagtatacaagtataattttcctcacacacagttacttgccaagacgattgaaggcattacactcgaagagtttgacagattatcttttgatatgattttaatgagccctccctgccagccattcacaagattacaaaaattaccaaagtatattcttttggaaaatgttaaaggttttgaagtatcttctacaagagacctcttgatacaaacaatagaaaattgtggctttcagtaccaagagtttctattatctccaacctctcttggcattccaaattcaaggctacgatattttcttattgcaaagcttcagtcagagccattaccctttcaagcccctggtcaggtactgatggagttccccaaaattgaatctgtacatccacaaaaatatgcaatggatgtagaaaataaaattcaagaaaagaacgttgaaccaaatattagctttgatggcagcatacagtgttctggaaaagatgccattctttttaagcttgaaactgcagaagaaattcacaggaaaaatcaacaagatagtgatctctctgtgaaaatgctaaaagattttcttgaagatgacactgacgtgaaccagtatcttttaccaccaaagtcattgctgcgatatgctcttctgttagacattgttcagcccacttgtagaaggtccgtgtgctttaccaaaggatatggaagctacatagaagggacagggtctgtgttacagactgcagaggatgtgcaggttgagaatatctacaaatcccttaccaatttgtcacaagaagaacagataacaaagctgttaatacttaaactgcgatatttcactcctaaagaaatagcaaatctccttggatttcctccagagttcggatttcctgagaagataacagtgaaacagcgttatcgcctacttggaaatagtctcaacgtgcatgtagtagctaaactaatcaaaatcttatatgaataattttgaaataactctgaaagatggtcatatgatattccttcattttcagagagtaattctgaaattctgttttgaactaattctggtgaaatttaactaaattattttaatctgtccttattaagaaatttggattttattaaaaaaatccatgtgtttcatcaaatttatattactgtattttataaaatacgaactattgttatgctttatggagagtatattttcatatgaaactgataaatatatatgtggaatattctttttaaaaacaattttataaacaaatcaaggagcactagagctttagtgtctacatgagtatcttgtgaagtgtcataacaggcataacatatttttatgttaattaaagaagttttttatttctaattttaaaataatgattctaattctagcccattgaatgttttacttaatttccaatcctgtaaatatttctttatttcatctaaacaaatgcatatgatatgtaaaccaaattatcatcattcagtttatacagcagactgaagaatatgtcaggaaaaataatcctaaatgtttgattacctctccatgaagcggccacagaaactgttggtgcacattatctacattttcctcagcctctatctgaaggacaaaactcatttttccttcttcattttgtatgtactttcctttagttgactattatcaaagcttgtttttgtcttctcagcttctgagttgaatttgcctttgcacgctgaggaatgtagcatgacgttaagatttcagggaggaagctgccctctgatcccatgtcatatgacagtactcccctccccccagttgttctttattgtagcaacatacactctcaatgaacttttatgacttttaactttctctgtctctcttcctcagcagacctcttggaattagggtttctaatcaaactaagtcttgcatcataaattctatggtttgtgataaaagcaagtgacaaagagaagagagatgaaaagaaacaagtccagaaatcatattacaagattttaattcaaatttttcttcttaaaaatcagctatttagaggtggataaattggaagtttgtgcattgcttgtgggaacgtaaaatggttcagctgctgttggaaaacgctatggaggttcgtcacaaaattcaacatagaattaccctatgattcagcgattccacctctggctatagatccaaaagaattgaaagcagggacttgaacagatatttgtacaccagtgtttataacaccattatttacagtagccaaaaggtagaagcagcccaagtgtcatcccattcacccatgaatggatgcaggaattgtgttccgtgcatgcagtggaatagtaccagccttccgcaggaaggaaattctgacatatgcggtgacatggatgaaccttgagtacattatgcgaagtgaaataagccaccctgtggggatggagaatgggtagttagtgcataatggatacaaagtttctgattggggtgatgagaaagttctggaggtggatggggaggatggttgcacaacagtgtgagtgtacttaatgccactgcaactgtatatttaaaaatagttaaaatgataaattttacattatgtatattttactgcaattgaaaaaatcatactctattaccaatttttcagaactcatagataaatatgaatgtagggaagctgtaagccagcccatatacagaaactatcactatctacatttttcatatgtgttcagacagagcctattacaagtctcataaatttcagtaaacaatcacaaattattttggcacactttcatgtaggttctgttcactgctgaaatattctaaataaaatggtttagagttttactgtaactatgaataattatgctataattatagtatcccacattcggttgagcaacattatacaaaataagtgtcgagttactgtgcaccaactataaatacttgaaaggtctgtagagacatttgcttacaaactggtagacagaatgtagcttagtggaattcttaaattatgggaatgtattcacaggaagacggtgattcttgcccttaattcataattgaaaatatgcagtaacaagcataaaactcacatcttaatgaagatgtatctaccagtgtcattcaattagcagatgtatatgtatgcataattaatttggaaaatgttattttatggaatgtctgctatatgcttttggtaataatgctgtatataaaatttgcactggaaattctgtttcctgat

SEQ ID NO: 304280 - DNA, 3388 bp, Homo sapiens
acggaccggcaggcctagctccggggctgcggcggctgaggcgcggggatggagcccctgcgggtgctggagctatacagcggcgtgggcggcatgcaccacgcgctgagagaaagctgtatacctgcacaagtggtggctgccattgatgtcaacactgtcgctaatgaagtatacaagtataattttcctcacacacagttacttgccaagacgattgaaggcattacactcgaagagtttgacagattatcttttgatatgattttaatgagccctccctgccagccattcacaagagacctcttgatacaaacaatagaaaattgtggctttcagtaccaagagtttctattatctccaacctctcttggcattccaaattcaaggctacgatattttcttattgcaaagcttcagtcagagccattaccctttcaagcccctggtcaggtactgatggagttccccaaaattgaatctgtacatccacaaaaatatgcaatggatgtagaaaataaaattcaagaaaagaacgttgaaccaaatattagctttgatggcagcatacagtgttctggaaaagatgccattctttttaagcttgaaactgcagaagaaattcacaggaaaaatcaacaagatagtgatctctctgtgaaaatgctaaaagattttcttgaagatgacactgacgtgaaccagtatcttttaccaccaaagtcattgctgcgatatgctcttctgttagacattgttcagcccacttgtagaaggtccgtgtgctttaccaaaggatatggaagctacatagaagggacagggtctgtgttacagactgcagaggatgtgcaggttgagaatatctacaaatcccttaccaatttgtcacaagaagaacagataacaaagctgttaatacttaaactgcgatatttcactcctaaagaaatagcaaatctccttggatttcctccagagttcggatttcctgagaagataacagtgaaacagcgttatcgcctacttggaaatagtctcaacgtgcatgtagtagctaaactaatcaaaatcttatatgaataattttgaaataactctgaaagatggtcatatgatattccttcattttcagagagtaattctgaaattctgttttgaactaattctggtgaaatttaactaaattattttaatctgtccttattaagaaatttggattttattaaaaaaatccatgtgtttcatcaaatttatattactgtattttataaaatacgaactattgttatgctttatggagagtatattttcatatgaaactgataaatatatatgtggaatattctttttaaaaacaattttataaacaaatcaaggagcactagagctttagtgtctacatgagtatcttgtgaagtgtcataacaggcataacatatttttatgttaattaaagaagttttttatttctaattttaaaataatgattctaattctagcccattgaatgttttacttaatttccaatcctgtaaatatttctttatttcatctaaacaaatgcatatgatatgtaaaccaaattatcatcattcagtttatacagcagactgaagaatatgtcaggaaaaataatcctaaatgtttgattacctctccatgaagcggccacagaaactgttggtgcacattatctacattttcctcagcctctatctgaaggacaaaactcatttttccttcttcattttgtatgtactttcctttagttgactattatcaaagcttgtttttgtcttctcagcttctgagttgaatttgcctttgcacgctgaggaatgtagcatgacgttaagatttcagggaggaagctgccctctgatcccatgtcatatgacagtactcccctccccccagttgttctttattgtagcaacatacactctcaatgaacttttatgacttttaactttctctgtctctcttcctcagcagacctcttggaattagggtttctaatcaaactaagtcttgcatcataaattctatggtttgtgataaaagcaagtgacaaagagaagagagatgaaaagaaacaagtccagaaatcatattacaagattttaattcaaatttttcttcttaaaaatcagctatttagaggtggataaattggaagtttgtgcattgcttgtgggaacgtaaaatggttcagctgctgttggaaaacgctatggaggttcgtcacaaaattcaacatagaattaccctatgattcagcgattccacctctggctatagatccaaaagaattgaaagcagggacttgaacagatatttgtacaccagtgtttataacaccattatttacagtagccaaaaggtagaagcagcccaagtgtcatcccattcacccatgaatggatgcaggaattgtgttccgtgcatgcagtggaatagtaccagccttccgcaggaaggaaattctgacatatgcggtgacatggatgaaccttgagtacattatgcgaagtgaaataagccaccctgtggggatggagaatgggtagttagtgcataatggatacaaagtttctgattggggtgatgagaaagttctggaggtggatggggaggatggttgcacaacagtgtgagtgtacttaatgccactgcaactgtatatttaaaaatagttaaaatgataaattttacattatgtatattttactgcaattgaaaaaatcatactctattaccaatttttcagaactcatagataaatatgaatgtagggaagctgtaagccagcccatatacagaaactatcactatctacatttttcatatgtgttcagacagagcctattacaagtctcataaatttcagtaaacaatcacaaattattttggcacactttcatgtaggttctgttcactgctgaaatattctaaataaaatggtttagagttttactgtaactatgaataattatgctataattatagtatcccacattcggttgagcaacattatacaaaataagtgtcgagttactgtgcaccaactataaatacttgaaaggtctgtagagacatttgcttacaaactggtagacagaatgtagcttagtggaattcttaaattatgggaatgtattcacaggaagacggtgattcttgcccttaattcataattgaaaatatgcagtaacaagcataaaactcacatcttaatgaagatgtatctaccagtgtcattcaattagcagatgtatatgtatgcataattaatttggaaaatgttattttatggaatgtctgctatatgcttttggtaataatgctgtatataaaatttgcactggaaattctgtttcctgat

SEQ ID NO: 304281 - DNA, 3377 bp, Homo sapiens
acggaccggcaggcctagctccggggctgcggcggctgaggcgcggggatggagcccctgcgggtgctggagctatacagcggcgtgggcggcatgcaccacgcgctgagagaaagctgtatacctgcacaagtggtggctgccattgatgtcaacactgtcgctaatgaagtatacaagtataattttcctcacacacagttacttgccaagacgattgaaattacaaaaattaccaaagtatattcttttggaaaatgttaaaggttttgaagtatcttctacaagagacctcttgatacaaacaatagaaaattgtggctttcagtaccaagagtttctattatctccaacctctcttggcattccaaattcaaggctacgatattttcttattgcaaagcttcagtcagagccattaccctttcaagcccctggtcaggtactgatggagttccccaaaattgaatctgtacatccacaaaaatatgcaatggatgtagaaaataaaattcaagaaaagaacgttgaaccaaatattagctttgatggcagcatacagtgttctggaaaagatgccattctttttaagcttgaaactgcagaagaaattcacaggaaaaatcaacaagatagtgatctctctgtgaaaatgctaaaagattttcttgaagatgacactgacgtgaaccagtatcttttaccaccaaagtcattgctgcgatatgctcttctgttagacattgttcagcccacttgtagaaggtccgtgtgctttaccaaaggatatggaagctacatagaagggacagggtctgtgttacagactgcagaggatgtgcaggttgagaatatctacaaatcccttaccaatttgtcacaagaagaacagataacaaagctgttaatacttaaactgcgatatttcactcctaaagaaatagcaaatctccttggatttcctccagagttcggatttcctgagaagataacagtgaaacagcgttatcgcctacttggaaatagtctcaacgtgcatgtagtagctaaactaatcaaaatcttatatgaataattttgaaataactctgaaagatggtcatatgatattccttcattttcagagagtaattctgaaattctgttttgaactaattctggtgaaatttaactaaattattttaatctgtccttattaagaaatttggattttattaaaaaaatccatgtgtttcatcaaatttatattactgtattttataaaatacgaactattgttatgctttatggagagtatattttcatatgaaactgataaatatatatgtggaatattctttttaaaaacaattttataaacaaatcaaggagcactagagctttagtgtctacatgagtatcttgtgaagtgtcataacaggcataacatatttttatgttaattaaagaagttttttatttctaattttaaaataatgattctaattctagcccattgaatgttttacttaatttccaatcctgtaaatatttctttatttcatctaaacaaatgcatatgatatgtaaaccaaattatcatcattcagtttatacagcagactgaagaatatgtcaggaaaaataatcctaaatgtttgattacctctccatgaagcggccacagaaactgttggtgcacattatctacattttcctcagcctctatctgaaggacaaaactcatttttccttcttcattttgtatgtactttcctttagttgactattatcaaagcttgtttttgtcttctcagcttctgagttgaatttgcctttgcacgctgaggaatgtagcatgacgttaagatttcagggaggaagctgccctctgatcccatgtcatatgacagtactcccctccccccagttgttctttattgtagcaacatacactctcaatgaacttttatgacttttaactttctctgtctctcttcctcagcagacctcttggaattagggtttctaatcaaactaagtcttgcatcataaattctatggtttgtgataaaagcaagtgacaaagagaagagagatgaaaagaaacaagtccagaaatcatattacaagattttaattcaaatttttcttcttaaaaatcagctatttagaggtggataaattggaagtttgtgcattgcttgtgggaacgtaaaatggttcagctgctgttggaaaacgctatggaggttcgtcacaaaattcaacatagaattaccctatgattcagcgattccacctctggctatagatccaaaagaattgaaagcagggacttgaacagatatttgtacaccagtgtttataacaccattatttacagtagccaaaaggtagaagcagcccaagtgtcatcccattcacccatgaatggatgcaggaattgtgttccgtgcatgcagtggaatagtaccagccttccgcaggaaggaaattctgacatatgcggtgacatggatgaaccttgagtacattatgcgaagtgaaataagccaccctgtggggatggagaatgggtagttagtgcataatggatacaaagtttctgattggggtgatgagaaagttctggaggtggatggggaggatggttgcacaacagtgtgagtgtacttaatgccactgcaactgtatatttaaaaatagttaaaatgataaattttacattatgtatattttactgcaattgaaaaaatcatactctattaccaatttttcagaactcatagataaatatgaatgtagggaagctgtaagccagcccatatacagaaactatcactatctacatttttcatatgtgttcagacagagcctattacaagtctcataaatttcagtaaacaatcacaaattattttggcacactttcatgtaggttctgttcactgctgaaatattctaaataaaatggtttagagttttactgtaactatgaataattatgctataattatagtatcccacattcggttgagcaacattatacaaaataagtgtcgagttactgtgcaccaactataaatacttgaaaggtctgtagagacatttgcttacaaactggtagacagaatgtagcttagtggaattcttaaattatgggaatgtattcacaggaagacggtgattcttgcccttaattcataattgaaaatatgcagtaacaagcataaaactcacatcttaatgaagatgtatctaccagtgtcattcaattagcagatgtatatgtatgcataattaatttggaaaatgttattttatggaatgtctgctatatgcttttggtaataatgctgtatataaaatttgcactggaaattctgtttcctgat

SEQ ID NO: 304282 - DNA, 3383 bp, Homo sapiens
acggaccggcaggcctagctccggggctgcggcggctgaggcgcggggatggagcccctgcgggtgctggagctatacagcggcgtgggcggcatgcaccacgcgctgagagaaagctgtatacctgcacaagtggtggctgccattgatgtcaacactgtcgctaatgaagtatacaagtataattttcctcacacacagttacttgccaagacgattgaagattggccggcagggtgatatgactgattcaaggacgaatagcttcttacatattctagatattctcccaagagacctcttgatacaaacaatagaaaattgtggctttcagtaccaagagtttctattatctccaacctctcttggcattccaaattcaaggctacgatattttcttattgcaaagcttcagtcagagccattaccctttcaagcccctggtcaggtactgatggagttccccaaaattgaatctgtacatccacaaaaatatgcaatggatgtagaaaataaaattcaagaaaagaacgttgaaccaaatattagctttgatggcagcatacagtgttctggaaaagatgccattctttttaagcttgaaactgcagaagaaattcacaggaaaaatcaacaagatagtgatctctctgtgaaaatgctaaaagattttcttgaagatgacactgacgtgaaccagtatcttttaccaccaaagtcattgctgcgatatgctcttctgttagacattgttcagcccacttgtagaaggtccgtgtgctttaccaaaggatatggaagctacatagaagggacagggtctgtgttacagactgcagaggatgtgcaggttgagaatatctacaaatcccttaccaatttgtcacaagaagaacagataacaaagctgttaatacttaaactgcgatatttcactcctaaagaaatagcaaatctccttggatttcctccagagttcggatttcctgagaagataacagtgaaacagcgttatcgcctacttggaaatagtctcaacgtgcatgtagtagctaaactaatcaaaatcttatatgaataattttgaaataactctgaaagatggtcatatgatattccttcattttcagagagtaattctgaaattctgttttgaactaattctggtgaaatttaactaaattattttaatctgtccttattaagaaatttggattttattaaaaaaatccatgtgtttcatcaaatttatattactgtattttataaaatacgaactattgttatgctttatggagagtatattttcatatgaaactgataaatatatatgtggaatattctttttaaaaacaattttataaacaaatcaaggagcactagagctttagtgtctacatgagtatcttgtgaagtgtcataacaggcataacatatttttatgttaattaaagaagttttttatttctaattttaaaataatgattctaattctagcccattgaatgttttacttaatttccaatcctgtaaatatttctttatttcatctaaacaaatgcatatgatatgtaaaccaaattatcatcattcagtttatacagcagactgaagaatatgtcaggaaaaataatcctaaatgtttgattacctctccatgaagcggccacagaaactgttggtgcacattatctacattttcctcagcctctatctgaaggacaaaactcatttttccttcttcattttgtatgtactttcctttagttgactattatcaaagcttgtttttgtcttctcagcttctgagttgaatttgcctttgcacgctgaggaatgtagcatgacgttaagatttcagggaggaagctgccctctgatcccatgtcatatgacagtactcccctccccccagttgttctttattgtagcaacatacactctcaatgaacttttatgacttttaactttctctgtctctcttcctcagcagacctcttggaattagggtttctaatcaaactaagtcttgcatcataaattctatggtttgtgataaaagcaagtgacaaagagaagagagatgaaaagaaacaagtccagaaatcatattacaagattttaattcaaatttttcttcttaaaaatcagctatttagaggtggataaattggaagtttgtgcattgcttgtgggaacgtaaaatggttcagctgctgttggaaaacgctatggaggttcgtcacaaaattcaacatagaattaccctatgattcagcgattccacctctggctatagatccaaaagaattgaaagcagggacttgaacagatatttgtacaccagtgtttataacaccattatttacagtagccaaaaggtagaagcagcccaagtgtcatcccattcacccatgaatggatgcaggaattgtgttccgtgcatgcagtggaatagtaccagccttccgcaggaaggaaattctgacatatgcggtgacatggatgaaccttgagtacattatgcgaagtgaaataagccaccctgtggggatggagaatgggtagttagtgcataatggatacaaagtttctgattggggtgatgagaaagttctggaggtggatggggaggatggttgcacaacagtgtgagtgtacttaatgccactgcaactgtatatttaaaaatagttaaaatgataaattttacattatgtatattttactgcaattgaaaaaatcatactctattaccaatttttcagaactcatagataaatatgaatgtagggaagctgtaagccagcccatatacagaaactatcactatctacatttttcatatgtgttcagacagagcctattacaagtctcataaatttcagtaaacaatcacaaattattttggcacactttcatgtaggttctgttcactgctgaaatattctaaataaaatggtttagagttttactgtaactatgaataattatgctataattatagtatcccacattcggttgagcaacattatacaaaataagtgtcgagttactgtgcaccaactataaatacttgaaaggtctgtagagacatttgcttacaaactggtagacagaatgtagcttagtggaattcttaaattatgggaatgtattcacaggaagacggtgattcttgcccttaattcataattgaaaatatgcagtaacaagcataaaactcacatcttaatgaagatgtatctaccagtgtcattcaattagcagatgtatatgtatgcataattaatttggaaaatgttattttatggaatgtctgctatatgcttttggtaataatgctgtatataaaatttgcactggaaattctgtttcctgat

SEQ ID NO: 304283 - DNA, 3311 bp, Homo sapiens
acggaccggcaggcctagctccggggctgcggcggctgaggcgcggggatggagcccctgcgggtgctggagctatacagcggcgtgggcggcatgcaccacgcgctgagagaaagctgtatacctgcacaagtggtggctgccattgatgtcaacactgtcgctaatgaagtatacaagtataattttcctcacacacagttacttgccaagacgattgaaagacctcttgatacaaacaatagaaaattgtggctttcagtaccaagagtttctattatctccaacctctcttggcattccaaattcaaggctacgatattttcttattgcaaagcttcagtcagagccattaccctttcaagcccctggtcaggtactgatggagttccccaaaattgaatctgtacatccacaaaaatatgcaatggatgtagaaaataaaattcaagaaaagaacgttgaaccaaatattagctttgatggcagcatacagtgttctggaaaagatgccattctttttaagcttgaaactgcagaagaaattcacaggaaaaatcaacaagatagtgatctctctgtgaaaatgctaaaagattttcttgaagatgacactgacgtgaaccagtatcttttaccaccaaagtcattgctgcgatatgctcttctgttagacattgttcagcccacttgtagaaggtccgtgtgctttaccaaaggatatggaagctacatagaagggacagggtctgtgttacagactgcagaggatgtgcaggttgagaatatctacaaatcccttaccaatttgtcacaagaagaacagataacaaagctgttaatacttaaactgcgatatttcactcctaaagaaatagcaaatctccttggatttcctccagagttcggatttcctgagaagataacagtgaaacagcgttatcgcctacttggaaatagtctcaacgtgcatgtagtagctaaactaatcaaaatcttatatgaataattttgaaataactctgaaagatggtcatatgatattccttcattttcagagagtaattctgaaattctgttttgaactaattctggtgaaatttaactaaattattttaatctgtccttattaagaaatttggattttattaaaaaaatccatgtgtttcatcaaatttatattactgtattttataaaatacgaactattgttatgctttatggagagtatattttcatatgaaactgataaatatatatgtggaatattctttttaaaaacaattttataaacaaatcaaggagcactagagctttagtgtctacatgagtatcttgtgaagtgtcataacaggcataacatatttttatgttaattaaagaagttttttatttctaattttaaaataatgattctaattctagcccattgaatgttttacttaatttccaatcctgtaaatatttctttatttcatctaaacaaatgcatatgatatgtaaaccaaattatcatcattcagtttatacagcagactgaagaatatgtcaggaaaaataatcctaaatgtttgattacctctccatgaagcggccacagaaactgttggtgcacattatctacattttcctcagcctctatctgaaggacaaaactcatttttccttcttcattttgtatgtactttcctttagttgactattatcaaagcttgtttttgtcttctcagcttctgagttgaatttgcctttgcacgctgaggaatgtagcatgacgttaagatttcagggaggaagctgccctctgatcccatgtcatatgacagtactcccctccccccagttgttctttattgtagcaacatacactctcaatgaacttttatgacttttaactttctctgtctctcttcctcagcagacctcttggaattagggtttctaatcaaactaagtcttgcatcataaattctatggtttgtgataaaagcaagtgacaaagagaagagagatgaaaagaaacaagtccagaaatcatattacaagattttaattcaaatttttcttcttaaaaatcagctatttagaggtggataaattggaagtttgtgcattgcttgtgggaacgtaaaatggttcagctgctgttggaaaacgctatggaggttcgtcacaaaattcaacatagaattaccctatgattcagcgattccacctctggctatagatccaaaagaattgaaagcagggacttgaacagatatttgtacaccagtgtttataacaccattatttacagtagccaaaaggtagaagcagcccaagtgtcatcccattcacccatgaatggatgcaggaattgtgttccgtgcatgcagtggaatagtaccagccttccgcaggaaggaaattctgacatatgcggtgacatggatgaaccttgagtacattatgcgaagtgaaataagccaccctgtggggatggagaatgggtagttagtgcataatggatacaaagtttctgattggggtgatgagaaagttctggaggtggatggggaggatggttgcacaacagtgtgagtgtacttaatgccactgcaactgtatatttaaaaatagttaaaatgataaattttacattatgtatattttactgcaattgaaaaaatcatactctattaccaatttttcagaactcatagataaatatgaatgtagggaagctgtaagccagcccatatacagaaactatcactatctacatttttcatatgtgttcagacagagcctattacaagtctcataaatttcagtaaacaatcacaaattattttggcacactttcatgtaggttctgttcactgctgaaatattctaaataaaatggtttagagttttactgtaactatgaataattatgctataattatagtatcccacattcggttgagcaacattatacaaaataagtgtcgagttactgtgcaccaactataaatacttgaaaggtctgtagagacatttgcttacaaactggtagacagaatgtagcttagtggaattcttaaattatgggaatgtattcacaggaagacggtgattcttgcccttaattcataattgaaaatatgcagtaacaagcataaaactcacatcttaatgaagatgtatctaccagtgtcattcaattagcagatgtatatgtatgcataattaatttggaaaatgttattttatggaatgtctgctatatgcttttggtaataatgctgtatataaaatttgcactggaaattctgtttcctgat

SEQ ID NO: 304284 - DNA, 1810 bp, Homo sapiens
acggaccggcaggcctagctccggggctgcggcggctgaggcgcggggatggagcccctgcgggtgctggagctatacagcggcgtgggcggcatgcaccacgcgctgagagaaagctgtatacctgcacaagtggtggctgccattgatgtcaacactgtcgctaatgaagtatacaagtataattttcctcacacacagttacttgccaagacgattgaaggcattacactcgaagagtttgacagattatcttttgatatgattttaatgagccctccctgccagccattcacaaggattggccggcagggtgatatgactgattcaaggacgaatagcttcttacatattctagatattctcccaagattacaaaaattaccaaagtatattcttttggaaaatgttaaaggttttgaagtatcttctacaagagacctcttgatacaaacaatagaaaattgtggctttcagtaccaagagtttctattatctccaacctctcttggcattccaaattcaaggctacgatattttcttattgcaaagcttcagtcagagccattaccctttcaagcccctggtcaggtactgatggagttccccaaaattgaatctgtacatccacaaaaatatgcaatggatgtagaaaataaaattcaagaaaagaacgttgaaccaaatattagctttgatggcagcatacagtgttctggaaaagatgccattctttttaagcttgaaactgcagaagaaattcacaggaaaaatcaacaagatagtgatctctctgtgaaaatgctaaaagattttcttgaagatgacactgacgtgaaccagtatcttttaccaccaaagtcattgctgcgatatgctcttctgttagacattgttcagcccacttgtagaaggtccgtgtgctttaccaaaggatatggaagctacatagaagggacagggtctgtgttacagactgcagaggatgtgcaggttgagaatatctacaaatcccttaccaatttgtcacaagaagaacagataacaaagctgttaatacttaaactgcgatatttcactcctaaagaaatagcaaatctccttggatttcctccagagttcgatgagcaatcagacatactcttgaagacagaaaagagattaactattcaattaaaatgaattcctcagcttttcttcagtgcttttttgttttcaaagggcagtagtcactttggtaatactgaaccttggtaaggagcacagagcccagagtcagactgaatgatttcatatcccagccccaccttaaccgttcccttctttagtttacttctctgtaaaatgaggatgatcataactcctgcttcatagagttattgtgatagttaaatgagtcaatgtttatgaaattcttatctaatatctgagacataatgtaaaatttgttttagctttcatttttagaatgagccatgtatttacttttataatctttatttcataaatatttttctcattttttaaaattttaagttggtgaaatagaatttttcaaagctctttgaatatatatgtataatacttagaaaaacagcctttgaaattactgaacctccttctaaaatacgtgatatgtttttggagttgagcttaccctgatgtcaccactgagcagcaccgtgacacaactgtccctcatgtgtgttccaacattattgaccctgggtccaaaaatgggcattgtttgagctgtttgtctactggcaatgatggatctgcattgatccttccaaaccctctgtcctgg

SEQ ID NO: 304285 - DNA, 2944 bp, Homo sapiens
actccctctctggatgtgtctgctgccgccattgtgcggcgctggtcccctcagagggttcctgctgctgccggtgccttggaccctccccctcgcttctcgttctactgccccaggagcccggcgggtccgggactcccgtccgtgccggtgcgggcgccggcatgtggctgtgggaggaccagggcggcctcctgggccctttctccttcctgctgctagtgctgctgctggtgacgcggagcccggtcaatgcctgcctcctcaccggcagcctcttcgttctactgcgcgtcttcagctttgagccggtgccctcttgcagggccctgcaggtgctcaagccccgggaccgcatttctgccatcgcccaccgtggcggcagccacgacgcgcccgagaacacgctggcggccattcggcaggcagctaagaatggagcaacaggcgtggagttggacattgagtttacttctgacgggattcctgtcttaatgcacgataacacagtagataggacgactgatgggactgggcgattgtgtgatttgacatttgaacaaattaggaagctgaatcctgcagcaaaccacagactcaggaatgatttccctgatgaaaagatccctaccctaagggaagctgttgcagagtgcctaaaccataacctcacaatcttctttgatgtcaaaggccatgcacacaaggctactgaggctctaaagaaaatgtatatggaatttcctcaactgtataataatagtgtggtctgttctttcttgccagaagttatctacaagatgagacaaacagatcgggatgtaataacagcattaactcacagaccttggagcctaagccatacaggagatgggaaaccacgctatgatactttctggaaacattttatatttgttatgatggacattttgctcgattggagcatgcataatatcttgtggtacctgtgtggaatttcagctttcctcatgcaaaaggattttgtatccccggcctacttgaagaagtggtcagctaaaggaatccaggttgttggttggactgttaatacctttgatgaaaagagttactacgaatcccatcttggttccagctatatcactgacagcatggtagaagactgcgaacctcacttctagactttcacggtgggacgaaacgggttcagaaactgccaggggcctcatacagggatatcaaaataccctttgtgctagcccaggccctggggaatcaggtgactcacacaaatgcaatagttggtcactgcatttttacctgaaccaaagctaaacccggtgttgccaccatgcaccatggcatgccagagttcaacactgttgctcttgaaaatctgggtctgaaaaaacgcacaagagcccctgccctgccctagctgaggcacacagggagacccagtgaggataagcacagattgaattgtacaatttgcagatgcagatgtaaatgcatgggacatgcatgataactcagagttgacattttaaaacttgccacacttatttcaaatatttgtactcagctatgttaacatgtactgtagacatcaaacttgtggccatactaataaaattattaaaaggagcactaaaggaaaactgtgtgccaagcatcatatcctaaggcatacggaatttggggaagccaccatgcaatccagtgaggcttcagtgtacagcaaccaaaatggtagggaggtcttgaagccaatgagggatttatagcatcttgaatagagagctgcaaaccaccagggggcagagttgcacttttccaggctttttaggaagctctgcaacagatgtgatctgatcataggcaattagaactggaagaaacttccaaaaatatctaggtttgtcctcattttacaaatgaggaaactaaactctgtggaagggaaggggttgcctcaaaagtcacagcttagctgggcacagtggctcatgccgataatcccagcaattcagaaagctgaggcaggaggattacttgaggccagactgggcaatatagcaagaccccatctctaaaaaattaggcatggtggtgcatgcctgtattcccagctactcaggaggttgaggtgggaggatcacttgagcccagaagttcaaggctgcaatgagccatgattacaccacggcactacaaccttggtggcacagtgagaacctgactcttaaaaaaaaaaaaaaaaaaaaaaaaaaaaaaaagataactagaacttctagaacatcttgtttacagttagccagaaactatacaagtggtttaacatgcattatcttactcaatccatacaaaagtcttatggaggtgttagcactctttctactgatgaagaactgaggtacttcataaaaccacttacccaaggtgtcttgagtctggtacaactggcattcaaatctaggtcagtctgcccccagagccactacccttacccctcactgaatctgcctttatattgttgagcccatgaccccaaactgctctttccaatttgaacttccagggattttattgtgaacttacatagcaacattaaaatgaagttgaattgtttttaatggcaacgccgtctgtctcctctagcttaccgcttctcacctttcaaccccatctgtggcctttgtccaggcccacagcttagccatggcttccctcctgcatccctgccgtgggttgctggcctcacacttgcagcagctggacagtgattttagaaggccaccagtccccatagctatgtgacaatgagaagcaaacttttttgtgacagattgtattggcataggcatgatagatggggattggtacgttttgaatcagcatttgcaaaaaaattgtcttgaattttaaaataaacaacaaagatttgttcattgagtgcaaaaaa

SEQ ID NO: 304286 - DNA, 3071 bp, Homo sapiens
  misc_feature (2451)..(2451): n is a, c, g, or t
  misc_feature (2457)..(2457): n is a, c, g, or t
  misc_feature (2459)..(2459): n is a, c, g, or t
  misc_feature (2471)..(2471): n is a, c, g, or t
actccctctctggatgtgtctgctgccgccattgtgcggcgctggtcccctcagagggttcctgctgctgccggtgccttggaccctccccctcgcttctcgttctactgccccaggagcccggcgggtccgggactcccgtccgtgccggtgcgggcgccggcatgtggctgtgggaggaccagggcggcctcctgggccctttctccttcctgctgctagtgctgctgctggtgacgcggagcccggtcaatgcctgcctcctcaccggcagcctcttcgttctactgcgcgtcttcagctttgagccggtgccctcttgcagggccctgcaggtgctcaagccccgggaccgcatttctgccatcgcccaccgtggcggcagccacgacgcgcccgagaacacgctggcggccattcggcaggcagctaagaatggagcaacaggcgtggagttggacattgagtttacttctgacgggattcctgtcttaatgcacgataacacagtagataggacgactgatgggactgggcgattgtgtgatttgacatttgaacaaattaggaagctgaatcctgcagcaaaccacagactcaggaatgatttccctgatgaaaagatccctaccctaagggaagctgttgcagagtgcctaaaccataacctcacaatcttctttgatgtcaaaggccatgcacacaaggctactgaggctctaaagaaaatgtatatggaatttcctcaactgtataataatagtgtggtctgttctttcttgccagaagttatctacaagatgagacaaacagatcgggatgtaataacagcattaactcacagaccttggagcctaagccatacaggagatgggaaaccacgctatgatactttctggaaacattttatatttgttatgatggacattttgctcgattggagcatgcataatatcttgtggtacctgtgtggaatttcagctttcctcatgcaaaaggattttgtatccccggcctacttgaagaagtggtcagctaaaggaatccaggttgttggttggactgttaatacctttgatgaaaagagttactacgaatcccatcttggttccagctatatcactgacagcatggtagaagactgcgaacctcacttctagactttcacggtgggacgaaacgggttcagaaactgccaggggcctcatacagggatatcaaaataccctttgtgctagcccaggccctggggaatcaggtgactcacacaaatgcaatagttggtcactgcatttttacctgaaccaaagctaaacccggtgttgccaccatgcaccatggcatgccagagttcaacactgttgctcttgaaaatctgggtctgaaaaaacgcacaagagcccctgccctgccctagctgaggcacacagggagacccagtgaggataagcacagattgaattgtacaatttgcagatgcagatgtaaatgcatgggacatgcatgataactcagagttgacattttaaaacttgccacacttatttcaaatatttgtactcagctatgttaacatgtactgtagacatcaaacttgtggccatactaataaaattattaaaaggagcactaaaggaaaactgtgtgccaagcatcatatcctaaggcatacggaatttggggaagccaccatgcaatccagtgaggcttcagtgtacagcaaccaaaatggtagggaggtcttgaagccaatgagggatttatagcatcttgaatagagagctgcaaaccaccagggggcagagttgcacttttccaggctttttaggaagctctgcaacagatgtgatctgatcataggcaattagaactggaagaaacttccaaaaatatctaggtttgtcctcattttacaaatgaggaaactaaactctgtggaagggaaggggttgcctcaaaagtcacagcttagctgggcacagtggctcatgccgataatcccagcaattcagaaagctgaggcaggaggattacttgaggccagactgggcaatatagcaagaccccatctctaaaaaattaggcatggtggtgcatgcctgtattcccagctactcaggaggttgaggtgggaggatcacttgagcccagaagttcaaggctgcaatgagccatgattacaccacggcactacaaccttggtggcacagtgagaacctgactcttaaaaaaaaaaaaaaaaaaaaaaaaaaaaaaaagataactagaacttctagaacatcttgtttacagttagccagaaactatacaagtggtttaacatgcattatcttactcaatccatacaaaagtcttatggaggtgttagcactctttctactgatgaagaactgaggtacttcataaaaccgagtggaggacaagacgggggaacacgaggggccttcaagngttaananccttgtggggangctgggggggggggggggggcgggcgggggcggggggggcggggggggggggggggggggggggggggggggggggggggggggaggtctggtacaactggcattcaaatctaggtcagtctgcccccagagccactacccttacccctcactgaatctgcctttatattgttgagcccatgaccccaaactgctctttccaatttgaacttccagggattttattgtgaacttacatagcaacattaaaatgaagttgaattgtttttaatggcaacgccgtctgtctcctctagcttaccgcttctcacctttcaaccccatctgtggcctttgtccaggcccacagcttagccatggcttccctcctgcatccctgccgtgggttgctggcctcacacttgcagcagctggacagtgattttagaaggccaccagtccccatagctatgtgacaatgagaagcaaacttttttgtgacagattgtattggcataggcatgatagatggggattggtacgttttgaatcagcatttgcaaaaaaattgtcttgaattttaaaataaacaacaaagatttgttcattgagtgcaaaaaa

SEQ ID NO: 304287 - DNA, 2619 bp, Homo sapiens
actccctctctggatgtgtctgctgccgccattgtgcggcgctggtcccctcagagggttcctgctgctgccggtgccttggaccctccccctcgcttctcgttctactgccccaggagcccggcgggtccgggactcccgtccgtgccggtgcgggcgccggcatgtggctgtgggaggaccagggcggcctcctgggccctttctccttcctgctgctagtgctgctgctggtgacgcggagcccggtcaatgcctgcctcctcaccggcagcctcttcgttctactgcgcgtcttcagctttgagccggtgccctcttgcagggccctgcaggtgctcaagccccgggaccgcatttctgccatcgcccaccgtggcggcagccacgacgcgcccgagaacacgctggcggccattcggcaggcagctaagaatggagcaacaggcgtggagttggacattgagtttacttctgacgggattcctgtcttaatgcacgataacacagtagataggacgactgatgggactgggcgattgtgtgatttgacatttgaacaaattaggaagctgaatcctgcagcaaaccacagactcaggaatgatttccctgatgaaaagatccctaccctaagggaagctgttgcagagtgcctaaaccataacctcacaatcttctttgatgtcaaaggccatgcacacaaggctactgaggctctaaagaaaatgtatatggaatttcctcaactgtataataatagtgtggtctgttctttcttgccagaagttatctacaagatgagacaaacagatcgggatgtaataacagcattaactcacagaccttggagcctaagccatacaggagatgggaaaccacgctatgatactttctggaaacattttatatttgttatgatggacattttgctcgattggagcatgcataatatcttgtggtacctgtgtggaatttcagctttcctcatgcaaaaggattttgtatccccggcctacttgaagaagtggtcagctaaaggaatccaggttgttggttggactgttaatacctttgatgaaaagagttactacgaatcccatcttggttccagctatatcactgacagcatggtagaagactgcgaacctcacttctagactttcacggtgggacgaaacgggttcagaaactgccaggggcctcatacagggatatcaaaataccctttgtgctagcccaggccctggggaatcaggtgactcacacaaatgcaatagttggtcactgcatttttacctgaaccaaagctaaacccggtgttgccaccatgcaccatggcatgccagagttcaacactgttgctcttgaaaatctgggtctgaaaaaacgcacaagagcccctgccctgccctagctgaggcacacagggagacccagtgaggataagcacagattgaattgtacaatttgcagatgcagatgtaaatgcatgggacatgcatgataactcagagttgacattttaaaacttgccacacttatttcaaatatttgtactcagctatgttaacatgtactgtagacatcaaacttgtggccatactaataaaattattaaaaggagcactaaaggaaaactgtgtgccaagcatcatatcctaaggcatacggaatttggggaagccaccatgcaatccagtgaggcttcagtgtacagcaaccaaaatggtagggaggtcttgaagccaatgagggatttatagcatcttgaatagagagctgcaaaccaccagggggcagagttgcacttttccaggctttttaggaagctctgcaacagatgtgatctgatcataggcaattagaactggaagaaacttccaaaaatatctaggtttgtcctcattttacaaatgaggaaactaaactctgtggaagggaaggggttgcctcaaaagtcacagcttagctgggcacagtggctcatgccgataatcccagcaattcagaaagctgaggcaggaggattacttgaggccagactgggcaatatagcaagaccccatctctaaaaaattaggcatggtggtgcatgcctgtattcccagctactcaggaggttgaggtgggaggatcacttgagcccagaagttcaaggctgcaatgagccatgattacaccacggcactacaaccttggtggcacagtgagaacctgactcttaaaaaaaaaaaaaaaaaaaaaaaaaaaaaaaagataactagaacttctagaacatcttgtttacagttagccagaaactatacaagtggtttaacatgcattatcttactcaatccatacaaaagtcttatggaggtgttagcactctttctactgatgaagaactgaggtacttcataaaaccacttacccaaggtgtcttgagtctggtacaactggcattcaaatctaggtcagtctgcccccagagccactacccttacccctcactgaatctgcctttatattgttgagcccatgaccccaaactgctctttccaatttgaacttccagggattttattgtgaacttacatagcaacattaaaatgaagttgaattgtttttaatggc

SEQ ID NO: 304288 - DNA, 2921 bp, Homo sapiens
actccctctctggatgtgtctgctgccgccattgtgcggcgctggtcccctcagagggttcctgctgctgccggtgccttggaccctccccctcgcttctcgttctactgccccaggagcccggcgggtccgggactcccgtccgtgccggtgcgggcgccggcatgtggctgtgggaggaccagggcggcctcctgggccctttctccttcctgctgctagtgctgctgctggtgacgcggagcccggtcaatgcctgcctcctcaccggcagcctcttcgttctactgcgcgtcttcagctttgagccggtgccctcttgcagggccctgcaggtgctcaagccccgggaccgcatttctgccatcgcccaccgtggcggcagccacgacgcgcccgagaacacgctggcggccattcggcaggcagctaagaatggagcaacaggcgtggagttggacattgagtttacttctgacgggattcctgtcttaatgcacgataacacagtagataggacgactgatgggactgggcgattgtgtgatttgacatttgaacaaattaggaagctgaatcctgcagcaaaccacagactcaggaatgatttccctgatgaaaagatccctaccctaagggaagctgttgcagagtgcctaaaccataacctcacaatcttctttgatgtcaaaggccatgcacacaaggctactgaggctctaaagaaaatgtatatggaatttcctcaactgtataataatagtgtggtctgttctttcttgccagaagttatctacaagatgagacaaacagatcgggatgtaataacagcattaactcacagaccttggagcctaagccatacaggagatgggaaaccacgctatgatactttctggaaacattttatatttgttatgatggacattttgctcgattggagcatgcataatatcttgtggtacctgtgtggaatttcagctttcctcatgcaaaaggattttgtatccccggcctacttgaagaagtggtcagctaaaggaatccaggttgttggttggactgttaatacctttgatgaaaagagttactacgaatcccatcttggttccagctatatcactgacagcatggtagaagactgcgaacctcacttctagactttcacggtgggacgaaacgggttcagaaactgccaggggcctcatacagggatatcaaaataccctttgtgctagcccaggccctggggaatcaggtgactcacacaaatgcaatagttggtcactgcatttttacctgaaccaaagctaaacccggtgttgccaccatgcaccatggcatgccagagttcaacactgttgctcttgaaaatctgggtctgaaaaaacgcacaagagcccctgccctgccctagctgaggcacacagggagacccagtgaggataagcacagattgaattgtacaatttgcagatgcagatgtaaatgcatgggacatgcatgataactcagagttgacattttaaaacttgccacacttatttcaaatatttgtactcagctatgttaacatgtactgtagacatcaaacttgtggccatactaataaaattattaaaaggagcactaaaggaaaactgtgtgccaagcatcatatcctaaggcatacggaatttggggaagccaccatgcaatccagtgaggcttcagtgtacagcaaccaaaatggtagggaggtcttgaagccaatgagggatttatagcatcttgaatagagagctgcaaaccaccagggggcagagttgcacttttccaggctttttaggaagctctgcaacagatgtgatctgatcataggcaattagaactggaagaaacttccaaaaatatctaggtttgtcctcattttacaaatgaggaaactaaactctgtggaagggaaggggttgcctcaaaagtcacagcttagctgggcacagtggctcatgccgataatcccagcaattcagaaagctgaggcaggaggattacttgaggccagactgggcaatatagcaagaccccatctctaaaaaattaggcatggtggtgcatgcctgtattcccagctactcaggaggttgaggtgggaggatcacttgagcccagaagttcaaggctgcaatgagccatgattacaccacggcactacaaccttggtggcacagtgagaacctgactcttaaaaaaaaaaaaaaaaaaaaaaaaaaaaaaaagataactagaacttctagaacatcttgtttacagttagccagaaactatacaagtggtttaacatgcattatcttactcaatccatacaaaagtcttatggaggtgttagcactctttctactgatgaagaactgaggtacttcataaaaccacttacccaaggtgtcttgagtctggtacaactggcattcaaatctaggtcagtctgcccccagagccactacccttacccctcactgaatctgcctttatattgttgagcccatgaccccaaactgctctttccaatttgaacttccagggattttattgtgaacttacatagcaacattaaaatgaagttgaattgtttttaatggcaacgccgtctgtctcctctagcttaccgcttctcacctttcaaccccatctgtggcctttgtccaggcccacagcttagccatggcttccctcctcctcacacttgcagcagctggacagtgattttagaaggccaccagtccccatagctatgtgacaatgagaagcaaacttttttgtgacagattgtattggcataggcatgatagatggggattggtacgttttgaatcagcatttgcaaaaaaattgtcttgaattttaaaataaacaacaaagatttgttcattgagtgcaaaaaa

SEQ ID NO: 304289 - DNA, 2862 bp, Homo sapiens
actccctctctggatgtgtctgctgccgccattgtgcggcgctggtcccctcagagggttcctgctgctgccggtgccttggaccctccccctcgcttctcgttctactgccccaggagcccggcgggtccgggactcccgtccgtgccggtgcgggcgccggcatgtggctgtgggaggaccagggcggcctcctgggccctttctccttcctgctgctagtgctgctgctggtgacgcggagcccggtcaatgcctgcctcctcaccggcagcctcttcgttctactgcgcgtcttcagctttgagccggtgccctcttgcagggccctgcaggtgctcaagccccgggaccgcatttctgccatcgcccaccgtggcggcagccacgacgcgcccgagaacacgctggcggccattcggcaggcagctaagaatggagcaacaggcgtggagttggacattgagtttacttctgacgggattcctgtcttaatgcacgataacacagtagataggacgactgatgggactgggcgattgtgtgatttgacatttgaacaaattaggaagctgaatcctgcagcaaaccacagactcaggaatgatttccctgatgaaaagatccctaccctaagggaagctgttgcagagtgcctaaaccataacctcacaatcttctttgatgtcaaaggccatgcacacaaggctactgaggctctaaagaaaatgtatatggaatttcctcaactgtataataatagtgtggtctgttctttcttgccagaagttatctacaagatgagacaaacagatcgggatgtaataacagcattaactcacagaccttggagcctaagccatacaggagatgggaaaccacgctatgatactttctggaaacattttatatttgttatgatggacattttgctcgattggagcatgcataatatcttgtggtacctgtgtggaatttcagctttcctcatgcaaaaggattttgtatccccggcctacttgaagaagtggtcagctaaaggaatccaggttgttggttggactgttaatacctttgatgaaaagagttactacgaatcccatcttggttccagctatatcactgacagcatggtagaagactgcgaacctcacttctagactttcacggtgggacgaaacgggttcagaaactgccaggggcctcatacagggatatcaaaataccctttgtgctagcccaggccctggggaatcaggtgactcacacaaatgcaatagttggtcactgcatttttacctgaaccaaagctaaacccggtgttgccaccatgcaccatggcatgccagagttcaacactgttgctcttgaaaatctgggtctgaaaaaacgcacaagagcccctgccctgccctagctgaggcacacagggagacccagtgaggataagcacagattgaattgtacaatttgcagatgcagatgtaaatgcatgggacatgcatgataactcagagttgacattttaaaacttgccacacttatttcaaatatttgtactcagctatgttaacatgtactgtagacatcaaacttgtggccatactaataaaattattaaaaggagcactaaaggaaaactgtgtgccaagcatcatatcctaaggcatacggaatttggggaagccaccatgcaatccagtgaggcttcagtgtacagcaaccaaaatggtagggaggtcttgaagccaatgagggatttatagcatcttgaatagagagctgcaaaccaccagggggcagagttgcacttttccaggctttttaggaagctctgcaacagatgtgatctgatcataggcaattagaactggaagaaacttccaaaaatatctaggtttgtcctcattttacaaatgaggaaactaaactctgtggaagggaaggggttgcctcaaaagtcacagcttagctgggcacagtggctcatgccgataatcccagcaattcagaaagctgaggcaggaggattacttgaggccagactgggcaatatagcaagaccccatctctaaaaaattaggcatggtggtgcatgcctgtattcccagctactcaggaggttgaggtgggaggatcacttgagcccagaagttcaaggctgcaatgagccatgattacaccacggcactacaaccttggtggcacagtgagaacctgactcttaaaaaaaaaaaaaaaaaaaaaaaaaaaaaaaagataactagaacttctagaacatcttgtttacagttagccagaaactatacaagtggtttaacatgcattatcttactcaatccatacaaaagtcttatggaggtgttagcactctttctactgatgaagaactgaggtacttcataaaaccacttacccaaggtgtcttgagtctggtacaactggcattcaaatctaggtcagtctgcccccagagccactacccttacccctcactgaatctgcctttatattgttgagcccatgaccccaaactgctctttccaatttgaacttccagggattttattgtgaacttacatagcaacattaaaatgaagttgaattgtttttaatggcaacgccgtctgtctcctctagcttaccgcttctcaccctcacacttgcagcagctggacagtgattttagaaggccaccagtccccatagctatgtgacaatgagaagcaaacttttttgtgacagattgtattggcataggcatgatagatggggattggtacgttttgaatcagcatttgcaaaaaaattgtcttgaattttaaaataaacaacaaagatttgttcattgagtgcaaaaaa

SEQ ID NO: 304290 - DNA, 2369 bp, Homo sapiens
actccctctctggatgtgtctgctgccgccattgtgcggcgctggtcccctcagagggttcctgctgctgccggtgccttggaccctccccctcgcttctcgttctactgccccaggagcccggcgggtccgggactcccgtccgtgccggtgcgggcgccggcatgtggctgtgggaggaccagggcggcctcctgggccctttctccttcctgctgctagtgctgctgctggtgacgcggagcccggtcaatgcctgcctcctcaccggcagcctcttcgttctactgcgcgtcttcagctttgagccggtgccctcttgcagggccctgcaggtgctcaagccccgggaccgcatttctgccatcgcccaccgtggcggcagccacgacgcgcccgagaacacgctggcggccattcggcaggcagctaagaatggagcaacaggcgtggagttggacattgagtttacttctgacgggattcctgtcttaatgcacgataacacagtagataggacgactgatgggactgggcgattgtgtgatttgacatttgaacaaattaggaagctgaatcctgcagcaaaccacagactcaggaatgatttccctgatgaaaagatccctaccctaagggaagctgttgcagagtgcctaaaccataacctcacaatcttctttgatgtcaaaggccatgcacacaaggctactgaggctctaaagaaaatgtatatggaatttcctcaactgtataataatagtgtggtctgttctttcttgccagaagttatctacaagatgagacaaacagatcgggatgtaataacagcattaactcacagaccttggagcctaagccatacaggagatgggaaaccacgctatgatactttctggaaacattttatatttgttatgatggacattttgctcgattggagcatgcataatatcttgtggtacctgtgtggaatttcagctttcctcatgcaaaaggattttgtatccccggcctacttgaagaagtggtcagctaaaggaatccaggttgttggttggactgttaatacctttgatgaaaagagttactacgaatcccatcttggttccagctatatcactgacagcatggtagaagactgcgaacctcacttctagactttcacggtgggacgaaacgggttcagaaactgccaggggcctcatacagggatatcaaaataccctttgtgctagcccaggccctggggaatcaggtgactcacacaaatgcaatagttggtcactgcatttttacctgaaccaaagctaaacccggtgttgccaccatgcaccatggcatgccagagttcaacactgttgctcttgaaaatctgggtctgaaaaaacgcacaagagcccctgccctgccctagctgaggcacacagggagacccagtgaggataagcacagattgaattgtacaatttgcagatgcagatgtaaatgcatgggacatgcatgataactcagagttgacattttaaaacttgccacacttatttcaaatatttgtactcagctatgttaacatgtactgtagacatcaaacttgtggccatactaataaaattattaaaaggagcactaaaggaaaactgtgtgccaagcatcatatcctaaggcatacggaatttggggaagccaccatgcaatccagtgaggcttcagtgtacagcaaccaaaatggtagggaggtcttgaagccaatgagggatttatagcatcttgaatagagagctgcaaaccaccagggggcagagttgcacttttccaggctttttaggaagctctgcaacagatgtgatctgatcataggcaattagaactggaagaaacttccaaaaatatctaggtttgtcctcattttacaaatgaggaaactaaactctgtggaagggaaggggttgcctcaaaagtcacagcttagctgggcacagtggctcatgccgataatcccagcaattcagaaagctgaggcaggaggattacttgaggccagactgggcaatatagcaagaccccatctctaaaaaattaggcatggtggtgcatgcctgtattcccagctactcaggaggttgaggtgggaggatcacttgagcccagaagttcaaggctgcaatgagccatgattacaccacggcactacaaccttggtggcacagtgagaacctgactcttaaaaaaaaaaaacttgggggctctctttggggggggggaaaaaaggggttctgacgggcccgtggcaaaggtgttcctgccccagttttttggcaaggggaaacggcggccccatgggggcgaaaattcgaaccggtacgtag

SEQ ID NO: 304291 - DNA, 2890 bp, Homo sapiens
actccctctctggatgtgtctgctgccgccattgtgcggcgctggtcccctcagagggttcctgctgctgccggtgccttggaccctccccctcgcttctcgttctactgccccaggagcccggcgggtccgggactcccgtccgtgccggtgcgggcgccggcatgtggctgtgggaggaccagggcggcctcctgggccctttctccttcctgctgctagtgctgctgctggtgacgcggagcccggtcaatgcctgcctcctcaccggcagcctcttcgttctactgcgcgtcttcagctttgagccggtgccctcttgcagggccctgcaggtgctcaagccccgggaccgcatttctgccatcgcccaccgtggcggcagccacgacgcgcccgagaacacgctggcggccattcggcaggcagctaagaatggagcaacaggcgtggagttggacattgagtttacttctgacgggattcctgtcttaatgcacgataacacagtagataggacgactgatgggactgggcgattgtgtgatttgacatttgaacaaattaggaagctgaatcctgcagcaaaccacagactcaggaatgatttccctgatgaaaagatccctaccctaagggaagctgttgcagagtgcctaaaccataacctcacaatcttctttgatgtcaaaggccatgcacacaaggctactgaggctctaaagaaaatgtatatggaatttcctcaactgtataataatagtgtggtctgttctttcttgccagaagttatctacaagatgagacaaacagatcgggatgtaataacagcattaactcacagaccttggagcctaagccatacaggagatgggaaaccacgctatgatactttctggaaacattttatatttgttatgatggacattttgctcgattggagcatgcataatatcttgtggtacctgtgtggaatttcagctttcctcatgcaaaaggattttgtatccccggcctacttgaagaagtggtcagctaaaggaatccaggttgttggttggactgttaatacctttgatgaaaagagttactacgaatcccatcttggttccagctatatcactgacagcatggtagaagactgcgaacctcacttctagactttcacggtgggacgaaacgggttcagaaactgccaggggcctcatacagggatatcaaaataccctttgtgctagcccaggccctggggaatcaggtgactcacacaaatgcaatagttggtcactgcatttttacctgaaccaaagctaaacccggtgttgccaccatgcaccatggcatgccagagttcaacactgttgctcttgaaaatctgggtctgaaaaaacgcacaagagcccctgccctgccctagctgaggcacacagggagacccagtgaggataagcacagattgaattgtacaatttgcagatgcagatgtaaatgcatgggacatgcatgataactcagagttgacattttaaaacttgccacacttatttcaaatatttgtactcagctatgttaacatgtactgtagacatcaaacttgtggccatactaataaaattattaaaaggagcactaaaggaaaactgtgtgccaagcatcatatcctaaggcatacggaatttggggaagccaccatgccaatgagggatttatagcatcttgaatagagagctgcaaaccaccagggggcagagttgcacttttccaggctttttaggaagctctgcaacagatgtgatctgatcataggcaattagaactggaagaaacttccaaaaatatctaggtttgtcctcattttacaaatgaggaaactaaactctgtggaagggaaggggttgcctcaaaagtcacagcttagctgggcacagtggctcatgccgataatcccagcaattcagaaagctgaggcaggaggattacttgaggccagactgggcaatatagcaagaccccatctctaaaaaattaggcatggtggtgcatgcctgtattcccagctactcaggaggttgaggtgggaggatcacttgagcccagaagttcaaggctgcaatgagccatgattacaccacggcactacaaccttggtggcacagtgagaacctgactcttaaaaaaaaaaaaaaaaaaaaaaaaaaaaaaaagataactagaacttctagaacatcttgtttacagttagccagaaactatacaagtggtttaacatgcattatcttactcaatccatacaaaagtcttatggaggtgttagcactctttctactgatgaagaactgaggtacttcataaaaccacttacccaaggtgtcttgagtctggtacaactggcattcaaatctaggtcagtctgcccccagagccactacccttacccctcactgaatctgcctttatattgttgagcccatgaccccaaactgctctttccaatttgaacttccagggattttattgtgaacttacatagcaacattaaaatgaagttgaattgtttttaatggcaacgccgtctgtctcctctagcttaccgcttctcacctttcaaccccatctgtggcctttgtccaggcccacagcttagccatggcttccctcctgcatccctgccgtgggttgctggcctcacacttgcagcagctggacagtgattttagaaggccaccagtccccatagctatgtgacaatgagaagcaaacttttttgtgacagattgtattggcataggcatgatagatggggattggtacgttttgaatcagcatttgcaaaaaaattgtcttgaattttaaaataaacaacaaagatttgttcattgagtgcaaaaaa

SEQ ID NO: 304292 - DNA, 2881 bp, Homo sapiens
actccctctctggatgtgtctgctgccgccattgtgcggcgctggtcccctcagagggttcctgctgctgccggtgccttggaccctccccctcgcttctcgttctactgccccaggagcccggcgggtccgggactcccgtccgtgccggtgcgggcgccggcatgtggctgtgggaggaccagggcggcctcctgggccctttctccttcctgctgctagtgctgctgctggtgacgcggagcccggtcaatgcctgcctcctcaccggcagcctcttcgttctactgcgcgtcttcagctttgagccggtgccctcttgcagggccctgcaggtgctcaagccccgggaccgcatttctgccatcgcccaccgtggcggcagccacgacgcgcccgagaacacgctggcggccattcggcaggcagctaagaatggagcaacaggcgtggagttggacattgagtttacttctgacgggattcctgtcttaatgcacgataacacagtagataggacgactgatgggactgggcgattgtgtgatttgacatttgaacaaattaggaagctgaatcctgcagcaaaccacagactcaggaatgatttccctgatgaaaagatccctaccctaagggaagctgttgcagagtgcctaaaccataacctcacaatcttctttgatgtcaaaggccatgcacacaaggctactgaggctctaaagaaaatgtatatggaatttcctcaactgtataataatagtgtggtctgttctttcttgccagaagttatctacaagatgagacaaacagatcgggatgtaataacagcattaactcacagaccttggagcctaagccatacaggagatgggaaaccacgctatgatactttctggaaacattttatatttgttatgatggacattttgctcgattggagcatgcataatatcttgtggtacctgtgtggaatttcagctttcctcatgcaaaaggattttgtatccccggcctacttgaagaagtggtcagctaaaggaatccaggttgttggttggactgttaatacctttgatgaaaagagttactacgaatcccatcttggttccagctatatcactgacagcatggtagaagactgcgaacctcacttctagactttcacggtgggacgaaacgggttcagaaactgccaggggcctcatacagggatatcaaaataccctttgtgctagcccaggccctggggaatcaggtgactcacacaaatgcaatagttggtcactgcatttttacctgaaccaaagctaaacccggtgttgccaccatgcaccatggcatgccagagttcaacactgttgctcttgaaaatctgggtctgaaaaaacgcacaagagcccctgccctgccctagctgaggcacacagggagacccagtgaggataagcacagattgaattgtacaatttgcagatgcagatgtaaatgcatgggacatgcatgataactcagagttgacattttaaaacttgccacacttatttcaaatatttgtactcagctatgttaacatgtactgtagacatcaaacttgtggccatactaataaaattattaaaaggagcactcaatccagtgaggcttcagtgtacagcaaccaaaatggtagggaggtcttgaagccaatgagggatttatagcatcttgaatagagagctgcaaaccaccagggggcagagttgcacttttccaggctttttaggaagctctgcaacagatgtgatctgatcataggcaattagaactggaagaaacttccaaaaatatctaggtttgtcctcattttacaaatgaggaaactaaactctgtggaagggaaggggttgcctcaaaagtcacagcttagctgggcacagtggctcatgccgataatcccagcaattcagaaagctgaggcaggaggattacttgaggccagactgggcaatatagcaagaccccatctctaaaaaattaggcatggtggtgcatgcctgtattcccagctactcaggaggttgaggtgggaggatcacttgagcccagaagttcaaggctgcaatgagccatgattacaccacggcactacaaccttggtggcacagtgagaacctgactcttaaaaaaaaaaaaaaaaaaaaaaaaaaaaaaaagataactagaacttctagaacatcttgtttacagttagccagaaactatacaagtggtttaacatgcattatcttactcaatccatacaaaagtcttatggaggtgttagcactctttctactgatgaagaactgaggtacttcataaaaccacttacccaaggtgtcttgagtctggtacaactggcattcaaatctaggtcagtctgcccccagagccactacccttacccctcactgaatctgcctttatattgttgagcccatgaccccaaactgctctttccaatttgaacttccagggattttattgtgaacttacatagcaacattaaaatgaagttgaattgtttttaatggcaacgccgtctgtctcctctagcttaccgcttctcacctttcaaccccatctgtggcctttgtccaggcccacagcttagccatggcttccctcctgcatccctgccgtgggttgctggcctcacacttgcagcagctggacagtgattttagaaggccaccagtccccatagctatgtgacaatgagaagcaaacttttttgtgacagattgtattggcataggcatgatagatggggattggtacgttttgaatcagcatttgcaaaaaaattgtcttgaattttaaaataaacaacaaagatttgttcattgagtgcaaaaaa

SEQ ID NO: 304293 - DNA, 2928 bp, Homo sapiens
  misc_feature (15)..(15): n is a, c, g, or t
  misc_feature (35)..(35): n is a, c, g, or t
aagggctagtagagnctgggtgttaatcggccgangcgagggttcctgctgctgccggtgccttggaccctccccctcgcttctcgttctactgccccaggagcccggcgggtccgggactcccgtccgtgccggtgcgggcgccggcatgtggctgtgggaggaccagggcggcctcctgggccctttctccttcctgctgctagtgctgctgctggtgacgcggagcccggtcaatgcctgcctcctcaccggcagcctcttcgttctactgcgcgtcttcagctttgagccggtgccctcttgcagggccctgcaggtgctcaagccccgggaccgcatttctgccatcgcccaccgtggcggcagccacgacgcgcccgagaacacgctggcggccattcggcaggcagctaagaatggagcaacaggcgtggagttggacattgagtttacttctgacgggattcctgtcttaatgcacgataacacagtagataggacgactgatgggactgggcgattgtgtgatttgacatttgaacaaattaggaagctgaatcctgcagcaaaccacagactcaggaatgatttccctgatgaaaagatccctaccctaagggaagctgttgcagagtgcctaaaccataacctcacaatcttctttgatgtcaaaggccatgcacacaaggctactgaggctctaaagaaaatgtatatggaatttcctcaactgtataataatagtgtggtctgttctttcttgccagaagttatctacaagatgagacaaacagatcgggatgtaataacagcattaactcacagaccttggagcctaagccatacaggagatgggaaaccacgctatgatactttctggaaacattttatatttgttatgatggacattttgctcgattggagcatgcataatatcttgtggtacctgtgtggaatttcagctttcctcatgcaaaaggattttgtatccccggcctacttgaagaagtggtcagctaaaggaatccaggttgttggttggactgttaatacctttgatgaaaagagttactacgaatcccatcttggttccagctatatcactgacagcatggtagaagactgcgaacctcacttctagactttcacggtgggacgaaacgggttcagaaactgccaggggcctcatacagggatatcaaaataccctttgtgctagcccaggccctggggaatcaggtgactcacacaaatgcaatagttggtcactgcatttttacctgaaccaaagctaaacccggtgttgccaccatgcaccatggcatgccagagttcaacactgttgctcttgaaaatctgggtctgaaaaaacgcacaagagcccctgccctgccctagctgaggcacacagggagacccagtgaggataagcacagattgaattgtacaatttgcagatgcagatgtaaatgcatgggacatgcatgataactcagagttgacattttaaaacttgccacacttatttcaaatatttgtactcagctatgttaacatgtactgtagacatcaaacttgtggccatactaataaaattattaaaaggagcactaaaggaaaactgtgtgccaagcatcatatcctaaggcatacggaatttggggaagccaccatgcaatccagtgaggcttcagtgtacagcaaccaaaatggtagggaggtcttgaagccaatgagggatttatagcatcttgaatagagagctgcaaaccaccagggggcagagttgcacttttccaggctttttaggaagctctgcaacagatgtgatctgatcataggcaattagaactggaagaaacttccaaaaatatctaggtttgtcctcattttacaaatgaggaaactaaactctgtggaagggaaggggttgcctcaaaagtcacagcttagctgggcacagtggctcatgccgataatcccagcaattcagaaagctgaggcaggaggattacttgaggccagactgggcaatatagcaagaccccatctctaaaaaattaggcatggtggtgcatgcctgtattcccagctactcaggaggttgaggtgggaggatcacttgagcccagaagttcaaggctgcaatgagccatgattacaccacggcactacaaccttggtggcacagtgagaacctgactcttaaaaaaaaaaaaaaaaaaaaaaaaaaaaaaaagataactagaacttctagaacatcttgtttacagttagccagaaactatacaagtggtttaacatgcattatcttactcaatccatacaaaagtcttatggaggtgttagcactctttctactgatgaagaactgaggtacttcataaaaccacttacccaaggtgtcttgagtctggtacaactggcattcaaatctaggtcagtctgcccccagagccactacccttacccctcactgaatctgcctttatattgttgagcccatgaccccaaactgctctttccaatttgaacttccagggattttattgtgaacttacatagcaacattaaaatgaagttgaattgtttttaatggcaacgccgtctgtctcctctagcttaccgcttctcacctttcaaccccatctgtggcctttgtccaggcccacagcttagccatggcttccctcctgcatccctgccgtgggttgctggcctcacacttgcagcagctggacagtgattttagaaggccaccagtccccatagctatgtgacaatgagaagcaaacttttttgtgacagattgtattggcataggcatgatagatggggattggtacgttttgaatcagcatttgcaaaaaaattgtcttgaattttaaaataaacaacaaagatttgttcattgagtgcaaaaaa

SEQ ID NO: 304294 - DNA, 2363 bp, Homo sapiens
actccctctctggatgtgtctgctgccgccattgtgcggcgctggtcccctcagagggttcctgctgctgccggtgccttggaccctccccctcgcttctcgttctactgccccaggagcccggcgggtccgggactcccgtccgtgccggtgcgggcgccggcatgtggctgtgggaggaccagggcggcctcctgggccctttctccttcctgctgctagtgctgctgctggtgacgcggagcccggtcaatgcctgcctcctcaccggcagcctcttcgttctactgcgcgtcttcagctttgagccggtgccctcttgcagggccctgcaggtgctcaagccccgggaccgcatttctgccatcgcccaccgtggcggcagccacgacgcgcccgagaacacgctggcggccattcggcaggcagctaagaatggagcaacaggcgtggagttggacattgagtttacttctgacgggattcctgtcttaatgcacgataacacagtagataggacgactgatgggactgggcgattgtgtgatttgacatttgaacaaattaggaagctgaatcctgcagcaaaccacagactcaggaatgatttccctgatgaaaagatccctaccctaagggaagctgttgcagagtgcctaaaccataacctcacaatcttctttgatgtcaaaggccatgcacacaaggctactgaggctctaaagaaaatgtatatggaatttcctcaactgtataataatagtgtggtctgttctttcttgccagaagttatctacaagatgagacaaacagatcgggatgtaataacagcattaactcacagaccttggagcctaagccatacaggagatgggaaaccacgctatgatactttctggaaacattttatatttgttatgatggacattttgctcgattggagcatgcataatatcttgtggtacctgtgtggaatttcagctttcctcatgcaaaaggattttgtatccccggcctacttgaagaagtggtcagctaaaggaatccaggttgttggttggactgttaatacctttgatgaaaagagttactacgaatcccatcttggttccagctatatcactgacagcatggtagaagactgcgaacctcacttctagactttcacggtgggacgaaacgggttcagaaactgccaggggcctcatacagggatatcaaaataccctttgtgctagcccaggccctggggaatcaggtgactcacacaaatgcaatagttggtcactgcatttttacctgaaccaaagctaaacccggtgttgccaccatgcaccatggcatgccagagttcaacactgttgctcttgaaaatctgggtctgaaaaaacgcacaagagcccctgccctgccctagctgaggcacacagggagacccagtgaggataagcacagattgaattgtacaatttgcagatgcagatgtaaatgcatgggacatgcatgataactcagagttgacattttaaaacttgccacacttatttcaaatatttgtactcagctatgttaacatgtactgtagacatcaaacttgtggccatactaataaaattattaaaaggagcactaaaaaaaaaaaaaaaaaaaaaaaaaaaaaaaaaaaaaaaaaaaaaagataactagaacttctagaacatcttgtttacagttagccagaaactatacaagtggtttaacatgcattatcttactcaatccatacaaaagtcttatggaggtgttagcactctttctactgatgaagaactgaggtacttcataaaaccacttacccaaggtgtcttgagtctggtacaactggcattcaaatctaggtcagtctgcccccagagccactacccttacccctcactgaatctgcctttatattgttgagcccatgaccccaaactgctctttccaatttgaacttccagggattttattgtgaacttacatagcaacattaaaatgaagttgaattgtttttaatggcaacgccgtctgtctcctctagcttaccgcttctcacctttcaaccccatctgtggcctttgtccaggcccacagcttagccatggcttccctcctgcatccctgccgtgggttgctggcctcacacttgcagcagctggacagtgattttagaaggccaccagtccccatagctatgtgacaatgagaagcaaacttttttgtgacagattgtattggcataggcatgatagatggggattggtacgttttgaatcagcatttgcaaaaaaattgtcttgaattttaaaataaacaacaaagatttgttcattgagtgcaaaaaa

SEQ ID NO: 304295 - DNA, 2081 bp, Homo sapiens
actccctctctggatgtgtctgctgccgccattgtgcggcgctggtcccctcagagggttcctgctgctgccggtgccttggaccctccccctcgcttctcgttctactgccccaggagcccggcgggtccgggactcccgtccgtgccggtgcgggcgccggcatgtggctgtgggaggaccagggcggcctcctgggccctttctccttcctgctgctagtgctgctgctggtgacgcggagcccggtcaatgcctgcctcctcaccggcagcctcttcgttctactgcgcgtcttcagctttgagccggtgccctcttgcagggccctgcaggtgctcaagccccgggaccgcatttctgccatcgcccaccgtggcggcagccacgacgcgcccgagaacacgctggcggccattcggcaggcagctaagaatggagcaacaggcgtggagttggacattgagtttacttctgacgggattcctgtcttaatgcacgataacacagtagataggacgactgatgggactgggcgattgtgtgatttgacatttgaacaaattaggaagctgaatcctgcagcaaaccacagactcaggaatgatttccctgatgaaaagatccctaccctaagggaagctgttgcagagtgcctaaaccataacctcacaatcttctttgatgtcaaaggccatgcacacaaggctactgaggctctaaagaaaatgtatatggaatttcctcaactgtataataatagtgtggtctgttctttcttgccagaagttatctacaagatgagacaaacagatcgggatgtaataacagcattaactcacagaccttggagcctaagccatacaggagatgggaaaccacgctatgatactttctggaaacattttatatttgttatgatggacattttgctcgattggagcatgcataatatcttgtggtacctgtgtggaatttcagctttcctcatgcaaaaggattttgtatccccggcctacttgaagaagtggtcagctaaaggaatccaggttgttggttggactgttaatacctttgatgaaaagagttactacgaatcccatcttggttccagctatatcactgacagcatggtagaagactgcgaacctcacttctagactttcacggtgggacgaaacgggttcagaaactgccaggggcctcatacagggatatcaaaataccctttgtgctagcccaggccctggggaatcaggtgactcacacaaatgcaatagttggtcactgcatttttacctgaaccaaagctaaacccggtgttgccaccatgcaccatggcatgccagagttcaacactgttgctcttgaaaatctgggtctgaaaaaacgcacaagagcccctgccctgccctagctgaggcacacagggagacccagtgaggataagcacagattgaattgtacaatttgcagatgcagatgtaaatgcatgggacatgcatgataactcagagttgacattttaaaacttgccacacttatttcaaatatttgtactcagctatgttaacatgtactgtagacatcaaacttgtggccatactaataaaattattaaaaggagcactaaaggaaaactgtgtgccaagcatcatatcctaaggcatacggaatttggggaagccaccatgcaatccagtgaggcttcagtgtacagcaaccaaaatggtagggaggtcttgaagccaatgagggatttatagcatcttgaatagagagctgcaaaccaccagggggcagagttgcacttttccaggctttttaggaagctctgcaacagatgtgatctgatcataggcaattagaactggaagaaacttccaaaaatatctaggtttgtcctcattttacaaatgaggaaactaaactctgtggaagggaaggggttgcctcaaaagtcacagcttagctgggcacagtggctcatgccgataatcccagcaattcagaaagctgagatggggtcttgctatattgcccagtcttggcctcaagtaatcctcctgcctcagtcgacc

SEQ ID NO: 304296 - DNA, 2246 bp, Homo sapiens
  misc_feature (1766)..(1766): n is a, c, g, or t
  misc_feature (1769)..(1769): n is a, c, g, or t
  misc_feature (1844)..(1844): n is a, c, g, or t
actccctctctggatgtgtctgctgccgccattgtgcggcgctggtcccctcagagggttcctgctgctgccggtgccttggaccctccccctcgcttctcgttctactgccccaggagcccggcgggtccgggactcccgtccgtgccggtgcgggcgccggcatgtggctgtgggaggaccagggcggcctcctgggccctttctccttcctgctgctagtgctgctgctggtgacgcggagcccggtcaatgcctgcctcctcaccggcagcctcttcgttctactgcgcgtcttcagctttgagccggtgccctcttgcagggccctgcaggtgctcaagccccgggaccgcatttctgccatcgcccaccgtggcggcagccacgacgcgcccgagaacacgctggcggccattcggcaggcagctaagaatggagcaacaggcgtggagttggacattgagtttacttctgacgggattcctgtcttaatgcacgataacacagtagataggacgactgatgggactgggcgattgtgtgatttgacatttgaacaaattaggaagctgaatcctgcagcaaaccacagactcaggaatgatttccctgatgaaaagatccctaccctaagggaagctgttgcagagtgcctaaaccataacctcacaatcttctttgatgtcaaaggccatgcacacaaggctactgaggctctaaagaaaatgtatatggaatttcctcaactgtataataatagtgtggtctgttctttcttgccagaagttatctacaagatgagacaaacagatcgggatgtaataacagcattaactcacagaccttggagcctaagccatacaggagatgggaaaccacgctatgatactttctggaaacattttatatttgttatgatggacattttgctcgattggagcatgcataatatcttgtggtacctgtgtggaatttcagctttcctcatgcaaaaggattttgtatccccggcctacttgaagaagtggtcagctaaaggaatccaggttgttggttggactgttaatacctttgatgaaaagagttactacgaatcccatcttggttccagctatatcactgacagcatggtagaagactgcgaacctcacttctagactttcacggtgggacgaaacgggttcagaaactgccaggggcctcatacagggatatcaaaataccctttgtgctagcccaggccctggggaatcaggtgactcacacaaatgcaatagttggtcactgcatttttacctgaaccaaagctaaacccggtgttgccaccatgcaccatggcatgccagagttcaacactgttgctcttgaaaatctgggtctgaaaaaacgcacaagagcccctgccctgccctagctgaggcacacagggagacccagtgaggataagcacagattgaattgtacaatttgcagatgcagatgtaaatgcatgggacatgcatgataactcagagttgacattttaaaacttgccacacttatttcaaatatttgtactcagctatgttaacatgtactgtagacatcaaacttgtggccatactaataaaattattaaaaggagcactaaaggaaaactgtgtgccaagcatcatatcctaaggcatacaggagatgggaaaccacgctatgatactttctggaaacattttatatttgttatgatggacattttgctcgattggagcatgcataatatcttntgntacctgtgtggaatttcagctttcctcatgcaaaaggattttgtatccccggcctacttgaagaagtggtcagcntaaaggacatccaggttgtttaggtttgggactgtataaatacctttgatggaaaaagacgttactaacgaatcccatctttgagttccccagcttaatatcacttgaccaggcaattgggttagggaaaggcaactttgtccgaaaagcccctttccaaacgttatccataaagaaaacgttgttgtccaacccgaggagtggaggaggaaaccgcgaaaacaaagccggtgggggtgtttttcccaaggtaaagaagaaccttttggtgccccaagtggggtggtatccccctttccaaaatttaacccaaatgtggggccgaaatttaattttccaaagaaaccaagtttaaccgccgccggttttttgggttggcccattaaaaggaccgcctccgaa

SEQ ID NO: 304297 - DNA, 1631 bp, Homo sapiens
actccctctctggatgtgtctgctgccgccattgtgcggcgctggtcccctcagagggttcctgctgctgccggtgccttggaccctccccctcgcttctcgttctactgccccaggagcccggcgggtccgggactcccgtccgtgccggtgcgggcgccggcatgtggctgtgggaggaccagggcggcctcctgggccctttctccttcctgctgctagtgctgctgctggtgacgcggagcccggtcaatgcctgcctcctcaccggcagcctcttcgttctactgcgcgtcttcagctttgagccggtgccctcttgcagggccctgcaggtgctcaagccccgggaccgcatttctgccatcgcccaccgtggcggcagccacgacgcgcccgagaacacgctggcggccattcggcaggcagctaagaatggagcaacaggcgtggagttggacattgagtttacttctgacgggattcctgtcttaatgcacgataacacagtagataggacgactgatgggactgggcgattgtgtgatttgacatttgaacaaattaggaagctgaatcctgcagcaaaccacagactcaggaatgatttccctgatgaaaagatccctaccctaagggaagctgttgcagagtgcctaaaccataacctcacaatcttctttgatgtcaaaggccatgcacacaaggctactgaggctctaaagaaaatgtatatggaatttcctcaactgtataataatagtgtggtctgttctttcttgccagaagttatctacaagatgagacaaacagatcgggatgtaataacagcattaactcacagaccttggagcctaagccatacaggagatgggaaaccacgctatgatactttctggaaacattttatatttgttatgatggacattttgctcgattggagcatgcataatatcttgtggtacctgtgtggaatttcagctttcctcatgcaaaaggattttgtatccccggcctacttgaagaagtggtcagctaaaggaatccaggttgttggttggactgttaatacctttgatgaaaagagttactacgaatcccatcttggttccagctatatcactgacagcatggtagaagactgcgaacctcacttctagactttcacggtgggacgaaacgggttcagaaactgccaggggcctcatacagggatatcaaaataccctttgtgctagcccaggccctggggaatcaggtgactcacacaaatgcaatagttggtcactgcatttttacctgaaccaaagctaaacccggtgttgccaccatgcaccatggcatgccagagttcaacactgttgctcttgaaaatctgggtctgaaaaaacgcacaagagcccctgccctgccctagctgaggcacacagggagacccagtgaggataagcacagattgaattgtacaatttgcagatgcagatgtaaatgcatgggacatgcatgataactcagagttgacattttaaaacttgccacacttatttcaaatatttgtactcagctatgttaacatgtactgtagacatcaaacttgtggccatactaataaaattattaaaaggagcact

SEQ ID NO: 304298 - DNA, 2851 bp, Homo sapiens
actccctctctggatgtgtctgctgccgccattgtgcggcgctggtcccctcagagggttcctgctgctgccggtgccttggaccctccccctcgcttctcgttctactgccccaggagcccggcgggtccgggactcccgtccgtgccggtgcgggcgccggcatgtggctgtgggaggaccagggcggcctcctgggccctttctccttcctgctgctagtgctgctgctggtgacgcggagcccggtcaatgcctgcctcctcaccggcagcctcttcgttctactgcgcgtcttcagctttgagccggtgccctcttgcagggccctgcaggtgctcaagccccgggaccgcatttctgccatcgcccaccgtggcggcagccacgacgcgcccgagaacacgctggcggccattcggcaggcagctaagaatggagcaacaggcgtggagttggacattgagtttacttctgacgggattcctgtcttaatgcacgataacacagtagataggacgactgatgggactgggcgattgtgtgatttgacatttgaacaaattaggaagctgaatcctgcagcaaaccacagactcaggaatgatttccctgatgaaaagatccctaccctaagggaagctgttgcagagtgcctaaaccataacctcacaatcttctttgatgtcaaaggccatgcacacaagatgagacaaacagatcgggatgtaataacagcattaactcacagaccttggagcctaagccatacaggagatgggaaaccacgctatgatactttctggaaacattttatatttgttatgatggacattttgctcgattggagcatgcataatatcttgtggtacctgtgtggaatttcagctttcctcatgcaaaaggattttgtatccccggcctacttgaagaagtggtcagctaaaggaatccaggttgttggttggactgttaatacctttgatgaaaagagttactacgaatcccatcttggttccagctatatcactgacagcatggtagaagactgcgaacctcacttctagactttcacggtgggacgaaacgggttcagaaactgccaggggcctcatacagggatatcaaaataccctttgtgctagcccaggccctggggaatcaggtgactcacacaaatgcaatagttggtcactgcatttttacctgaaccaaagctaaacccggtgttgccaccatgcaccatggcatgccagagttcaacactgttgctcttgaaaatctgggtctgaaaaaacgcacaagagcccctgccctgccctagctgaggcacacagggagacccagtgaggataagcacagattgaattgtacaatttgcagatgcagatgtaaatgcatgggacatgcatgataactcagagttgacattttaaaacttgccacacttatttcaaatatttgtactcagctatgttaacatgtactgtagacatcaaacttgtggccatactaataaaattattaaaaggagcactaaaggaaaactgtgtgccaagcatcatatcctaaggcatacggaatttggggaagccaccatgcaatccagtgaggcttcagtgtacagcaaccaaaatggtagggaggtcttgaagccaatgagggatttatagcatcttgaatagagagctgcaaaccaccagggggcagagttgcacttttccaggctttttaggaagctctgcaacagatgtgatctgatcataggcaattagaactggaagaaacttccaaaaatatctaggtttgtcctcattttacaaatgaggaaactaaactctgtggaagggaaggggttgcctcaaaagtcacagcttagctgggcacagtggctcatgccgataatcccagcaattcagaaagctgaggcaggaggattacttgaggccagactgggcaatatagcaagaccccatctctaaaaaattaggcatggtggtgcatgcctgtattcccagctactcaggaggttgaggtgggaggatcacttgagcccagaagttcaaggctgcaatgagccatgattacaccacggcactacaaccttggtggcacagtgagaacctgactcttaaaaaaaaaaaaaaaaaaaaaaaaaaaaaaaagataactagaacttctagaacatcttgtttacagttagccagaaactatacaagtggtttaacatgcattatcttactcaatccatacaaaagtcttatggaggtgttagcactctttctactgatgaagaactgaggtacttcataaaaccacttacccaaggtgtcttgagtctggtacaactggcattcaaatctaggtcagtctgcccccagagccactacccttacccctcactgaatctgcctttatattgttgagcccatgaccccaaactgctctttccaatttgaacttccagggattttattgtgaacttacatagcaacattaaaatgaagttgaattgtttttaatggcaacgccgtctgtctcctctagcttaccgcttctcacctttcaaccccatctgtggcctttgtccaggcccacagcttagccatggcttccctcctgcatccctgccgtgggttgctggcctcacacttgcagcagctggacagtgattttagaaggccaccagtccccatagctatgtgacaatgagaagcaaacttttttgtgacagattgtattggcataggcatgatagatggggattggtacgttttgaatcagcatttgcaaaaaaattgtcttgaattttaaaataaacaacaaagatttgttcattgagtgcaaaaaa

SEQ ID NO: 304299 - DNA, 2672 bp, Homo sapiens
cggagggcaccggagttgctctaggtcgtaaccagcctttgaaaaaggagaaaccaaaatggaaaagcgatcatccctcttgctgcgtagttgtccatctgtcgtggcggcagccacgacgcgcccgagaacacgctggcggccattcggcaggcagctaagaatggagcaacaggcgtggagttggacattgagtttacttctgacgggattcctgtcttaatgcacgataacacagtagataggacgactgatgggactgggcgattgtgtgatttgacatttgaacaaattaggaagctgaatcctgcagcaaaccacagactcaggaatgatttccctgatgaaaagatccctaccctaagggaagctgttgcagagtgcctaaaccataacctcacaatcttctttgatgtcaaaggccatgcacacaaggctactgaggctctaaagaaaatgtatatggaatttcctcaactgtataataatagtgtggtctgttctttcttgccagaagttatctacaagatgagacaaacagatcgggatgtaataacagcattaactcacagaccttggagcctaagccatacaggagatgggaaaccacgctatgatactttctggaaacattttatatttgttatgatggacattttgctcgattggagcatgcataatatcttgtggtacctgtgtggaatttcagctttcctcatgcaaaaggattttgtatccccggcctacttgaagaagtggtcagctaaaggaatccaggttgttggttggactgttaatacctttgatgaaaagagttactacgaatcccatcttggttccagctatatcactgacagcatggtagaagactgcgaacctcacttctagactttcacggtgggacgaaacgggttcagaaactgccaggggcctcatacagggatatcaaaataccctttgtgctagcccaggccctggggaatcaggtgactcacacaaatgcaatagttggtcactgcatttttacctgaaccaaagctaaacccggtgttgccaccatgcaccatggcatgccagagttcaacactgttgctcttgaaaatctgggtctgaaaaaacgcacaagagcccctgccctgccctagctgaggcacacagggagacccagtgaggataagcacagattgaattgtacaatttgcagatgcagatgtaaatgcatgggacatgcatgataactcagagttgacattttaaaacttgccacacttatttcaaatatttgtactcagctatgttaacatgtactgtagacatcaaacttgtggccatactaataaaattattaaaaggagcactaaaggaaaactgtgtgccaagcatcatatcctaaggcatacggaatttggggaagccaccatgcaatccagtgaggcttcagtgtacagcaaccaaaatggtagggaggtcttgaagccaatgagggatttatagcatcttgaatagagagctgcaaaccaccagggggcagagttgcacttttccaggctttttaggaagctctgcaacagatgtgatctgatcataggcaattagaactggaagaaacttccaaaaatatctaggtttgtcctcattttacaaatgaggaaactaaactctgtggaagggaaggggttgcctcaaaagtcacagcttagctgggcacagtggctcatgccgataatcccagcaattcagaaagctgaggcaggaggattacttgaggccagactgggcaatatagcaagaccccatctctaaaaaattaggcatggtggtgcatgcctgtattcccagctactcaggaggttgaggtgggaggatcacttgagcccagaagttcaaggctgcaatgagccatgattacaccacggcactacaaccttggtggcacagtgagaacctgactcttaaaaaaaaaaaaaaaaaaaaaaaaaaaaaaaagataactagaacttctagaacatcttgtttacagttagccagaaactatacaagtggtttaacatgcattatcttactcaatccatacaaaagtcttatggaggtgttagcactctttctactgatgaagaactgaggtacttcataaaaccacttacccaaggtgtcttgagtctggtacaactggcattcaaatctaggtcagtctgcccccagagccactacccttacccctcactgaatctgcctttatattgttgagcccatgaccccaaactgctctttccaatttgaacttccagggattttattgtgaacttacatagcaacattaaaatgaagttgaattgtttttaatggcaacgccgtctgtctcctctagcttaccgcttctcacctttcaaccccatctgtggcctttgtccaggcccacagcttagccatggcttccctcctgcatccctgccgtgggttgctggcctcacacttgcagcagctggacagtgattttagaaggccaccagtccccatagctatgtgacaatgagaagcaaacttttttgtgacagattgtattggcataggcatgatagatggggattggtacgttttgaatcagcatttgcaaaaaaattgtcttgaattttaaaataaacaacaaagatttgttcattgagtgcaaaaaa

SEQ ID NO: 304300 - DNA, 2887 bp, Homo sapiens
acaaggcacactcccggcccttgatcgctcccagtgtctagggatctccggacttgaggttttatatttacagaagacagcagatatgtatatagtttctgtgcgcctgacgctaaggttacatacagccaggaacaaggtcaaaagtgtccctggtttacagagtgtacatcggaatgggggaggcaagccttaaacaagtaaacacataaatgagataactttaagagagtgaaaggtgcaatgaagaaatcgggggaactcgaaggaaagagttacgctattttatttagatggaatagtcaagagaaatcgtctccgaagaagcaacatttgaacagaaaccggaattataaggagccaggcaggcagctaagaatggagcaacaggcgtggagttggacattgagtttacttctgacgggattcctgtcttaatgcacgataacacagtagataggacgactgatgggactgggcgattgtgtgatttgacatttgaacaaattaggaagctgaatcctgcagcaaaccacagactcaggaatgatttccctgatgaaaagatccctaccctaagggaagctgttgcagagtgcctaaaccataacctcacaatcttctttgatgtcaaaggccatgcacacaaggctactgaggctctaaagaaaatgtatatggaatttcctcaactgtataataatagtgtggtctgttctttcttgccagaagttatctacaagatgagacaaacagatcgggatgtaataacagcattaactcacagaccttggagcctaagccatacaggagatgggaaaccacgctatgatactttctggaaacattttatatttgttatgatggacattttgctcgattggagcatgcataatatcttgtggtacctgtgtggaatttcagctttcctcatgcaaaaggattttgtatccccggcctacttgaagaagtggtcagctaaaggaatccaggttgttggttggactgttaatacctttgatgaaaagagttactacgaatcccatcttggttccagctatatcactgacagcatggtagaagactgcgaacctcacttctagactttcacggtgggacgaaacgggttcagaaactgccaggggcctcatacagggatatcaaaataccctttgtgctagcccaggccctggggaatcaggtgactcacacaaatgcaatagttggtcactgcatttttacctgaaccaaagctaaacccggtgttgccaccatgcaccatggcatgccagagttcaacactgttgctcttgaaaatctgggtctgaaaaaacgcacaagagcccctgccctgccctagctgaggcacacagggagacccagtgaggataagcacagattgaattgtacaatttgcagatgcagatgtaaatgcatgggacatgcatgataactcagagttgacattttaaaacttgccacacttatttcaaatatttgtactcagctatgttaacatgtactgtagacatcaaacttgtggccatactaataaaattattaaaaggagcactaaaggaaaactgtgtgccaagcatcatatcctaaggcatacggaatttggggaagccaccatgcaatccagtgaggcttcagtgtacagcaaccaaaatggtagggaggtcttgaagccaatgagggatttatagcatcttgaatagagagctgcaaaccaccagggggcagagttgcacttttccaggctttttaggaagctctgcaacagatgtgatctgatcataggcaattagaactggaagaaacttccaaaaatatctaggtttgtcctcattttacaaatgaggaaactaaactctgtggaagggaaggggttgcctcaaaagtcacagcttagctgggcacagtggctcatgccgataatcccagcaattcagaaagctgaggcaggaggattacttgaggccagactgggcaatatagcaagaccccatctctaaaaaattaggcatggtggtgcatgcctgtattcccagctactcaggaggttgaggtgggaggatcacttgagcccagaagttcaaggctgcaatgagccatgattacaccacggcactacaaccttggtggcacagtgagaacctgactcttaaaaaaaaaaaaaaaaaaaaaaaaaaaaaaaagataactagaacttctagaacatcttgtttacagttagccagaaactatacaagtggtttaacatgcattatcttactcaatccatacaaaagtcttatggaggtgttagcactctttctactgatgaagaactgaggtacttcataaaaccacttacccaaggtgtcttgagtctggtacaactggcattcaaatctaggtcagtctgcccccagagccactacccttacccctcactgaatctgcctttatattgttgagcccatgaccccaaactgctctttccaatttgaacttccagggattttattgtgaacttacatagcaacattaaaatgaagttgaattgtttttaatggcaacgccgtctgtctcctctagcttaccgcttctcacctttcaaccccatctgtggcctttgtccaggcccacagcttagccatggcttccctcctgcatccctgccgtgggttgctggcctcacacttgcagcagctggacagtgattttagaaggccaccagtccccatagctatgtgacaatgagaagcaaacttttttgtgacagattgtattggcataggcatgatagatggggattggtacgttttgaatcagcatttgcaaaaaaattgtcttgaattttaaaataaacaacaaagatttgttcattgagtgcaaaaaa

SEQ ID NO: 304301 - DNA, 949 bp, Homo sapiens
actccctctctggatgtgtctgctgccgccattgtgcggcgctggtcccctcagagggttcctgctgctgccggtgccttggaccctccccctcgcttctcgttctactgccccaggagcccggcgggtccgggactcccgtccgtgccggtgcgggcgccggcatgtggctgtgggaggaccagggcggcctcctgggccctttctccttcctgctgctagtgctgctgctggtgacgcggagcccggtcaatgcctgcctcctcaccggcagcctcttcgttctactgcgcgtcttcagctttgagccggtgccctcttgcagggccctgcaggtgctcaagccccgggaccgcatttctgccatcgcccaccgtggcggcagccacgacgcgcccgagaacacgctggcggccattcggcaggcagctaagaatggagcaacaggcgtggagttggacattgagtttacttctgacgggattcctgtcttaatgcacgataacacagtagataggacgactgatgggactgggcgattgtgtgatttgacatttgaacaaattaggaagctgaatcctgcagcaaaccacagactcaggaatgatttccctgatgaaaagatccctaccctaagggaagctgttgcagagtgcctaaaccataacctcacaatcttctttgatgtcaaaggccatgcacacaaggctactgaggctctaaagaaaatgtatatggaatttcctcaactgtataataatagtgtggtctgttctttcttgccagaagttatctacaagatgagtataatgctccggaattatcagaaagcataatgcagaaatacgaattagtggaacttaatcatgtgccatataagcttacctaacaaacagttatatccctattcctcaactgaatgtctttcaataaataagaatatatcatt

SEQ ID NO: 304302 - DNA, 777 bp, Homo sapiens
tgggtgccatgtgccctgagttttcccccccgcctctccaccctgggggcccccgggggacccggctccataaaaaaaaaaaaaaaaaaaagataactagaacttctagaacatcttgtttacagttagccagaaactatacaagtggtttaacatgcattatcttactcaatccatacaaaagtcttatggaggtgttagcactctttctactgatgaagaactgaggtacttcataaaaccacttacccaaggtgtcttgagtctggtacaactggcattcaaatctaggtcagtctgcccccagagccactacccttacccctcactgaatctgcctttatattgttgagcccatgaccccaaactgctctttccaatttgaacttccagggattttattgtgaacttacatagcaacattaaaatgaagttgaattgtttttaatggcaacgccgtctgtctcctctagcttaccgcttctcacctttcaaccccatctgtggcctttgtccaggcccacagcttagccatggcttccctcctgcatccctgccgtgggttgctggcctcacacttgcagcagctggacagtgattttagaaggccaccagtccccatagctatgtgacaatgagaagcaaacttttttgtgacagattgtattggcataggcatgatagatggggattggtacgttttgaatcagcatttgcaaaaaaattgtcttgaattttaaaataaacaacaaagatttgttcattgagtgcaaaaaa

SEQ ID NO: 304303 - DNA, 814 bp, Homo sapiens
ggtgaggtggggggggtcaacctgagcccccaaattttaaggtgccaagggccccgggttcccccccgcccgacaaccctggggggcccctggggacccgaattttttaaaaaaaaaaaaaaaaaaaagataactagaacttctagaacatcttgtttacagttagccagaaactatacaagtggtttaacatgcattatcttactcaatccatacaaaagtcttatggaggtgttagcactctttctactgatgaagaactgaggtacttcataaaaccacttacccaaggtgtcttgagtctggtacaactggcattcaaatctaggtcagtctgcccccagagccactacccttacccctcactgaatctgcctttatattgttgagcccatgaccccaaactgctctttccaatttgaacttccagggattttattgtgaacttacatagcaacattaaaatgaagttgaattgtttttaatggcaacgccgtctgtctcctctagcttaccgcttctcacctttcaaccccatctgtggcctttgtccaggcccacagcttagccatggcttccctcctgcatccctgccgtgggttgctggcctcacacttgcagcagctggacagtgattttagaaggccaccagtccccatagctatgtgacaatgagaagcaaacttttttgtgacagattgtattggcataggcatgatagatggggattggtacgttttgaatcagcatttgcaaaaaaattgtcttgaattttaaaataaacaacaaagatttgttcattgagtgcaaaaaa

SEQ ID NO: 304304 - DNA, 617 bp, Homo sapiens
cctcccaaggtatgacggaattgcttggatcaatatcgtaactctacatgttaaccactttgaagaactaccagacgtttttcacttacccaaggtgtcttgagtctggtacaactggcattcaaatctaggtcagtctgcccccagagccactacccttacccctcactgaatctgcctttatattgttgagcccatgaccccaaactgctctttccaatttgaacttccagggattttattgtgaacttacatagcaacattaaaatgaagttgaattgtttttaatggcaacgccgtctgtctcctctagcttaccgcttctcacctttcaaccccatctgtggcctttgtccaggcccacagcttagccatggcttccctcctgcatccctgccgtgggttgctggcctcacacttgcagcagctggacagtgattttagaaggccaccagtccccatagctatgtgacaatgagaagcaaacttttttgtgacagattgtattggcataggcatgatagatggggattggtacgttttgaatcagcatttgcaaaaaaattgtcttgaattttaaaataaacaacaaagatttgttcattgagtgcaaaaaa

SEQ ID NO: 304305 - DNA, 266 bp, Homo sapiens
catttgaacatcaccttgagaattagttgtattttgtttgaacacagggttaagtgaaaagctaatttggggaggtgatttggaatgtcaggtagtccaggttgcagtgtagaaagaacacactgaaaggatggtcagtgtaatgttagaggactgtgaaagttggggaaagaagtttagtttgtaggtacttgtttttttgagcagggaattgtcttggctggaggtgaacgtcagaaaggttaatgtaggcaagtgtagaatgg

SEQ ID NO: 304306 - DNA, 1211 bp, Homo sapiens
ttttaaattcctactgtctttcagaagcaggagtgtaaaactgtcctcagatgctcagatgtttgcttcttgtcagtggaagtgggaatatgggtttgctactttagcgaacttccttgttcatgaagatgttttttatcttctagaaatattttggtgagcagggtcaggggtttctgtgttttggagcctgaacctggaagccatagaactagaagtcgaggaaaaaaaggaagggtcgagccaggtctggtggctcaagcctgtaatcccagcactttgggaggccaaggcgggagaatcacgaggtcaggagttctagaccagcctgaccaacatggtgaaaccccgtctctactcaaaatacaaaaataagctgggcgtggtggtggttgcctctaattccagctacttgggaggctgaggtaggaaaatcgcttgaaaccggaaggcagagattatggtgagccaagattgtgccactgctctccagcctgggtgaaagagggaaactccatctcaaaaaaaaaaggaagcgtcaactccaagctgctcaaaatgtatcatattgtggctcgatcgctggaagccactatgaggaaaataggacaggagatgtgcacgtgtcctccacggtccccatcccccatcctctgtgccctgcagggcttccgaagtgaaagccgagttggagatgagaagggcaatctgtgcaggctttccttgtctttatggagtgccagggtctcaaggaagaaaaggtacgagcactgtgaggcctcggcagctctgcatgctggggatttgggcagcctctgtagagaagtaagagtgcagcacccgtgtcctggtgtggtggttcaggatttgcaaggcagagttgctctttttctctgagtaacagctagtgggctctgctcagttatccgtggtagacatctgctgaatgaggagtgagttcacctcagctcacgtttagagattggctttagggcacctgccagtggagtactagagtgaggcccacggcctggcccctcccagggagcttggtgtcctcctgctgctgttcctgcatgtgaggcgcaggggacactgggacaacacggattttttagtgccagggtagctgtgtagaccaagtgttgcgggagttgatggtgtagaaagctctctggaataggattgtgaagatctaggacttgaaatgg

SEQ ID NO: 304307 - DNA, 433 bp, Homo sapiens
cctgctctgcactctcaggtattccctgctcttactccaaaaagatggacccaggtccgaaggggcactgccactgtggggggcatggccatcctccaggtcactgcgggccaccccctggccatggcccagggccctgcgggccacccccccaccatggtccagggccctgcgggccaccccctggccatggcccagggccctgcgggccacccccccaccatggtccagggccctgcgggcctccccctggccatggcccaggtcacccaccccctggtccacatcactgaggaagtagaagaaaacaggacacaagatggcaagcctgagagaattgcccagctgacctggaatgaggcctaaaccacaatcttctcttcctaataaacagcctcctagaggccacattctattctttaaaaaaaaaaac

SEQ ID NO: 304308 - DNA, 455 bp, Homo sapiens
gggaagtggagtgagggagagctgatctcaggtaagcttagccctgacctctgactctgacattgttcatttgactttccacaggggcactgccactgtggggggcatggccatcctccaggtcactgcgggccaccccctggccatggcccagggccctgcgggccacccccccaccatggtccagggccctgcgggccaccccctggccatggcccagggccctgcgggccacccccccaccatggtccagggccctgcgggcctccccctggccatggcccaggtcacccaccccctggtccacatcactgaggaagtagaagaaaacaggacacaagatggcaagcctgagagaattgcccagctgacctggaatgaggcctaaaccacaatcttctcttcctaataaacagcctcctagaggccacattctattctttaaaaaaaaaaac

SEQ ID NO: 304309 - DNA, 373 bp, Homo sapiens
aagaattcggcacgaggctctcaggtattccctgctcttactccaaaaagatggacccaggtccgaaggggcactgccactgtggggggcatggccatcctccaggtcactgcgggccaccccctggccatggcccagggccctgcgggccacccccccaccatggtccagggccctgcgggcctccccctggccatggcccaggtcacccaccccctggtccacatcactgaggaagtagaagaaaacaggacacaagatggcaagcctgagagaattgcccagctgacctggaatgaggcctaaaccacaatcttctcttcctaataaacagcctcctagaggccacattctattctttaaaaaaaaaaac

SEQ ID NO: 304310 - DNA, 1663 bp, Homo sapiens
tgcagtcggggttcagccagagggggcgccgggcgtaccgacgtagcggggagaaacgggtcgcgctttaacggcgctgcgcaggcgccactcacgggccggacgtgacgcagggaaagttccggcttcggcctccgccgctgccgccgccgctgctacagccgccgccgccgctgttgccgcggcttgttattcttaaaatggcgccgctagacctggacaagtatgtggaaatagcgcggctgtgcaagtacctgccagagaacgacctgaagcggctatgtgactacgtttgtgacctcctcttagaagagtcaaatgttcagccagtatcaacaccagtaacagtgtgtggagatatccatggacagttttatgacctttgtgaactgttcagaactggaggtcaggttcctgacacaaactacatatttatgggtgattttgtagacagaggttactatagtttggagaccttcacttaccttcttgcattaaaggctaaatggcctgatcgtattacacttttgcgaggaaatcatgagagtagacagataacacaggtctatggattttatgatgagtgccaaaccaaatatggaaatgctaatgcctggagatactgtaccaaagtttttgacatgctcacagtagcagctttaatagatgagcagattttgtgtgtccatggtggtttatctcctgatatcaaaacactggatcaaattcgaaccatcgaacggaatcaggaaattcctcataaaggagcattttgtgatctggtttggtcagatcctgaagatgtggatacctgggctatcagtccccgaggagcaggttggctttttggagcaaaggtcacaaatgagtttgttcatatcaacaacttaaaactcatctgcagagcacatcaactagtgcacgaaggctataaatttatgtttgatgagaagctggtgacagtatggtctgctcctaattactgctatcgttgtggaaatattgcttcgatcatggtcttcaaagatgtaaatacaagagaaccaaagttattccgggcagttccagattcagaacgtgttattcctcccagaacgacaacgccatatttcctttgaggccttcgcccatcctgctgacccatttttctgccctcttcttaccccaattttcttgtattaccctctacaatatactttttattgagcactttgctgctgaaatgctgcctcttgcctttttttttttaaattttaaattatctaaatttattgtttgttgtggtgtctatagcaaagtttttctatcaattttcccccatcccatccccaccctggactcatttgagaagacttgagaaatgtcttaatactcacactgctgcatgtagctcttgcttatttactggtctgggaaacaggatgtgtttcctttttttaaaagccaattgacagattacacctaaatactcctccttttgtatcattcagccttttgttttagtttggtaagttttaagaaatttcagcagcaaagttgttattcagtgggcacgatggactccaaatgcctcaagttatgtatacctgtcccagatgtaaacttcattgtcctttgttggatgatattttaaatggatataaaataaattggtctaaagggc

SEQ ID NO: 304311 - DNA, 791 bp, Homo sapiens
tgcagtcggggttcagccagagggggcgccgggcgtaccgacgtagcggggagaaacgggtcgcgctttaacggcgctgcgcaggcgccactcacgggccggacgtgacgcagggaaagttccggcttcggcctccgccgctgccgccgccgctgctacagccgccgccgccgctgttgccgcggcttgttattcttaaaatggcgccgctagacctggacaagtatgtggaaatagcgcggctgtgcaagtacctgccagagaacgacctgaagcggctatgtgactacgtttgtgacctcctcttagaagagtcaaatgttcagccagtatcaacaccagtaacagtgtgtggagatatccatggacagttttatgacctttgtgaactgttcagaactggaggtcaggttcctgacacaaactacatatttatgtccctatttcagtatattaaaagatgtgtattagtccgttttcacgccgctgataaagacatacctgagactgggcaatttacaaaagaggtttaatggacttaacagtttcacatggctggagaggcctcacaatcatgcagaaggcaaggaggaccaagtcacatcttatgtggatggcggcaggcaaagagagagagactgtgcagggatctcttgtttttaaaaccatcagatctcatgagacttattgtcatgagaacagcacaggaaagacttgcccccatgattcaattactttccatcgagtccctcccacaacatgtgggaattcaagatgagatttgggtgggg

SEQ ID NO: 304312 - DNA, 4218 bp, Homo sapiens
tgcagtcggggttcagccagagggggcgccgggcgtaccgacgtagcggggagaaacgggtcgcgctttaacggcgctgcgcaggcgccactcacgggccggacgtgacgcagggaaagttccggcttcggcctccgccgctgccgccgccgctgctacagccgccgccgccgctgttgccgcggcttgttattcttaaaatggcgccgctagacctggacaagtatgtggaaatagcgcggctgtgcaagtacctgccagagaacgacctgaagcggctatgtgactacgtttgtgacctcctcttagaagagtcaaatgttcagccagtatcaacaccagtaacagtgtgtggagatatccatggacagttttatgacctttgtgaactgttcagaactggaggtcaggttcctgacacaaactacatatttatgggtgattttgtagacagaggttactatagtttggagaccttcacttaccttcttgcattaaaggctaaatggcctgatcgtattacacttttgcgaggaaatcatgagagtagacagataacacaggtctatggattttatgatgagtgccaaaccaaatatggaaatgctaatgcctggagatactgtaccaaagtttttgacatgctcacagtagcagctttaatagatgagcagattttgtgtgtccatggtggtttatctcctgatatcaaaacactggatcaaattcgaaccatcgaacggaatcaggaaattcctcataaaggagcattttgtgatctggtttggtcagatcctgaagatgtggatacctgggctatcagtccccgaggagcaggttggctttttggagcaaaggtcacaaatgagtttgttcatatcaacaacttaaaactcatctgcagagcacatcaactagtgcacgaaggctataaatttatgtttgatgagaagctggtgacagtatggtctgctcctaattactgctatcgttgtggaaatattgcttcgatcatggtcttcaaagatgtaaatacaagagaaccaaagttattccgggcagttccagattcagaacgtgttattcctcccagaacgacaacgccatatttcctttgaggccttcgcccatcctgctgacccatttttctgccctcttcttaccccaattttcttgtattaccctctacaatatactttttattgagcactttgctgctgaaatgctgcctcttgcctttttttttttaaattttaaattatctaaatttattgtttgttgtggtgtctatagcaaagtttttctatcaattttcccccatcccatccccaccctggactcatttgagaagacttgagaaatgtcttaatactcacactgctgcatgtagctcttgcttatttactggtctgggaaacaggatgtgtttcctttttttaaaagccaattgacagattacacctaaatactcctccttttgtatcattcagccttttgttttagtttggtaagttttaagaaatttcagcagcaaagttgttattcagtgggcacgatggactccaaatgcctcaagttatgtatacctgtcccagatgtaaacttcattgtcctttgttggatgatattttaaatggatataaaataaattggtctaaagggctgccctccttgttgtgtttttaaattttagttaaaaactgctacagcttatgactttgtactttaagataattgtattgatcttttttcagattccttgtattttttaataaagtaatcttaaataaaactcagataggttaagtgttagaaattttaaacagcttacattgttagcgtaaagttatcttttcttttttcctaatcagagttcttgaccctttggttattgagtttaaaacttcaattgaaattcaatagtatttattttttaaaaaaatcactaaactgtgcctaaagaacataactgccatattaatgttttggtttatatcctctatagtaatagaaaaacatttaatacttgtaatgctgatgtgttaatttgataccagttgagtagaatgtgatcaatccagtttacaatctatcatgagtattattaactaaaatctatgtgcttttcaataggaatcattcttctcttgctgtaacacttgaccttaacttttagaaagtgttcatttttaaactgcaactggaaaggttgaaaagttaggactcttgtatttgtgaactgtaatctgaagcagattatttaaagtgtagaaaaagaaacaagttcttcttttttgcaaaggtctgtgataccatatttcagctttgtgtaagtaatttgaatatccaaagggttgtgatgatcagttctgaatatgcaactgtccacttaataaggacaagtattccagtatctcttatgactgtagtcataaatgatgttggaatgtacattttgtgaaatagttggtatccctttactatgattaatttttgttattccaggaaatacttgtgaagccagccaattaataaagcactttagcatctgttcaggtagttttgaaaacccacttttccccttcaggataagaacttccaggttacctaaaaatgcaataaaaatctttatagtctaagcttcttggcatataatttttcatcagggttttcttttattaattgagcacaatactgttttgatttaatttttttccctcaaaccacccagctccttacatagtttttaattatatagctatatgaaagaggtggctaagacatttgctgcacacacttgaactaatgttgggtcagtagcttcgtgttactgccctgatcccagtgtaattcaggtggaaaggtatttttatctcacagggatatgtagctatgtattttactaattgtgaaacactggaaattaatgatgcagacaacttggtgtggtctttgaacagctctctgcagtatttttttttttcctgttaccataaattgtatttaagtgcttgctttccacttaagttgtactaatagaaccggtaactcccagccctccctgtttgacactccttagcttagattgatgtagttgtttttgttatccctataatgtgacttttatttttaagtcattgtgtactgcatttgtttgtcactagttgggcacgtgccaataatattctctccattccttatctgccatctctgttttgcctgatttctcttcaactgaataatggctttttgcatggaaaaaatagtttttactattagacgtgtaaagggaagagagagctaatgtattggactttgtgagcctacaaggaatattttggatccctccaataaataagggctatgtactatatgtactatatagagttatcatgtggtggaagatacttgcaagtcatagatttatgggcaggaggatttgttactccctatatctaggctgaatgtaaaatcccttatgttgtatcaatgggggtaaaaactatttttatttgcctatgatatacttggtttctaataaagtgccctaggctctagtgagaactgtctactttgaattgccatttactccctttcctcctttggccgatatgctcttggctagctttttataagttaatgtgtttccccaaaaagtttcactactttatattcatttgagtgtgatcctaaaacacctggatcaacagtacatctcatatgcaatctgcatcagctcctattctgtctggatgtctagaactgttggaagattttgacgtcttaagccctaggttttgctttgggaaataaggtttgaaatattgttcattgcattaagatttgtgtgtgtgtgctttgtaagcccagaaccaggttttggaaaatgcctgtactgtgaaagcaaattaggactctttctgagcctctttcattgtcagaaatagaatcactttccatcagcttccaggaaattgtgtatctggagtcgaagagatttaacatcaagaatccagatttttaaatgtaattgttttttaaatgctaatgtttgtaaagcaccttcagttcttcggatgaaaggtgctatattccctcagtgtaaattaataaaaagattacaggaagtttgtcaaaaaattcaatgcatagtctgtagtatgtcctgacaagaagttagcattttatataagaaattaaaaaatgcttattcctcca

SEQ ID NO: 304313 - DNA, 4135 bp, Homo sapiens
tgcagtcggggttcagccagagggggcgccgggcgtaccgacgtagcggggagaaacgggtcgcgctttaacggcgctgcgcaggcgccactcacgggccggacgtgacgcagggaaagttccggcttcggcctccgccgctgccgccgccgctgctacagccgccgccgccgctgttgccgcggcttgttattcttaaaatggcgccgctagacctggacaagtatgtggaaatagcgcggctgtgcaagtacctgccagagaacgacctgaagcggctatgtgactacgtttgtgacctcctcttagaagagtcaaatgttcagccagtatcaacaccagtaacagtgtgtggagatatccatggacagttttatgacctttgtgaactgttcagaactggaggtcaggttcctgacacaaactacatatttatgggtgattttgtagacagaggttactatagtttggagaccttcacttaccttcttgcattaaaggctaaatggcctgatcgtattacacttttgcgaggaaatcatgagagtagacagataacacaggtctatggattttatgatgagtgccaaaccaaatatggaaatgctaatgcctggagatactgtaccaaagtttttgacatgctcacagtagcagctttaatagatgagcagattttgtgtgtccatggtggtttatctcctgatatcaaaacactggatcaaattcgaaccatcgaacggaatcaggaaattcctcataaaggagcattttgtgatctggtttggtcagatcctgaagatgtggatacctgggctatcagtccccgaggagcaggttggctttttggagcaaaggtcacaaatgagtttgttcatatcaacaacttaaaactcatctgcagagcacatcaactagtgcacgaaggctataaatttatgtttgatgagaagctggtgacagtatggtctgctcctaattactgctatcgttgtggaaatattgcttcgatcatggtcttcaaagatgtaaatacaagagaaccaaagttattccgggcagttccagattcagaacgtgttattcctcccagaacgacaacgccatatttcctttgaggccttcgcccatcctgctgacccatttttctgccctcttcttaccccaattttcttgtattaccctctacaatatactttttattgagcactttgctgctgaaatgctgcctcttgcctttttttttttaaattttaaattatctaaatttattgtttgttgtggtgtctatagcaaagtttttctatcaattttcccccatcccatccccaccctggactcatttgagaagacttgagaaatgtcttaatactcacactgctgcatgtagctcttgcttatttactggtctgggaaacaggatgtgtttcctttttttaaaagccaattgacagattacacctaaatactcctccttttgtatcattcagccttttgttttagtttggtaagttttaagaaatttcagcagcaaagttgttattcagtgggcacgatggactccaaatgcctcaagttatgtatacctgtcccagatgtaaacttcattgtcctttgttggatgatattttaaatggatataaaataaattggtctaaagggctgccctccttgttgtgtttttaaattttagttaaaaactgctacagcttatgactttgtactttaagataattgtattgatcttttttcagattccttgtattttttaataaagtaatcttaaataaaactcagataggttaagtgttagaaattttaaacagcttacattgttagcgtaaagttatcttttcttttttcctaatcagagttcttgaccctttggttattgagtttaaaacttcaattgaaattcaatagtatttattttttaaaaaaatcactaaactgtgcctaaagaacataactgccatattaatgttttggtttatatcctctatagtaatagaaaaacatttaatacttgtaatgctgatgtgttaatttgataccagttgagtagaatgtgatcaatccagtttacaatctatcatgagtattattaactaaaatctatgtgcttttcaataggaatcattcttctcttgctgtaacacttgaccttaacttttagaaagtgttcatttttaaactgcaactggaaaggttgaaaagttaggactcttgtatttgtgaactgtaatctgaagcagattatttaaagtgtagaaaaagaaacaagttcttcttttttgcaaaggtctgtgataccatatttcagctttgtgtaagtaatttgaatatccaaagggttgtgatgatcagttctgaatatgcaactgtccacttaataaggacaagtattccagtatctcttatgactgtagtcataaatgatgttggaatgtacattttgtgaaatagttggtatccctttactatgattaatttttgttattccaggaaatacttgtgaagccagccaattaataaagcactttagcatctgttcaggtagttttgaaaacccacttttccccttcaggataagaacttccaggttacctaaaaatgcaataaaaatctttatagtctaagcttcttggcatataatttttcatcagggttttcttttattaattgagcacaatactgttttgatttaatttttttccctcaaaccacccagctccttacatagtttttaattatatagctatatgaaagaggtggctaagacatttgctgcacacacttgaactaatgttgggtcagtagcttcgtgttactgccctgatcccagtgtaattcaggtggaaaggtatttttatctcacagggatatgtagctatgtattttactaattgtgaaacactggaaattaatgatgcagacaacttggtgtggtctttgaacagctctctgcagtatttttttttttcctgttaccataaattgtatttaagtgcttgctttccacttaagttgtactaatagaaccggtaactcccagccctccctgtttgacactccttagcttagattgatgtagttgtttttgttatccctataatgtgacttttatttttaagtcattgtgtactgcatttgtttgtcactagttgggcacgtgccaataatattctctccattccttatctgccatctctgttttgcctgatttctcttcaactgaataatggctttttgcatggaaaaaatagtttttactattagacgtgtaaagggaagagagagctaatgtattggactttgtgagcctacaaggaatattttggatccctccaataaataagggctatgtactatatgtactatatagagttatcatgtggtggaagatacttgcaagtcatagatttatgggcaggaggatttgttactccctatatctaggctgaatgtaaaatcccttatgttgtatcaatgggggtaaaaactatttttatttgcctatgatatacttggtttctaataaagtgccctaggctctagtgagaactgtctactttgaattgccatttactccctttcctcctttggccgatatgctcttggctagctttttataagttaatgtgtttccccaaaaagtttcactactttatattcatttgagtgtgatcctaaaacacctggatcaacagtacatctcatatgcaatctgcatcagctcctattctgtctggatgtctagaactgttggaagattttgacgtcttaagccctaggttttgctttgggaaataaggtttgaaatattgttcattgcattaagatttgtgtgtgtgtgctttgtaagcccagaaccaggttttggaaaatgcctgtactgtgaaagcaaattaggactctttctgagcctctttcattgtcagaaatagaatcactttccatcagcttccaggaaattgtgtatctggagtcgaagagatttaacatcaagaatccagatttttaaatgtaattgttttttaaatgctaatgtttgtaaagcaccttcagttcttcggatgaaaggtgctatattccctcagtgtaaattaataaaaagattacaggaagtttgtca

SEQ ID NO: 304314 - DNA, 3563 bp, Homo sapiens
tgcagtcggggttcagccagagggggcgccgggcgtaccgacgtagcggggagaaacgggtcgcgctttaacggcgctgcgcaggcgccactcacgggccggacgtgacgcagggaaagttccggcttcggcctccgccgctgccgccgccgctgctacagccgccgccgccgctgttgccgcggcttgttattcttaaaatggcgccgctagacctggacaagtatgtggaaatagcgcggctgtgcaagtacctgccagagaacgacctgaagcggctatgtgactacgtttgtgacctcctcttagaagagtcaaatgttcagccagtatcaacaccagtaacagtgtgtggagatatccatggacagttttatgacctttgtgaactgttcagaactggaggtcaggttcctgacacaaactacatatttatgggtgattttgtagacagaggttactatagtttggagaccttcacttaccttcttgcattaaaggctaaatggcctgatcgtattacacttttgcgaggaaatcatgagagtagacagataacacaggtctatggattttatgatgagtgccaaaccaaatatggaaatgctaatgcctggagatactgtaccaaagtttttgacatgctcacagtagcagctttaatagatgagcagattttgtgtgtccatggtggtttatctcctgatatcaaaacactggatcaaattcgaaccatcgaacggaatcaggaaattcctcataaaggagcattttgtgatctggtttggtcagatcctgaagatgtggatacctgggctatcagtccccgaggagcaggttggctttttggagcaaaggtcacaaatgagtttgttcatatcaacaacttaaaactcatctgcagagcacatcaactagtgcacgaaggctataaatttatgtttgatgagaagctggtgacagtatggtctgctcctaattactgctatcgttgtggaaatattgcttcgatcatggtcttcaaagatgtaaatacaagagaaccaaagttattccgggcagttccagattcagaacgtgttattcctcccagaacgacaacgccatatttcctttgaggccttcgcccatcctgctgacccatttttctgccctcttcttaccccaattttcttgtattaccctctacaatatactttttattgagcactttgctgctgaaatgctgcctcttgcctttttttttttaaattttaaattatctaaatttattgtttgttgtggtgtctatagcaaagtttttctatcaattttcccccatcccatccccaccctggactcatttgagaagacttgagaaatgtcttaatactcacactgctgcatgtagctcttgcttatttactggtctgggaaacaggatgtgtttcctttttttaaaagccaattgacagattacacctaaatactcctccttttgtatcattcagccttttgttttagtttggtaagttttaagaaatttcagcagcaaagttgttattcagtgggcacgatggactccaaatgcctcaagttatgtatacctgtcccagatgtaaacttcattgtcctttgttggatgatattttaaatggatataaaataaattggtctaaagggctgccctccttgttgtgtttttaaattttagttaaaaactgctacagcttatgactttgtactttaagataattgtattgatcttttttcagattccttgtattttttaataaagtaatcttaaataaaactcagataggttaagtgttagaaattttaaacagcttacattgttagcgtaaagttatcttttcttttttcctaatcagagttcttgaccctttggttattgagtttaaaacttcaattgaaattcaatagtatttattttttaaaaaaatcactaaactgtgcctaaagaacataactgccatattaatgttttggtttatatcctctatagtaatagaaaaacatttaatacttgtaatgctgatgtgttaatttgataccagttgagtagaatgtgatcaatccagtttacaatctatcatgagtattattaactaaaatctatgtgcttttcaataggaatcattcttctcttgctgtaacacttgaccttaacttttagaaagtgttcatttttaaactgcaactggaaaggttgaaaagttaggactcttgtatttgtgaactgtaatctgaagcagattatttaaagtgtagaaaaagaaacaagttcttcttttttgcaaaggtctgtgataccatatttcagctttgtgtaagtaatttgaatatccaaagggttgtgatgatcagttctgaatatgcaactgtccacttaataaggacaagtattccagtatctcttatgactgtagtcataaatgatgttggaatgtacattttgtgaaatagttggtatccctttactatgattaatttttgttattccaggaaatacttgtgaagccagccaattaataaagcactttagcatctgttcaggtagttttgaaaacccacttttccccttcaggataagaacttccaggttacctaaaaatgcaataaaaatctttatagtctaagcttcttggcatataatttttcatcagggttttcttttattaattgagcacaatactgttttgatttaatttttttccctcaaaccacccagctccttacatagtttttaattatatagctatatgaaagaggtggctaagacatttgctgcacacacttgaactaatgttgggtcagtagcttcgtgttactgccctgatcccagtgtaattcaggtggaaaggtatttttatctcacagggatatgtagctatgtattttactaattgtgaaacactggaaattaatgatgcagacaacttggtgtggtctttgaacagctctctgcagtatttttttttttcctgttaccataaattgtatttaagtgcttgctttccacttaagttgtactaatagaaccggtaactcccagccctccctgtttgacactccttagcttagattgatgtagttgtttttgttatccctataatgtgacttttatttttaagtcattgtgtactgcatttgtttgtcactagttgggcacgtgccaataatattctctccattccttatctgccatctctgttttgcctgatttctcttcaactgaataatggctttttgcatggaaaaaatagtttttactattagacgtgtaaagggaagagagagctaatgtattggactttgtgagcctacaaggaatattttggatccctccaataaataagggctatgtactatatgtactatatagagttatcatgtggtggaagatacttgcaagtcatagatttatgggcaggaggatttgttactccctatatctaggctgaatgtaaaatcccttatgttgtatcaatgggggtaaaaactatttttatttgcctatgatatacttggtttctaataaagtgccctaggctctagtgaga

SEQ ID NO: 304315 - DNA, 4175 bp, Homo sapiens
tgcagtcggggttcagccagagggggcgccgggcgtaccgacgtagcggggagaaacgggtcgcgctttaacggcgctgcgcaggcgccactcacgggccggacgtgacgcagggaaagttccggcttcggcctccgccgctgccgccgccgctgctacagccgccgccgccgctgttgccgcggcttgttattcttaaaatggcgccgctagacctggacaagtatgtggaaatagcgcggctgtgcaagtacctgccagagaacgacctgaagcggctatgtgactacgtttgtgacctcctcttagaagagtcaaatgttcagccagtatcaacaccagtaacagtgtgtggagatatccatggacagttttatgacctttgtgaactgttcagaactggaggtcaggttcctgacacaaactacatatttatgggtgattttgtagacagaggttactatagtttggagaccttcacttaccttcttgcattaaaggctaaatggcctgatcgtattacacttttgcgaggaaatcatgagagtagacagataacacaggtctatggattttatgatgagtgccaaaccaaatatggaaatgctaatgcctggagatactgtaccaaagtttttgacatgctcacagtagcagctttaatagatgagcagattttgtgtgtccatggtggtttatctcctgatatcaaaacactggatcaaattcgaaccatcgaacggaatcaggaaattcctcataaaggagcattttgtgatctggtttggtcagatcctgaagatgtggatacctgggctatcagtccccgaggagcaggttggctttttggagcaaaggtcacaaatgagtttgttcatatcaacaacttaaaactcatctgcagagcacatcaactagtgcacgaaggctataaatttatgtttgatgagaagctggtgacagtatggtctgctcctaattactgctatcgttgtggaaatattgcttcgatcatggtcttcaaagatgtaaatacaagagaaccaaagttattccgggcagttccagattcagaacgtgttattcctcccagaacgacaacgccatatttcctttgaggccttcgcccatcctgctgacccatttttctgccctcttcttaccccaattttcttgtattaccctctacaatatactttttattgagcactttgctgctgaaatgctgcctcttgcctttttttttttaaattttaaattatctaaatttattgtttgttgtggtgtctatagcaaagtttttctatcaattttcccccatcccatccccaccctggactcatttgagaagacttgagaaatgtcttaatactcacactgctgcatgtagctcttgcttatttactggtctgggaaacaggatgtgtttcctttttttaaaagccaattgacagattacacctaaatactcctccttttgtatcattcagccttttgttttagtttggtaagttttaagaaatttcagcagcaaagttgttattcagtgggcacgatggactccaaatgcctcaagttatgtatacctgtcccagatgtaaacttcattgtcctttgttggatgatattttaaatggatataaaataaattggtctaaagggctgccctccttgttgtgtttttaaattttagttaaaaactgctacagcttatgactttgtactttaagataattgtattgatcttttttcagattccttgtattttttaataaagtaatcttaaataaaactcagataggttaagtgttagaaattttaaacagcttacattgttagcgtaaagttatcttttcttttttcctaatcagagttcttgaccctttggttattgagtttaaaacttcaattgaaattcaatagtatttattttttaaaaaaatcactaaactgtgcctaaagaacataactgccatattaatgttttggtttatatcctctatagtaatagaaaaacatttaatacttgtaatgctgatgtgttaatttgataccagttgagtagaatgtgatcaatccagtttacaatctatcatgagtattattaactaaaatctatgtgcttttcaataggaatcattcttctcttgctgtaacacttgaccttaacttttagaaagtgttcatttttaaactgcaactggaaaggttgaaaagttaggactcttgtatttgtgaactgtaatctgaagcagattatttaaagtgtagaaaaagaaacaagttcttcttttttgcaaaggtctgtgataccatatttcagctttgtgtaagtaatttgaatatccaaagggttgtgatgatcagttctgaatatgcaactgtccacttaataaggacaagtattccagtatctcttatgactgtagtcataaatgatgttggaatgtacattttgtgaaatagttggtatccctttactatgattaatttttgttattccaggaaatacttgtgaagccagccaattaataaagcactttagcatctgttcaggtagttttgaaaacccacttttccccttcaggataagaacttccaggttacctaaaaatgcaataaaaatctttatagtctaagcttcttggcatataatttttcatcagggttttcttttattaattgagcacaatactgttttgatttaatttttttccctcaaaccacccagctccttacatagtttttaattatatagctatatgaaagaggtggctaagacatttgctgcacacacttgaactaatgttgggtcagtagcttcgtgttactgccctgatcccagtgtaattcaggtggaaaggtatttttatctcacagggatatgtagctatgtattttactaattgtgaaacactggaaattaatgatgcagacaacttggtgtggtctttgaacagctctctgcagtatttttttttttcctgttaccataaattgtatttaagtgcttgctttccacttaagttgtactaatagaaccggtaactcccagccctccctgtttgacactccttagcttagattgatgtagttgtttttgttatccctataatgtgacttttatttttaagtcattgtgtactgcatttgtttgtcactagttgggcacgtgccaataatattctctccattccttatctgccatctctgttttgcctgatttctcttcaactgaataatggctttttgcatggaaaaaatagtttttactattagacgtgtaaagggaagagagagctaatgtattggactttgtgagcctacaaggaatattttggatccctccaataaataagggctatgtactatatgtactatatagagttatcatgtggtggaagatacttgcaagtcatagatttatgggcaggaggatttgttactccctatatctaggctgaatgtaaaatcccttatgttgtatcaatgggggtaaaaactatttttatttgcctatgatatacttggtttctaataaagtgccctaggctctagtgagaactgtctactttgaattgccatttactccctttcctcctttggccgatatgctcttggctagctttttataagttaatgtgtttccccaaaaagtttcactactttatattcatttgagtgtgatcctaaaacacctggatcaacagtacatctcatatgcaatctgcatcagctcctattctgtctggatgtctagaactgttggaagattttgacgtcttaagccctaggttttgctttgggaaataaggtttgaaatattgttcattgcattaagatttgtgtgtgtgtgctttgtaagcccagaaccaggttttggaaaatgcctgtactgtgaaagcaaattaggactctttctgagcctctttcattgtcagaaatagaatcactttccatcagcttccaggaaattgtgtatctggagtcgaagagatttaacatcaagaatccagatttttaaatgtaattgttttttaaatgtatattccctcagtgtaaattaataaaaagattacaggaagtttgtcaaaaaattcaatgcatagtctgtagtatgtcctgacaagaagttagcattttatataagaaattaaaaaatgcttattcctcca

SEQ ID NO: 304316 - DNA, 4164 bp, Homo sapiens
tgcagtcggggttcagccagagggggcgccgggcgtaccgacgtagcggggagaaacgggtcgcgctttaacggcgctgcgcaggcgccactcacgggccggacgtgacgcagggaaagttccggcttcggcctccgccgctgccgccgccgctgctacagccgccgccgccgctgttgccgcggcttgttattcttaaaatggcgccgctagacctggacaagtatgtggaaatagcgcggctgtgcaagtacctgccagagaacgacctgaagcggctatgtgactacgtttgtgacctcctcttagaagagtcaaatgttcagccagtatcaacaccagtaacagtgtgtggagatatccatggacagttttatgacctttgtgaactgttcagaactggaggtcaggttcctgacacaaactacatatttatgggtgattttgtagacagaggttactatagtttggagaccttcacttaccttcttgcattaaaggctaaatggcctgatcgtattacacttttgcgaggaaatcatgagagtagacagataacacaggtctatggattttatgatgagtgccaaaccaaatatggaaatgctaatgcctggagatactgtaccaaagtttttgacatgctcacagtagcagctttaatagatgagcagattttgtgtgtccatggtggtttatctcctgatatcaaaacactggatcaaattcgaaccatcgaacggaatcaggaaattcctcataaaggagcattttgtgatctggtttggtcagatcctgaagatgtggatacctgggctatcagtccccgaggagcaggttggctttttggagcaaaggtcacaaatgagtttgttcatatcaacaacttaaaactcatctgcagagcacatcaactagtgcacgaaggctataaatttatgtttgatgagaagctggtgacagtatggtctgctcctaattactgctatcgttgtggaaatattgcttcgatcatggtcttcaaagatgtaaatacaagagaaccaaagttattccgggcagttccagattcagaacgtgttattcctcccagaacgacaacgccatatttcctttgaggccttcgcccatcctgctgacccatttttctgccctcttcttaccccaattttcttgtattaccctctacaatatactttttattgagcactttgctgctgaaatgctgcctcttgcctttttttttttaaattttaaattatctaaatttattgtttgttgtggtgtctatagcaaagtttttctatcaattttcccccatcccatccccaccctggactcatttgagaagacttgagaaatgtcttaatactcacactgctgcatgtagctcttgcttatttactggtctgggaaacaggatgtgtttcctttttttaaaagccaattgacagattacacctaaatactcctccttttgtatcattcagccttttgttttagtttggtaagttttaagaaatttcagcagcaaagttgttattcagtgggcacgatggactccaaatgcctcaagttatgtatacctgtcccagatgtaaacttcattgtcctttgttggatgatattttaaatggatataaaataaattggtctaaagggctgccctccttgttgtgtttttaaattttagttaaaaactgctacagcttatgactttgtactttaagataattgtattgatcttttttcagattccttgtattttttaataaagtaatcttaaataaaactcagataggttaagtgttagaaattttaaacagcttacattgttagcgtaaagttatcttttcttttttcctaatcagagttcttgaccctttggttattgagtttaaaacttcaattgaaattcaatagtatttattttttaaaaaaatcactaaactgtgcctaaagaacataactgccatattaatgttttggtttatatcctctatagtaatagaaaaacatttaatacttgtaatgctgatgtgttaatttgataccagttgagtagaatgtgatcaatccagtttacaatctatcatgagtattattaactaaaatctatgtgcttttcaataggaatcattcttctcttgctgtaacacttgaccttaacttttagaaagtgttcatttttaaactgcaactggaaaggttgaaaagttaggactcttgtatttgtgaactgtaatctgaagcagattatttaaagtgtagaaaaagaaacaagttcttcttttttgcaaaggtctgtgataccatatttcagctttgtgtaagtaatttgaatatccaaagggttgtgatgatcagttctgaatatgcaactgtccacttaataaggacaagtattccagtatctcttatgactgtagtcataaatgatgttggaatgtacattttgtgaaatagttggtatccctttactatgattaatttttgttattccaggaaatacttgtgaagccagccaattaataaagcactttagcatctgttcaggtagttttgaaaacccacttttccccttcaggataagaacttccaggttacctaaaaatgcaataaaaatctttatagtctaagcttcttggcatataatttttcatcagggttttcttttattaattgagcacaatactgttttgatttaatttttttccctcaaaccacccagctccttacatagtttttaattatatagctatatgaaagaggtggctaagacatttgctgcacacacttgaactaatgttgggtcagtagcttcgtgttactgccctgatcccagtgtaattcaggtggaaaggtatttttatctcacagggatatgtagctatgtattttactaattgtgaaacactggaaattaatgatgcagacaacttggtgtggtctttgaacagctctctgcagtatttttttttttcctgttaccataaattgtatttaagtgcttgctttccacttaagttgtactaatagaaccggtaactcccagccctccctgtttgacactccttagcttagattgatgtagttgtttttgttatccctataatgtgacttttatttttaagtcattgtgtactgcatttgtttgtcactagttgggcacgtgccaataatattctctccattccttatctgccatctctgttttgcctgatttctcttcaactgaataatggctttttgcatggaaaaaatagtttttactattagacgtgtaaagggaagagagagctaatgtattggactttgtgagcctacaaggaatattttggatccctccaataaataagggctatgtactatatgtactatatagagttatcatgtggtggaagatacttgcaagtcatagatttatgggcaggaggatttgttactccctatatctaggctgaatgtaaaatcccttatgttgtatcaatgggggtaaaaactatttttatttgcctatgatatacttggtttctaataaagtgccctaggctctagtgagaactgtctactttgaattgccatttactccctttcctcctttggccgatatgctcttggctagctttttataagttaatgtgtttccccaaaaagtttcactactttatattcatttgagtgtgatccttgtctggatgtctagaactgttggaagattttgacgtcttaagccctaggttttgctttgggaaataaggtttgaaatattgttcattgcattaagatttgtgtgtgtgtgctttgtaagcccagaaccaggttttggaaaatgcctgtactgtgaaagcaaattaggactctttctgagcctctttcattgtcagaaatagaatcactttccatcagcttccaggaaattgtgtatctggagtcgaagagatttaacatcaagaatccagatttttaaatgtaattgttttttaaatgctaatgtttgtaaagcaccttcagttcttcggatgaaaggtgctatattccctcagtgtaaattaataaaaagattacaggaagtttgtcaaaaaattcaatgcatagtctgtagtatgtcctgacaagaagttagcattttatataagaaattaaaaaatgcttattcctcca

SEQ ID NO: 304317 - DNA, 1978 bp, Homo sapiens
tgcagtcggggttcagccagagggggcgccgggcgtaccgacgtagcggggagaaacgggtcgcgctttaacggcgctgcgcaggcgccactcacgggccggacgtgacgcagggaaagttccggcttcggcctccgccgctgccgccgccgctgctacagccgccgccgccgctgttgccgcggcttgttattcttaaaatggcgccgctagacctggacaagtatgtggaaatagcgcggctgtgcaagtacctgccagagaacgacctgaagcggctatgtgactacgtttgtgacctcctcttagaagagtcaaatgttcagccagtatcaacaccagtaacagtgtgtggagatatccatggacagttttatgacctttgtgaactgttcagaactggaggtcaggttcctgacacaaactacatatttatgggtgattttgtagacagaggttactatagtttggagaccttcacttaccttcttgcattaaaggctaaatggcctgatcgtattacacttttgcgaggaaatcatgagagtagacagataacacaggtctatggattttatgatgagtgccaaaccaaatatggaaatgctaatgcctggagatactgtaccaaagtttttgacatgctcacagtagcagctttaatagatgagcagattttgtgtgtccatggtggtttatctcctgatatcaaaacactggatcaaattcgaaccatcgaacggaatcaggaaattcctcataaaggagcattttgtgatctggtttggtcagatcctgaagatgtggatacctgggctatcagtccccgaggagcaggttggctttttggagcaaaggtcacaaatgagtttgttcatatcaacaacttaaaactcatctgcagagcacatcaactagtgcacgaaggctataaatttatgtttgatgagaagctggtgacagtatggtctgctcctaattactgctatcgttgtggaaatattgcttcgatcatggtcttcaaagatgtaaatacaagagaaccaaagttattccgggcagttccagattcagaacgtgttattcctcccagaacgacaacgccatatttcctttgaggccttcgcccatcctgctgacccatttttctgccctcttcttaccccaattttcttgtattaccctctacaatatactttttattgagcactttgctgctgaaatgctgcctcttgcctttttttttttaaattttaaattatctaaatttattgtttgttgtggtgtctatagcaaagtttttctatcaattttcccccatcccatccccaccctggactcatttgagaagacttgagaaatgtcttaatactcacactgctgcatgtagctcttgcttatttactggtctgggaaacaggatgtgtttcctttttttaaaagccaattgacagattacacctaaatactcctccttttgtatcattcagccttttgttttagtttggtaagttttaagaaatttcagcagcaaagttgttattcagtgggcacgatggactccaaatgcctcaagttatgtatacctgtcccagatgtaaacttcattgtcctttgttggatgatattttaaatggatataaaataaattggtctaaagggcaaaaaaaaaaaaaaaaaaaaaaaaaaaaaaaaaaaaaaaaaaaaaaaagaagagaaaaaagggagagagaagtaatatatgagatgtagataataaactagaagatgaaaaaacaaatgtgataaagactggctaaaaagaaagaaagaaatataatagaaaagaggaatgacagcacattaaatgctaacaatctagattggaatataggaaagatagatagagaatagactaagtaagaaaaaaaaacatatatgataagaaatgtaaagttatgagaagattagataaagaatataataatattaagattaa

SEQ ID NO: 304318 - DNA, 2954 bp, Homo sapiens
tgcagtcggggttcagccagagggggcgccgggcgtaccgacgtagcggggagaaacgggtcgcgctttaacggcgctgcgcaggcgccactcacgggccggacgtgacgcagggaaagttccggcttcggcctccgccgctgccgccgccgctgctacagccgccgccgccgctgttgccgcggcttgttattcttaaaatggcgccgctagacctggacaagtatgtggaaatagcgcggctgtgcaagtacctgccagagaacgacctgaagcggctatgtgactacgtttgtgacctcctcttagaagagtcaaatgttcagccagtatcaacaccagtaacagtgtgtggagatatccatggacagttttatgacctttgtgaactgttcagaactggaggtcaggttcctgacacaaactacatatttatgggtgattttgtagacagaggttactatagtttggagaccttcacttaccttcttgcattaaaggctaaatggcctgatcgtattacacttttgcgaggaaatcatgagagtagacagataacacaggtctatggattttatgatgagtgccaaaccaaatatggaaatgctaatgcctggagatactgtaccaaagtttttgacatgctcacagtagcagctttaatagatgagcagattttgtgtgtccatggtggtttatctcctgatatcaaaacactggatcaaattcgaaccatcgaacggaatcaggaaattcctcataaaggagcattttgtgatctggtttggtcagatcctgaagatgtggatacctgggctatcagtccccgaggagcaggttggctttttggagcaaaggtcacaaatgagtttgttcatatcaacaacttaaaactcatctgcagagcacatcaactagtgcacgaaggctataaatttatgtttgatgagaagctggtgacagtatggtctgctcctaattactgctatcgttgtggaaatattgcttcgatcatggtcttcaaagatgtaaatacaagagaaccaaagttattccgggcagttccagattcagaacgtgttattcctcccagaacgacaacgccatatttcctttgaggccttcgcccatcctgctgacccatttttctgccctcttcttaccccaattttcttgtattaccctctacaatatactttttattgagcactttgctgctgaaatgctgcctcttgcctttttttttttaaattttaaattatctaaatttattgtttgttgtggtgtctatagcaaagtttttctatcaattttcccccatcccatccccaccctggactcatttgagaagacttgagaaatgtcttaatactcacactgctgcatgtagctcttgcttatttactggtctgggaaacaggatgtgtttcctttttttaaaagccaattgacagattacacctaaatactcctccttttgtatcattcagccttttgttttagtttggtaagttttaagaaatttcagcagcaaagttgttattcagtgggcacgatggactccaaatgcctcaagttatgtatacctgtcccagatgtaaacttcattgtcctttgttggatgatattttaaatggatataaaataaattggtctaaagggctgccctccttgttgtgtttttaaattttagttaaaaactgctacagcttatgactttgtactttaagataattgtattgatcttttttcagattccttgtattttttaataaagtaatcttaaataaaactcagataggttaagtgttagaaattttaaacagcttacattgttagcgtaaagttatcttttcttttttcctaatcagagttcttgaccctttggttattgagtttaaaacttcaattgaaattcaatagtatttattttttaaaaaaatcactaaactgtgcctaaagaacataactgccatattaatgttttggtttatatcctctatagtaatagaaaaacatttaatacttgtaatgctgatgtgttaatttgataccagttgagtagaatgtgatcaatccagtttacaatctatcatgagtattattaactaaaatctatgtgcttttcaataggaatcattcttctcttgctgtaacacttgaccttaacttttagaaagtgttcatttttaaactgcaactggaaaggttgaaaagttaggactcttgtatttgtgaactgtaatctgaagcagattatttaaagtgtagaaaaagaaacaagttcttcttttttgcaaaggtctgtgataccatatttcagctttgtgtaagtaatttgaatatccaaagggttgtgatgatcagttctgaatatgcaactgtccacttaataaggacaagtattccagtatctcttatgactgtagtcataaatgatgttggaatgtacattttgtgaaatagttggtatccctttactatgattaatttttgttattccaggaaatacttgtgaagccagccaattaataaagcactttagcatctgttcaggtagttttgaaaacccacttttccccttcaggataagaacttccaggttacctaaaaatgcaataaaaatctttatagtctaaaaaaaaaaaaaaaaaaaaaaaaaaaaaaaaaaaaaaaaaaaaaaaaaagaagagaaaaaagggagagagaagtaatatatgagatgtagataataaactagaagatgaaaaaacaaatgtgataaagactggctaaaaagaaagaaagaaatataatagaaaagaggaatgacagcacattaaatgctaacaatctagattggaatataggaaagatagatagagaatagactaagtaagaaaaaaaaacatatatgataagaaatgtaaagttatgagaagattagataaagaatataataatattaagattaa

SEQ ID NO: 304319 - DNA, 1602 bp, Homo sapiens
  misc_feature (1532)..(1532): n is a, c, g, or t
  misc_feature (1540)..(1540): n is a, c, g, or t
tgcagtcggggttcagccagagggggcgccgggcgtaccgacgtagcggggagaaacgggtcgcgctttaacggcgctgcgcaggcgccactcacgggccggacgtgacgcagggaaagttccggcttcggcctccgccgctgccgccgccgctgctacagccgccgccgccgctgttgccgcggcttgttattcttaaaatggcgccgctagacctggacaagtatgtggaaatagcgcggctgtgcaagtacctgccagagaacgacctgaagcggctatgtgactacgtttgtgacctcctcttagaagagtcaaatgttcagccagtatcaacaccagtaacagtgtgtggagatatccatggacagttttatgacctttgtgaactgttcagaactggaggtcaggttcctgacacaaactacatatttatgggtgattttgtagacagaggttactatagtttggagaccttcacttaccttcttgcattaaaggctaaatggcctgatcgtattacacttttgcgaggaaatcatgagagtagacagataacacaggtctatggattttatgatgagtgccaaaccaaatatggaaatgctaatgcctggagatactgtaccaaagtttttgacatgctcacagtagcagctttaatagatgagcagattttgtgtgtccatggtggtttatctcctgatatcaaaacactggatcaaattcgaaccatcgaacggaatcaggaaattcctcataaaggagcattttgtgatctggtttggtcagatcctgaagatgtggatacctgggctatcagtccccgaggagcaggttggctttttggagcaaaggtcacaaatgagtttgttcatatcaacaacttaaaactcatctgcagagcacatcaactagtgcacgaaggctataaatttatgtttgatgagaagctggtgacagtatggtctgctcctaattactgctatcgttgtggaaatattgcttcgatcatggtcttcaaagatgtaaatacaagagaaccaaagttattccgggcagttccagattcagaacgtgttattcctcccagaacgacaacgccatatttcctttgaggccttcgcccatcctgctgacccatttttctgccctcttcttaccccaattttcttgtattaccctctacaatatactttttattgagcactttgctgctgaaatgctgcctcttgcctttttttttttaaattttaaattatctaaatttattgtttgttgtggtgtctatagcaaagtttttctatcaattttcccccatcccatccccaccctggactcatttgagaagacttgagaaatgtcttaatactcacactgctgcatgtagctcttgcttatttactggtctgggaaacaggatgtgtttcctttttttaaaagccaattgacagattacacctaaatactcctccttttgtatcattcagccttttgttttagtttttggggtaaagttttttaaagaaaanttttcaangcaagccaaaaagtttgtttaatttccagttgggggcaccgaatgggaactccccaaaattg

SEQ ID NO: 304320 - DNA, 4108 bp, Homo sapiens
gctcagaccatgcttttgccgcgcgtggtcattctgtaaatgaccctgctcatacctggtcacctatgtgatcctggtcctgattagtgcttgcctgctacaacagatgaaacctggaagcccggggtatgtacactgagctgttcgtgaccctcacatcctaaataggagtccatgtagtgtcatgtcacatgatctcctcatccaagtaggcagtccgtgtgcgagcatcttcctatcggaacatttactgcctcgcccttttatgacctttgtgaactgttcagaactggaggtcaggttcctgacacaaactacatatttatgggtgattttgtagacagaggttactatagtttggagaccttcacttaccttcttgcattaaaggctaaatggcctgatcgtattacacttttgcgaggaaatcatgagagtagacagataacacaggtctatggattttatgatgagtgccaaaccaaatatggaaatgctaatgcctggagatactgtaccaaagtttttgacatgctcacagtagcagctttaatagatgagcagattttgtgtgtccatggtggtttatctcctgatatcaaaacactggatcaaattcgaaccatcgaacggaatcaggaaattcctcataaaggagcattttgtgatctggtttggtcagatcctgaagatgtggatacctgggctatcagtccccgaggagcaggttggctttttggagcaaaggtcacaaatgagtttgttcatatcaacaacttaaaactcatctgcagagcacatcaactagtgcacgaaggctataaatttatgtttgatgagaagctggtgacagtatggtctgctcctaattactgctatcgttgtggaaatattgcttcgatcatggtcttcaaagatgtaaatacaagagaaccaaagttattccgggcagttccagattcagaacgtgttattcctcccagaacgacaacgccatatttcctttgaggccttcgcccatcctgctgacccatttttctgccctcttcttaccccaattttcttgtattaccctctacaatatactttttattgagcactttgctgctgaaatgctgcctcttgcctttttttttttaaattttaaattatctaaatttattgtttgttgtggtgtctatagcaaagtttttctatcaattttcccccatcccatccccaccctggactcatttgagaagacttgagaaatgtcttaatactcacactgctgcatgtagctcttgcttatttactggtctgggaaacaggatgtgtttcctttttttaaaagccaattgacagattacacctaaatactcctccttttgtatcattcagccttttgttttagtttggtaagttttaagaaatttcagcagcaaagttgttattcagtgggcacgatggactccaaatgcctcaagttatgtatacctgtcccagatgtaaacttcattgtcctttgttggatgatattttaaatggatataaaataaattggtctaaagggctgccctccttgttgtgtttttaaattttagttaaaaactgctacagcttatgactttgtactttaagataattgtattgatcttttttcagattccttgtattttttaataaagtaatcttaaataaaactcagataggttaagtgttagaaattttaaacagcttacattgttagcgtaaagttatcttttcttttttcctaatcagagttcttgaccctttggttattgagtttaaaacttcaattgaaattcaatagtatttattttttaaaaaaatcactaaactgtgcctaaagaacataactgccatattaatgttttggtttatatcctctatagtaatagaaaaacatttaatacttgtaatgctgatgtgttaatttgataccagttgagtagaatgtgatcaatccagtttacaatctatcatgagtattattaactaaaatctatgtgcttttcaataggaatcattcttctcttgctgtaacacttgaccttaacttttagaaagtgttcatttttaaactgcaactggaaaggttgaaaagttaggactcttgtatttgtgaactgtaatctgaagcagattatttaaagtgtagaaaaagaaacaagttcttcttttttgcaaaggtctgtgataccatatttcagctttgtgtaagtaatttgaatatccaaagggttgtgatgatcagttctgaatatgcaactgtccacttaataaggacaagtattccagtatctcttatgactgtagtcataaatgatgttggaatgtacattttgtgaaatagttggtatccctttactatgattaatttttgttattccaggaaatacttgtgaagccagccaattaataaagcactttagcatctgttcaggtagttttgaaaacccacttttccccttcaggataagaacttccaggttacctaaaaatgcaataaaaatctttatagtctaagcttcttggcatataatttttcatcagggttttcttttattaattgagcacaatactgttttgatttaatttttttccctcaaaccacccagctccttacatagtttttaattatatagctatatgaaagaggtggctaagacatttgctgcacacacttgaactaatgttgggtcagtagcttcgtgttactgccctgatcccagtgtaattcaggtggaaaggtatttttatctcacagggatatgtagctatgtattttactaattgtgaaacactggaaattaatgatgcagacaacttggtgtggtctttgaacagctctctgcagtatttttttttttcctgttaccataaattgtatttaagtgcttgctttccacttaagttgtactaatagaaccggtaactcccagccctccctgtttgacactccttagcttagattgatgtagttgtttttgttatccctataatgtgacttttatttttaagtcattgtgtactgcatttgtttgtcactagttgggcacgtgccaataatattctctccattccttatctgccatctctgttttgcctgatttctcttcaactgaataatggctttttgcatggaaaaaatagtttttactattagacgtgtaaagggaagagagagctaatgtattggactttgtgagcctacaaggaatattttggatccctccaataaataagggctatgtactatatgtactatatagagttatcatgtggtggaagatacttgcaagtcatagatttatgggcaggaggatttgttactccctatatctaggctgaatgtaaaatcccttatgttgtatcaatgggggtaaaaactatttttatttgcctatgatatacttggtttctaataaagtgccctaggctctagtgagaactgtctactttgaattgccatttactccctttcctcctttggccgatatgctcttggctagctttttataagttaatgtgtttccccaaaaagtttcactactttatattcatttgagtgtgatcctaaaacacctggatcaacagtacatctcatatgcaatctgcatcagctcctattctgtctggatgtctagaactgttggaagattttgacgtcttaagccctaggttttgctttgggaaataaggtttgaaatattgttcattgcattaagatttgtgtgtgtgtgctttgtaagcccagaaccaggttttggaaaatgcctgtactgtgaaagcaaattaggactctttctgagcctctttcattgtcagaaatagaatcactttccatcagcttccaggaaattgtgtatctggagtcgaagagatttaacatcaagaatccagatttttaaatgtaattgttttttaaatgctaatgtttgtaaagcaccttcagttcttcggatgaaaggtgctatattccctcagtgtaaattaataaaaagattacaggaagtttgtcaaaaaattcaatgcatagtctgtagtatgtcctgacaagaagttagcattttatataagaaattaaaaaatgcttattcctcca

SEQ ID NO: 304321 - DNA, 4010 bp, Homo sapiens
tgcagtcggggttcagccagagggggcgccgggcgtaccgacgtagcggggagaaacgggtcgcgctttaacggcgctgcgcaggcgccactcacgggccggacgtgacgcagggaaagttccggcttcggcctccgccgctgccgccgccgctgctacagccgccgccgccgctgttgccgcggcttgttattcttaaaatggcgccgctagacctggacaagtatgtggaaatagcgcggctgtgcaagtacctgccagagaacgacctgaagcggctatgtgactacgtttgtgacctcctcttagaagagtcaaatgttcagccagtatcaacaccagtaacagtgtgtggagatatccatggacagatgagtgccaaaccaaatatggaaatgctaatgcctggagatactgtaccaaagtttttgacatgctcacagtagcagctttaatagatgagcagattttgtgtgtccatggtggtttatctcctgatatcaaaacactggatcaaattcgaaccatcgaacggaatcaggaaattcctcataaaggagcattttgtgatctggtttggtcagatcctgaagatgtggatacctgggctatcagtccccgaggagcaggttggctttttggagcaaaggtcacaaatgagtttgttcatatcaacaacttaaaactcatctgcagagcacatcaactagtgcacgaaggctataaatttatgtttgatgagaagctggtgacagtatggtctgctcctaattactgctatcgttgtggaaatattgcttcgatcatggtcttcaaagatgtaaatacaagagaaccaaagttattccgggcagttccagattcagaacgtgttattcctcccagaacgacaacgccatatttcctttgaggccttcgcccatcctgctgacccatttttctgccctcttcttaccccaattttcttgtattaccctctacaatatactttttattgagcactttgctgctgaaatgctgcctcttgcctttttttttttaaattttaaattatctaaatttattgtttgttgtggtgtctatagcaaagtttttctatcaattttcccccatcccatccccaccctggactcatttgagaagacttgagaaatgtcttaatactcacactgctgcatgtagctcttgcttatttactggtctgggaaacaggatgtgtttcctttttttaaaagccaattgacagattacacctaaatactcctccttttgtatcattcagccttttgttttagtttggtaagttttaagaaatttcagcagcaaagttgttattcagtgggcacgatggactccaaatgcctcaagttatgtatacctgtcccagatgtaaacttcattgtcctttgttggatgatattttaaatggatataaaataaattggtctaaagggctgccctccttgttgtgtttttaaattttagttaaaaactgctacagcttatgactttgtactttaagataattgtattgatcttttttcagattccttgtattttttaataaagtaatcttaaataaaactcagataggttaagtgttagaaattttaaacagcttacattgttagcgtaaagttatcttttcttttttcctaatcagagttcttgaccctttggttattgagtttaaaacttcaattgaaattcaatagtatttattttttaaaaaaatcactaaactgtgcctaaagaacataactgccatattaatgttttggtttatatcctctatagtaatagaaaaacatttaatacttgtaatgctgatgtgttaatttgataccagttgagtagaatgtgatcaatccagtttacaatctatcatgagtattattaactaaaatctatgtgcttttcaataggaatcattcttctcttgctgtaacacttgaccttaacttttagaaagtgttcatttttaaactgcaactggaaaggttgaaaagttaggactcttgtatttgtgaactgtaatctgaagcagattatttaaagtgtagaaaaagaaacaagttcttcttttttgcaaaggtctgtgataccatatttcagctttgtgtaagtaatttgaatatccaaagggttgtgatgatcagttctgaatatgcaactgtccacttaataaggacaagtattccagtatctcttatgactgtagtcataaatgatgttggaatgtacattttgtgaaatagttggtatccctttactatgattaatttttgttattccaggaaatacttgtgaagccagccaattaataaagcactttagcatctgttcaggtagttttgaaaacccacttttccccttcaggataagaacttccaggttacctaaaaatgcaataaaaatctttatagtctaagcttcttggcatataatttttcatcagggttttcttttattaattgagcacaatactgttttgatttaatttttttccctcaaaccacccagctccttacatagtttttaattatatagctatatgaaagaggtggctaagacatttgctgcacacacttgaactaatgttgggtcagtagcttcgtgttactgccctgatcccagtgtaattcaggtggaaaggtatttttatctcacagggatatgtagctatgtattttactaattgtgaaacactggaaattaatgatgcagacaacttggtgtggtctttgaacagctctctgcagtatttttttttttcctgttaccataaattgtatttaagtgcttgctttccacttaagttgtactaatagaaccggtaactcccagccctccctgtttgacactccttagcttagattgatgtagttgtttttgttatccctataatgtgacttttatttttaagtcattgtgtactgcatttgtttgtcactagttgggcacgtgccaataatattctctccattccttatctgccatctctgttttgcctgatttctcttcaactgaataatggctttttgcatggaaaaaatagtttttactattagacgtgtaaagggaagagagagctaatgtattggactttgtgagcctacaaggaatattttggatccctccaataaataagggctatgtactatatgtactatatagagttatcatgtggtggaagatacttgcaagtcatagatttatgggcaggaggatttgttactccctatatctaggctgaatgtaaaatcccttatgttgtatcaatgggggtaaaaactatttttatttgcctatgatatacttggtttctaataaagtgccctaggctctagtgagaactgtctactttgaattgccatttactccctttcctcctttggccgatatgctcttggctagctttttataagttaatgtgtttccccaaaaagtttcactactttatattcatttgagtgtgatcctaaaacacctggatcaacagtacatctcatatgcaatctgcatcagctcctattctgtctggatgtctagaactgttggaagattttgacgtcttaagccctaggttttgctttgggaaataaggtttgaaatattgttcattgcattaagatttgtgtgtgtgtgctttgtaagcccagaaccaggttttggaaaatgcctgtactgtgaaagcaaattaggactctttctgagcctctttcattgtcagaaatagaatcactttccatcagcttccaggaaattgtgtatctggagtcgaagagatttaacatcaagaatccagatttttaaatgtaattgttttttaaatgctaatgtttgtaaagcaccttcagttcttcggatgaaaggtgctatattccctcagtgtaaattaataaaaagattacaggaagtttgtcaaaaaattcaatgcatagtctgtagtatgtcctgacaagaagttagcattttatataagaaattaaaaaatgcttattcctcca

SEQ ID NO: 304322 - DNA, 1432 bp, Homo sapiens
tgcagtcggggttcagccagagggggcgccgggcgtaccgacgtagcggggagaaacgggtcgcgctttaacggcgctgcgcaggcgccactcacgggccggacgtgacgcagggaaagttccggcttcggcctccgccgctgccgccgccgctgctacagccgccgccgccgctgttgccgcggcttgttattcttaaaatggcgccgctagacctggacaagtatgtggaaatagcgcggctgtgcaagtacctgccagagaacgacctgaagcggctatgtgactacgtttgtgacctcctcttagaagagtcaaatgttcagccagtatcaacaccagtaacagtgtgtggagatatccatggacagttttatgacctttgtgaactgttcagaactggaggtcaggttcctgacacaaactacatatttatgggtgattttgtagacagaggttactatagtttggagaccttcacttaccttcttgcattaaaggctaaatggcctgatcgtattacacttttgcgaggaaatcatgagagtagacagataacacaggtctatggattttatgatgagtgccaaaccaaatatggaaatgctaatgcctggagatactgtaccaaagtttttgacatgctcacagtagcagctttaatagatgagcagattttgtgtgtccatggtggtttatctcctgatatcaaaacactggatcaaattcgaaccatcgaacggaatcaggaaattcctcataaaggagcattttgtgatctggtttggtcagatcctgaagatgtggatacctgggctatcagtccccgaggagcaggttggctttttggagcaaaggtcacaaatgagtttgttcatatcaacaacttaaaactcatctgcagagcacatcaactagtgcacgaaggctataaatttatgtttgatgagaagctggtgacagtatggtctgctcctaattactgctatcgttgtggaaatattgcttcgatcatggtcttcaaagatgtaaatacaagagaaccaaagttattccgggcagttccagattcagaacgtgttattcctcccagaacgacaacgccatatttcctttgaggccttcgcccatcctgctgacccatttttctgccctcttcttaccccaattttcttgtattaccctctacaatatactttttattgagcactttgctgctgaaatgctgctctgcttttgttaaatttcactatctaatttcgtgtgggggcttgccaagttacaatatccccaacccccccgggcttggaggctcgaggttacccaggggggccggataagggcgaacaagggttaagacggaaagcaacttgtacacgggggaaaagcagttggggacgtatcccatgggttaaagagcgggcttggacca

SEQ ID NO: 304323 - DNA, 3414 bp, Homo sapiens
aaatgattatgtaggccgattgttttttaagtgctaagtacttacagtgcctttctaaattgcagtttgttcatatcaacaacttaaaactcatctgcagagcacatcaactagtgcacgaaggctataaatttatgtttgatgagaagctggtgacagtatggtctgctcctaattactgctatcgttgtggaaatattgcttcgatcatggtcttcaaagatgtaaatacaagagaaccaaagttattccgggcagttccagattcagaacgtgttattcctcccagaacgacaacgccatatttcctttgaggccttcgcccatcctgctgacccatttttctgccctcttcttaccccaattttcttgtattaccctctacaatatactttttattgagcactttgctgctgaaatgctgcctcttgcctttttttttttaaattttaaattatctaaatttattgtttgttgtggtgtctatagcaaagtttttctatcaattttcccccatcccatccccaccctggactcatttgagaagacttgagaaatgtcttaatactcacactgctgcatgtagctcttgcttatttactggtctgggaaacaggatgtgtttcctttttttaaaagccaattgacagattacacctaaatactcctccttttgtatcattcagccttttgttttagtttggtaagttttaagaaatttcagcagcaaagttgttattcagtgggcacgatggactccaaatgcctcaagttatgtatacctgtcccagatgtaaacttcattgtcctttgttggatgatattttaaatggatataaaataaattggtctaaagggctgccctccttgttgtgtttttaaattttagttaaaaactgctacagcttatgactttgtactttaagataattgtattgatcttttttcagattccttgtattttttaataaagtaatcttaaataaaactcagataggttaagtgttagaaattttaaacagcttacattgttagcgtaaagttatcttttcttttttcctaatcagagttcttgaccctttggttattgagtttaaaacttcaattgaaattcaatagtatttattttttaaaaaaatcactaaactgtgcctaaagaacataactgccatattaatgttttggtttatatcctctatagtaatagaaaaacatttaatacttgtaatgctgatgtgttaatttgataccagttgagtagaatgtgatcaatccagtttacaatctatcatgagtattattaactaaaatctatgtgcttttcaataggaatcattcttctcttgctgtaacacttgaccttaacttttagaaagtgttcatttttaaactgcaactggaaaggttgaaaagttaggactcttgtatttgtgaactgtaatctgaagcagattatttaaagtgtagaaaaagaaacaagttcttcttttttgcaaaggtctgtgataccatatttcagctttgtgtaagtaatttgaatatccaaagggttgtgatgatcagttctgaatatgcaactgtccacttaataaggacaagtattccagtatctcttatgactgtagtcataaatgatgttggaatgtacattttgtgaaatagttggtatccctttactatgattaatttttgttattccaggaaatacttgtgaagccagccaattaataaagcactttagcatctgttcaggtagttttgaaaacccacttttccccttcaggataagaacttccaggttacctaaaaatgcaataaaaatctttatagtctaagcttcttggcatataatttttcatcagggttttcttttattaattgagcacaatactgttttgatttaatttttttccctcaaaccacccagctccttacatagtttttaattatatagctatatgaaagaggtggctaagacatttgctgcacacacttgaactaatgttgggtcagtagcttcgtgttactgccctgatcccagtgtaattcaggtggaaaggtatttttatctcacagggatatgtagctatgtattttactaattgtgaaacactggaaattaatgatgcagacaacttggtgtggtctttgaacagctctctgcagtatttttttttttcctgttaccataaattgtatttaagtgcttgctttccacttaagttgtactaatagaaccggtaactcccagccctccctgtttgacactccttagcttagattgatgtagttgtttttgttatccctataatgtgacttttatttttaagtcattgtgtactgcatttgtttgtcactagttgggcacgtgccaataatattctctccattccttatctgccatctctgttttgcctgatttctcttcaactgaataatggctttttgcatggaaaaaatagtttttactattagacgtgtaaagggaagagagagctaatgtattggactttgtgagcctacaaggaatattttggatccctccaataaataagggctatgtactatatgtactatatagagttatcatgtggtggaagatacttgcaagtcatagatttatgggcaggaggatttgttactccctatatctaggctgaatgtaaaatcccttatgttgtatcaatgggggtaaaaactatttttatttgcctatgatatacttggtttctaataaagtgccctaggctctagtgagaactgtctactttgaattgccatttactccctttcctcctttggccgatatgctcttggctagctttttataagttaatgtgtttccccaaaaagtttcactactttatattcatttgagtgtgatcctaaaacacctggatcaacagtacatctcatatgcaatctgcatcagctcctattctgtctggatgtctagaactgttggaagattttgacgtcttaagccctaggttttgctttgggaaataaggtttgaaatattgttcattgcattaagatttgtgtgtgtgtgctttgtaagcccagaaccaggttttggaaaatgcctgtactgtgaaagcaaattaggactctttctgagcctctttcattgtcagaaatagaatcactttccatcagcttccaggaaattgtgtatctggagtcgaagagatttaacatcaagaatccagatttttaaatgtaattgttttttaaatgctaatgtttgtaaagcaccttcagttcttcggatgaaaggtgctatattccctcagtgtaaattaataaaaagattacaggaagtttgtcaaaaaattcaatgcatagtctgtagtatgtcctgacaagaagttagcattttatataagaaattaaaaaatgcttattcctcca

SEQ ID NO: 304324 - DNA, 3606 bp, Homo sapiens
agatgagcatgattacgtgtgttcacggtgttttatcgtccgtgatatcgaatgactgacatcgaaattcgagacttcgaaaggaatctggaaattcttcataaatgagcattccgtcgatcattgtgtctaaggtctagatctctagaatatgttggataccgtgggctaatcagtagctcagtaggaagaaggctgggagttgttgtaggatgcgaacatggtcatcaaggtgaatttggtgcttattgattagaaacttaataagtaatattggagagccaagatctaggttagtcgcgacgtagaggattatcaggatatttatgtttgatgagaagctggtgacagtatggtctgctcctaattactgctatcgttgtggaaatattgcttcgatcatggtcttcaaagatgtaaatacaagagaaccaaagttattccgggcagttccagattcagaacgtgttattcctcccagaacgacaacgccatatttcctttgaggccttcgcccatcctgctgacccatttttctgccctcttcttaccccaattttcttgtattaccctctacaatatactttttattgagcactttgctgctgaaatgctgcctcttgcctttttttttttaaattttaaattatctaaatttattgtttgttgtggtgtctatagcaaagtttttctatcaattttcccccatcccatccccaccctggactcatttgagaagacttgagaaatgtcttaatactcacactgctgcatgtagctcttgcttatttactggtctgggaaacaggatgtgtttcctttttttaaaagccaattgacagattacacctaaatactcctccttttgtatcattcagccttttgttttagtttggtaagttttaagaaatttcagcagcaaagttgttattcagtgggcacgatggactccaaatgcctcaagttatgtatacctgtcccagatgtaaacttcattgtcctttgttggatgatattttaaatggatataaaataaattggtctaaagggctgccctccttgttgtgtttttaaattttagttaaaaactgctacagcttatgactttgtactttaagataattgtattgatcttttttcagattccttgtattttttaataaagtaatcttaaataaaactcagataggttaagtgttagaaattttaaacagcttacattgttagcgtaaagttatcttttcttttttcctaatcagagttcttgaccctttggttattgagtttaaaacttcaattgaaattcaatagtatttattttttaaaaaaatcactaaactgtgcctaaagaacataactgccatattaatgttttggtttatatcctctatagtaatagaaaaacatttaatacttgtaatgctgatgtgttaatttgataccagttgagtagaatgtgatcaatccagtttacaatctatcatgagtattattaactaaaatctatgtgcttttcaataggaatcattcttctcttgctgtaacacttgaccttaacttttagaaagtgttcatttttaaactgcaactggaaaggttgaaaagttaggactcttgtatttgtgaactgtaatctgaagcagattatttaaagtgtagaaaaagaaacaagttcttcttttttgcaaaggtctgtgataccatatttcagctttgtgtaagtaatttgaatatccaaagggttgtgatgatcagttctgaatatgcaactgtccacttaataaggacaagtattccagtatctcttatgactgtagtcataaatgatgttggaatgtacattttgtgaaatagttggtatccctttactatgattaatttttgttattccaggaaatacttgtgaagccagccaattaataaagcactttagcatctgttcaggtagttttgaaaacccacttttccccttcaggataagaacttccaggttacctaaaaatgcaataaaaatctttatagtctaagcttcttggcatataatttttcatcagggttttcttttattaattgagcacaatactgttttgatttaatttttttccctcaaaccacccagctccttacatagtttttaattatatagctatatgaaagaggtggctaagacatttgctgcacacacttgaactaatgttgggtcagtagcttcgtgttactgccctgatcccagtgtaattcaggtggaaaggtatttttatctcacagggatatgtagctatgtattttactaattgtgaaacactggaaattaatgatgcagacaacttggtgtggtctttgaacagctctctgcagtatttttttttttcctgttaccataaattgtatttaagtgcttgctttccacttaagttgtactaatagaaccggtaactcccagccctccctgtttgacactccttagcttagattgatgtagttgtttttgttatccctataatgtgacttttatttttaagtcattgtgtactgcatttgtttgtcactagttgggcacgtgccaataatattctctccattccttatctgccatctctgttttgcctgatttctcttcaactgaataatggctttttgcatggaaaaaatagtttttactattagacgtgtaaagggaagagagagctaatgtattggactttgtgagcctacaaggaatattttggatccctccaataaataagggctatgtactatatgtactatatagagttatcatgtggtggaagatacttgcaagtcatagatttatgggcaggaggatttgttactccctatatctaggctgaatgtaaaatcccttatgttgtatcaatgggggtaaaaactatttttatttgcctatgatatacttggtttctaataaagtgccctaggctctagtgagaactgtctactttgaattgccatttactccctttcctcctttggccgatatgctcttggctagctttttataagttaatgtgtttccccaaaaagtttcactactttatattcatttgagtgtgatcctaaaacacctggatcaacagtacatctcatatgcaatctgcatcagctcctattctgtctggatgtctagaactgttggaagattttgacgtcttaagccctaggttttgctttgggaaataaggtttgaaatattgttcattgcattaagatttgtgtgtgtgtgctttgtaagcccagaaccaggttttggaaaatgcctgtactgtgaaagcaaattaggactctttctgagcctctttcattgtcagaaatagaatcactttccatcagcttccaggaaattgtgtatctggagtcgaagagatttaacatcaagaatccagatttttaaatgtaattgttttttaaatgctaatgtttgtaaagcaccttcagttcttcggatgaaaggtgctatattccctcagtgtaaattaataaaaagattacaggaagtttgtcaaaaaattcaatgcatagtctgtagtatgtcctgacaagaagttagcattttatataagaaattaaaaaatgcttattcctcca

SEQ ID NO: 304325 - DNA, 1057 bp, Homo sapiens
tgcagtcggggttcagccagagggggcgccgggcgtaccgacgtagcggggagaaacgggtcgcgctttaacggcgctgcgcaggcgccactcacgggccggacgtgacgcagggaaagttccggcttcggcctccgccgctgccgccgccgctgctacagccgccgccgccgctgttgccgcggcttgttattcttaaaatggcgccgctagacctggacaagtatgtggaaatagcgcggctgtgcaagtacctgccagagaacgacctgaagcggctatgtgactacgtttgtgacctcctcttagaagagtcaaatgttcagccagtatcaacaccagtaacagtgtgtggagatatccatggacagttttatgacctttgtgaactgttcagaactggaggtcaggttcctgacacaaactacatatttatgggtgattttgtagacagaggttactatagtttggagaccttcacttaccttcttgcattaaaggctaaatggcctgatcgtattacacttttgcgaggaaatcatgagagtagacagataacacaggtctatggattttatgatgagtgccaaaccaaatatggaaatgctaatgcctggagatactgtaccaaagtttttgacatgctcacagtagcagctttaatagatgagcagattttgtgtgtccatggtggtttatctcctgatatcaaaacactggatcaaattcgaaccatcgaacggaatcaggaaattcctcataaaggagcattttgtgatctggtttggtcagatcctgaagatgtggatacctgggctatcagtccccgaggagcaggttggctttttggagcaaaggtcacaaatgaggtaaagccaacatttttggaaatgtaatttgtggattgctaatgggctgcatagagaactatggtggccctagataacaaacttgtagtctagcttactcaaaatatggtggctgtggatattaaatttctagtttagttattaacgtatgtctttctttaatggttaaataagatgacacagtgaaa

SEQ ID NO: 304326 - DNA, 603 bp, Homo sapiens
gcctgggtgacagagtgatactgtctcaaaaaaagaaaaaaaagaaaaaaaaatggtggttttttttttcagggaaagtttttgagagaatggcacagcagattcttgtagatttccctggaatcaaaaatcttgtttgtataaacatttaatagaaaaaatttgtttacgtgtattttatttttttgttaaaatcaaatttccaaataattcagtatgtaactctttattgtagttataaactatatgtttgtacagtttgatataatttgaaaagaatattgtggctattgtattgtttgtaactgtaaacttttacttcacagggtgattttgtagacagaggttactatagtttggagaccttcacttaccttcttgcattaaaggctaaatggcctgatcgtattacacttttgcgaggaaatcatgagagtagacagataacacaggtctatggattttatggtaagaattcctatttctctgattctgaatattattttactttcctctttggaaaacaaagctacacaagtcatacacatgctttatgtatattattttccccacatcctcactccttcactcctcccaaacaat

SEQ ID NO: 304327 - DNA, 1250 bp, Homo sapiens
ggcacgaggctttgtggtttggtctcagggaagtagcaggcgccggttgagagaactacggccctgtcggaagacttacctcaacacttcactccatggcagttcccgagacccgccctaaccacactatttatatcaacaacctcaatgagaagatcaagaaggatgagctaaaaaagtccctgtacgccatcttctcccagtttggccagatcctggatatcctggtatcacggagcctgaagatgaggggccaggcctttgtcatcttcaaggaggtcagcagcgccaccaacgccctgcgctccatgcagggtttccctttctatgacaaacctatgcgtatccagtatgccaagaccgactcagatatcattgccaagatgaaaggcaccttcgtggagcgggaccgcaagcgggagaagaggaagcccaagagccaggagaccccggccaccaagaaggctgtgcaaggcgggggagccacccccgtggtgggggctgtccaggggcctgtcccgggcatgccgccgatgactcaggcgccccgcattatgcaccacatgccgggccagccgccctacatgccgccccctggtatgatccccccgccaggccttgcacctggccagatcccaccaggggccatgcccccgcagcagcttatgccaggacagatgccccctgcccagcctctttctgagaatccaccgaatcacatcttgttcctcaccaacctgccagaggagaccaacgagctcatgctgtccatgcttttcaatcagttccctggcttcaaggaggtccgtctggtacccgggcggcatgacatcgccttcgtggagtttgacaatgaggtacaggcaggggcagctcgcgatgccctgcagggctttaagatcacgcagaacaacgccatgaagatctcctttgccaagaagtagcaccttttccccccatgcctgccccttcccctgttctggggccacccctttcccccttggctcagccccctgaaggtaagtccccccttgggggccttcttggagccgtgtgtgagtgagtggtcgccacacagcattgtacccagagtctgtccccagacattgcacctggcgctgttaggccggaattaaagtggctttttgaggtttggtttttcacaaaaaaaaaaaaatataaaacaataaaaaaaagaacacaagaacacaaaaaaaaactcggggacaaaaataagggcggggaacaaa

SEQ ID NO: 304328 - DNA, 1615 bp, Homo sapiens
ggcacgaggctttgtggtttggtctcagggaagtagcaggcgccggttgagagaactacggccctgtcggaaggtaacctccggtgcaaacgaccatcggcggcaggcgagcggtacgcttggcgtccgggccttcctgggcccgtctgaggaaacttgctgctcgaggccaggctgcctaggacctgtcccttttttctatactggctcccacatccgggttttttctccgggacggcccttcggatgcttgggccaatgggaatcgccatttagggtgctccgcccaccgggtcgcgtagagcatcctggaagtcgtagtaaatctctcgagagttctctccgcacgcgggctggagaagcgggtcctacgcacgctttgttgtcgcgctttgcctccgtccttccccctactcccgccttacctgacttccttttcggaggaagatccttgagcagccgacgttgggacaaaggatttggagaaacccagggctaaagtcacgtttttcctcctttaagacttacctcaacacttcactccatggcagttcccgagacccgccctaaccacactatttatatcaacaacctcaatgagaagatcaagaaggatgagctaaaaaagtccctgtacgccatcttctcccagtttggccagatcctggatatcctggtatcacggagcctgaagatgaggggccaggcctttgtcatcttcaaggaggtcagcagcgccaccaacgccctgcgctccatgcagggtttccctttctatgacaaacctatgcgtatccagtatgccaagaccgactcagatatcattgccaagatgaaaggcaccttcgtggagcgggaccgcaagcgggagaagaggaagcccaagagccaggagaccccggccaccaagaaggctgtgcaaggcgggggagccacccccgtggtgggggctgtccaggggcctgtcccgggcatgccgccgatgactcaggcgccccgcattatgcaccacatgccgggccagccgccctacatgccgccccctggtatgatccccccgccaggccttgcacctggccagatcccaccaggggccatgcccccgcagcagcttatgccaggacagatgccccctgcccagcctctttctgagaatccaccgaatcacatcttgttcctcaccaacctgccagaggagaccaacgagctcatgctgtccatgcttttcaatcagttccctggcttcaaggaggtccgtctggtacccgggcggcatgacatcgccttcgtggagtttgacaatgaggtacaggcaggggcagctcgcgatgccctgcagggctttaagatcacgcagaacaacgccatgaagatctcctttgccaagaagtagcaccttttccccccatgcctgccccttcccctgttctggggccacccctttcccccttggctcagccccctgaaggtaagtccccccttgggggccttcttggagccgtgtgtgagtgagtggtcgccacacagcattgtacccagagtctgtccccagacattgcacctggcgctgttaggccggaattaaagtggctttttgaggtttggtttttcacaa

SEQ ID NO: 304329 - DNA, 980 bp, Homo sapiens
  misc_feature (949)..(949): n is a, c, g, or t
  misc_feature (954)..(954): n is a, c, g, or t
aatatagggctaggtacgaggctgggtgtcgccctactcccgccttacctgacttccttttcggaggaagatccttgagcagccgacgttgggacaaaggatttggagaaacccagggctaaagtcacgtttttcctcctttaagacttacctcaacacttcactccatggcagttcccgagacccgccctaaccacactatttatatcaacaacctcaatgagaagatcaagaaggatgagctaaaaaagtccctgtacgccatcttctcccagtttggccagatcctggatatcctggtatcacggagcctgaagatgaggggccaggcctttgtcatcttcaaggaggtcagcagcgccaccaacgccctgcgctccatgcagggtttccctttctatgacaaacctatgcgtatccagtatgccaagaccgactcagatatcattgccaagatgaaaggcaccttcgtggagcgggaccgcaagcgggagaagaggaagcccaagagccaggagaccccggccaccaagaaggctgtgcaaggcgggggagccacccccgtggtgggggctgtccaggggcctgtcccgggcatgccgccgatgactcaggcgccccgcattatgcaccacatgccgggccagccgccctacatgccgccccctggtatgatccccccgccaggccttgcacctggccagatcccaccaggggccatgcccccgcagcagcttatgccaggacagatgccccctgcccagcctctttctgagaatccaccgaatcacatcttgttcctcaccaacctgccagaggagaccaacgagctcatgctgtccatgcttttcaatcagttccctggcttcaaggaggtccgtctggtacccgggcggcatgacatcgccttcgtggagtttgacaatgaggtacaggcaggggcagcggnagccngaggttagatagcaaaaggaaatctg

SEQ ID NO: 304330 - DNA, 1368 bp, Homo sapiens
ggcacgaggctttgtggtttggtctcagggaagtagcaggcgccggttgagagaactacggccctgtcggaaggtaacctccggtgcaaacgaccatcggcggcaggcgagcggtacgcttggcgtccgggccttcctgggcccgtctgaggaaacttgctgctcgaggccaggctgcctaggacctgtcccttttttctatactggctcccacatccgggttttttctccgggacggcccttcggatgcttgggccaatgggaatcgccatttagggtgctccgcccaccgggtcgcgtagagcatcctggaagtcgtagtaaatctctcgagagttctctccgcacgcgggctggagaagcgggtcctacgcacgctttgttgtcgcgctttgcctccgtccttccccctactcccgccttacctgacttccttttcggaggaagatccttgagcagccgacgttgggacaaaggatttggagaaacccagggctaaagtcacgtttttcctcctttaagacttacctcaacacttcactccatggcagttcccgagacccgccctaaccacactatttatatcaacaacctcaatgagaagatcaagaaggatgagctaaaaaagtccctgtacgccatcttctcccagtttggccagatcctggatatcctggtatcacggagcctgaagatgaggggccaggcctttgtcatcttcaaggaggtcagcagcgccaccaacgccctgcgctccatgcagggtttccctttctatgacaaacctatgcgtatccagtatgccaagaccgactcagatatcattgccaagatgaaaggcaccttcgtggagcgggaccgcaagcgggagaagaggaagcccaagagccaggagaccccggccaccaagaaggctgtgcaaggcgggggagccacccccgtggtgggggctgtccaggggcctgtcccggtaagccaggtcccggagaccaaccctcccactgccagaccttcctcagccacatggactggctttgggacagggtggggagagttctccccttggggcttcagacccctcctttccatttctttatagagatgtgtttctctctctcttttggggggtattgagcacctagatgatgctatctcctttcgaaactcttgttccctccttgtgactgtttctcaaggtctttcttcatggctatgacttggtttcgctctctccgtggccttgattttgtcgcctgtgtcttgtaactcattgtgcatgtagaaaatccaagtgtctactaagcaactgttaggattaataagtgaacttaaatttagaaagatcgctggatataaaggcaatatgga

SEQ ID NO: 304331 - DNA, 618 bp, Homo sapiens
cttgatttaggttgcagttgcatgggtgtttgtgtttaaatttttcattaaatgctatgtttacattagagtttttcaacttagtactatctgcattttgggctggataattctgagtaatggggccctgccctgtgcattggaggctatttggcatcatttctggcctctgtccacttgatgccgttacgttagggggaaatgctgagtccctgaggtctgtcgttctctttcaggttccctggcttcaaggaggtccgtctggtacccgggcggcatgacatcgccttcgtggagtttgacaatgaggtacaggcaggggcagctcgcgatgccctgcagggctttaagatcacgcagaacaacgccatgaagatctcctttgccaagaagtagcaccttttccccccatgcctgccccttcccctgttctggggccacccctttcccccttggctcagccccctgaaggtaagtccccccttgggggccttcttggagccgtgtgtgagtgagtggtcgccacacagcattgtacccagagtctgtccccagacattgcacctggcgctgttaggccggaattaaagtggctttttgaggtttggtttttcacaa

SEQ ID NO: 304332 - DNA, 881 bp, Homo sapiens
gcgagacgcgtacagactcgtgaccttcactgattggtccgtagacccgggcgccacggaaggagagctaaaaaagtccctgtacgccatcttctcccagtttggccagatcctggatatcctggtatcacggagcctgaagatgaggggccaggcctttgtcatcttcaaggaggtcagcagcgccaccaacgccctgcgctccatgcagggtttccctttctatgacaaacctatgcgtatccagtatgccaagaccgactcagatatcattgccaagatgaaaggcaccttcgtggagcgggaccgcaagcgggagaagaggaagcccaagagccaggagaccccggccaccaagaaggctgtgcaaggcgggggagccacccccgtggtgggggctgtccaggggcctgtcccgggcatgccgccgatgactcaggcgccccgcattatgcaccacatgccgggccagccgccctacatgccgccccctggtatgatccccccgccaggccttgcacctggccagatcccaccaggggccatgcccccgcagcagcttatgccaggacagatgccccctgcccagcctctttctgagaatccaccgaatcacatcttgttcctcaccaacctgccagaggagaccaacgagctcatgctgtccatgcttttcaatcagtaagtggggcctgtggctgggtggtccctggagggtgatggccaggaggcatctccatggaaacaggcctcagaactctgccagcagagctctgagccaagtagggctttgcagaagggacagcgaccaaagatgtgaaaggaggaggctgtggctgggcccacggcctgtgggggacatgggggtgaggctggaaagg

SEQ ID NO: 304333 - DNA, 523 bp, Homo sapiens
cttgatttaggttgcagttgcatgggtgtttgtgtttaaatttttcattaaatgctatgtttacattagagtttttcaacttagtactatctgcattttgggctggataattctgagtaatggggccctgccctgtgcattggaggctatttggcatcatttctggcctctgtccacttgatgccgttacgttagggggaaatgctgagtccctgaggtctgtcgttctctttcaggttccctggcttcaaggaggtccgtctggtacccgggcggcatgacatcgccttcgtggagtttgacaatgaggtacaggcaggggcagctcgcgatgccctgcagggctttaagatcaccttggctcagccccctgaaggtaagtccccccttgggggccttcttggagccgtgtgtgagtgagtggtcgccacacagcattgtacccagagtctgtccccagacattgcacctggcgctgttaggccggaattaaagtggctttttgaggtttggtttttcacaa

SEQ ID NO: 304334 - DNA, 1609 bp, Homo sapiens
  misc_feature (12)..(12): n is a, c, g, or t
  misc_feature (32)..(32): n is a, c, g, or t
  misc_feature (64)..(64): n is a, c, g, or t
aggtcgcgtaancataggctaggtgcgaggcntggtgtgaatcggccgaggctcggcctgtcgnaaggtaacctccggtgcaaacgaccatcggcggcaggcgagcggtacgcttggcgtccgggccttcctgggcccgtctgaggaaacttgctgctcgaggccaggctgcctaggacctgtcccttttttctatactggctcccacatccgggttttttctccgggacggcccttcggatgcttgggccaatgggaatcgccatttagggtgctccgcccaccgggtcgcgtagagcatcctggaagtcgtagtaaatctctcgagagttctctccgcacgcgggctggagaagcgggtcctacgcacgctttgttgtcgcgctttgcctccgtccttccccctactcccgccttacctgacttccttttcggaggaagatccttgagcagccgacgttgggacaaaggatttggagaaacccagggctaaagtcacgtttttcctcctttaagacttacctcaacacttcactccatggcagttcccgagacccgccctaaccacactatttatatcaacaacctcaatgagaagatcaagaaggatgagctaaaaaagtccctgtacgccatcttctcccagtttggccagatcctggatatcctggtatcacggagcctgaagatgaggggccaggcctttgtcatcttcaaggaggtcagcagcgccaccaacgccctgcgctccatgcagggtttccctttctatgacaaacctatgcgtatccagtatgccaagaccgactcagatatcattgccaagatgaaaggcaccttcgtggagcgggaccgcaagcgggagaagaggaagcccaagagccaggagaccccggccaccaagaaggctgtgcaaggcgggggagccacccccgtggtgggggctgtccaggggcctgtcccgggcatgccgccgatgactcaggcgccccgcattatgcaccacatgccgggccagccgccctacatgccgccccctggtatgatccccccgccaggccttgcacctggccagatcccaccaggggccatgcccccgcagcagcttatgccaggacagatgccccctgcccagcctctttctgagaatccaccgaatcacatcttgttcctcaccaacctgccagaggagaccaacgagctcatgctgtccatgcttttcaatcagttccctggcttcaaggaggtccgtctggtacccgggcggcatgacatcgccttcgtggagtttgacaatgaggtacaggcaggggcagctcgcgatgccctgcagggctttaagatcacgcagaacaacgccatgaagatctcctttgccaagaagtagcaccttttccccccatgcctgccccttcccctgttctggggccacccctttcccccttggctcagccccctgaaggtaagtccccccttgggggccttcttggagccgtgtgtgagtgagtggtcgccacacagcattgtacccagagtctgtccccagacattgcacctggcgctgttaggccggaattaaagtggctttttgaggtttggtttttcacaa

SEQ ID NO: 304335 - DNA, 1699 bp, Homo sapiens
ggcacgaggctttgtggtttggtctcagggaagtagcaggcgccggttgagagaactacggccctgtcggaaggtaacctccggtgcaaacgaccatcggcggcaggcgagcggtacgcttggcgtccgggccttcctgggcccgtctgaggaaacttgctgctcgaggccaggctgcctaggacctgtcccttttttctatactggctcccacatccgggttttttctccgggacggcccttcggatgcttgggccaatgggaatcgccatttagggtgctccgcccaccgggtcgcgtagagcatcctggaagtcgtagtaaatctctcgagagttctctccgcacgcgggctggagaagcgggtcctacgcacgctttgttgtcgcgctttgcctccgtccttccccctactcccgccttacctgacttccttttcggaggaagatccttgagcagccgacgttgggacaaaggatttggagaaacccagggctaaagtcacgtttttcctcctttaagacttacctcaacacttcactccatggcagttcccgagacccgccctaaccacactatttatatcaacaacctcaatgagaagatcaagaaggatgagctaaaaaagtccctgtacgccatcttctcccagtttggccagatcctggatatcctggtatcacggagcctgaagatgaggggccaggcctttgtcatcttcaaggaggtcagcagcgccaccaacgccctgcgctccatgcagggtttccctttctatgacaaacctatgcgtatccagtatgccaagaccgactcagatatcattgccaagatgaaaggcaccttcgtggagcgggaccgcaagcgggagaagaggaagcccaagagccaggagaccccggccaccaagaaggctgtgcaaggcgggggagccacccccgtggtgggggctgtccaggggcctgtcccgggcatgccgccgatgactcaggcgccccgcattatgcaccacatgccgggccagccgccctacatgccgccccctggtatgatccccccgccaggccttgcacctggccagatcccaccaggggccatgcccccgcagcagcttatgccaggacagatgccccctgcccagcctctttctgagaatccaccgaatcacatcttgttcctcaccaacctgccagaggagaccaacgagctcatgctgtccatgcttttcaatcagttccctggcttcaaggaggtccgtctggtacccgggcggcatgacatcgccttcgtggagtttgacaatgaggtacaggcaggggcagctcgcgatgccctgcagggctttaagatcacgcagaacaacgccatgaagatctcctttgccaagaagtagcaccttttccccccatgcctgccccttcccctgttctggggccacccctttcccccttggctcagccccctgaaggtaagtccccccttgggggccttcttggagccgtgtgtgagtgagtggtcgccacacagcattgtacccagagtctgtccccagacattgcacctggcgctgttaggccggaattaaagtggctttttgaggtttggtttttcacaaaaaaaaaaaaatataaaacaataaaaaaaagaacacaagaacacaaaaaaaaactcggggacaaaaataagggcggggaacaaa

SEQ ID NO: 304336 - DNA, 1238 bp, Homo sapiens
aatatagggctaggtacgaggctgggtgtcgccctactcccgccttacctgacttccttttcggaggaagatccttgagcagccgacgttgggacaaaggatttggagaaacccagggctaaagtcacgtttttcctcctttaagacttacctcaacacttcactccatggcagttcccgagacccgccctaaccacactatttatatcaacaacctcaatgagaagatcaagaaggatgagctaaaaaagtccctgtacgccatcttctcccagtttggccagatcctggatatcctggtatcacggagcctgaagatgaggggccaggcctttgtcatcttcaaggaggtcagcagcgccaccaacgccctgcgctccatgcagggtttccctttctatgacaaacctatgcgtatccagtatgccaagaccgactcagatatcattgccaagatgaaaggcaccttcgtggagcgggaccgcaagcgggagaagaggaagcccaagagccaggagaccccggccaccaagaaggctgtgcaaggcgggggagccacccccgtggtgggggctgtccaggggcctgtcccgggcatgccgccgatgactcaggcgccccgcattatgcaccacatgccgggccagccgccctacatgccgccccctggtatgatccccccgccaggccttgcacctggccagatcccaccaggggccatgcccccgcagcagcttatgccaggacagatgccccctgcccagcctctttctgagaatccaccgaatcacatcttgttcctcaccaacctgccagaggagaccaacgagctcatgctgtccatgcttttcaatcagttccctggcttcaaggaggtccgtctggtacccgggcggcatgacatcgccttcgtggagtttgacaatgaggtacaggcaggggcagctcgcgatgccctgcagggctttaagatcacgcagaacaacgccatgaagatctcctttgccaagaagtagcaccttttccccccatgcctgccccttcccctgttctggggccacccctttcccccttggctcagccccctgaaggtaagtccccccttgggggccttcttggagccgtgtgtgagtgagtggtcgccacacagcattgtacccagagtctgtccccagacattgcacctggcgctgttaggccggaattaaagtggctttttgaggtttggtttttcacaa

SEQ ID NO: 304337 - DNA, 1226 bp, Homo sapiens
  misc_feature (12)..(12): n is a, c, g, or t
  misc_feature (32)..(32): n is a, c, g, or t
  misc_feature (64)..(64): n is a, c, g, or t
aggtcgcgtaancataggctaggtgcgaggcntggtgtgaatcggccgaggctcggcctgtcgnaagcagccgacgttgggacaaaggatttggagaaacccagggctaaagtcacgtttttcctcctttaagacttacctcaacacttcactccatggcagttcccgagacccgccctaaccacactatttatatcaacaacctcaatgagaagatcaagaaggatgagctaaaaaagtccctgtacgccatcttctcccagtttggccagatcctggatatcctggtatcacggagcctgaagatgaggggccaggcctttgtcatcttcaaggaggtcagcagcgccaccaacgccctgcgctccatgcagggtttccctttctatgacaaacctatgcgtatccagtatgccaagaccgactcagatatcattgccaagatgaaaggcaccttcgtggagcgggaccgcaagcgggagaagaggaagcccaagagccaggagaccccggccaccaagaaggctgtgcaaggcgggggagccacccccgtggtgggggctgtccaggggcctgtcccgggcatgccgccgatgactcaggcgccccgcattatgcaccacatgccgggccagccgccctacatgccgccccctggtatgatccccccgccaggccttgcacctggccagatcccaccaggggccatgcccccgcagcagcttatgccaggacagatgccccctgcccagcctctttctgagaatccaccgaatcacatcttgttcctcaccaacctgccagaggagaccaacgagctcatgctgtccatgcttttcaatcagttccctggcttcaaggaggtccgtctggtacccgggcggcatgacatcgccttcgtggagtttgacaatgaggtacaggcaggggcagctcgcgatgccctgcagggctttaagatcacgcagaacaacgccatgaagatctcctttgccaagaagtagcaccttttccccccatgcctgccccttcccctgttctggggccacccctttcccccttggctcagccccctgaaggtaagtccccccttgggggccttcttggagccgtgtgtgagtgagtggtcgccacacagcattgtacccagagtctgtccccagacattgcacctggcgctgttaggccggaattaaagtggctttttgaggtttggtttttcacaa

SEQ ID NO: 304338 - DNA, 1433 bp, Homo sapiens
ggcacgaggctttgtggtttggtctcagggaagtagcaggcgccggttgagagaactacggccctgtcggaaggtaacctccggtgcaaacgaccatcggcggcaggcgagcggtacgcttggcgtccgggccttcctgggcccgtctgaggaaacttgctgctcgaggccaggctgcctaggacctgtcccttttttctatactggctcccacatccgggttttttctccgggacggcccttcggatgcttgggccaatgggaatcgccatttagggtgctccgcccaccgggtcgcgtagagcatcctggaagtcgtagtaaatctctcgagagttctctccgcacgcgggctggagaagcgggtcctacgcacgctttgttgtcgcgctttgcctccgtccttccccctactcccgccttacctgacttccttttcggaggaagatccttgagcagccgacgttgggacaaaggatttggagaaacccagggctaaagtcacgtttttcctcctttaagacttacctcaacacttcactccatggcagttcccgagacccgccctaaccacactatttatatcaacaacctcaatgagaagatcaagaaggatgagctaaaaaagtccctgtacgccatcttctcccagtttggccagatcctggatatcctggtatcacggagcctgaagatgaggggccaggcctttgtcatcttcaaggaggtcagcagcgccaccaacgccctgcgctccatgcagggtttccctttctatgacaaacctatgcgtatccagtatgccaagaccgactcagatatcattgccaagatgaaaggcaccttcgtggagcgggaccgcaagcgggagaagaggaagcccaagagccaggagaccccggccaccaagaaggctgtgcaaggcgggggagccacccccgtggtgggggctgtccaggggcctgtcccgggcatgccgccgatgactcaggcgccccgcattatgcaccacatgccgggccagccgccctacatgccgccccctggtatgatccccccgccaggccttgcacctggccagatcccaccaggggccatgcccccgcagcagcttatgccaggacagatgccccctgcccagcctctttctgagaatccaccgaatcacatcttgttcctcaccaacctgccagaggagaccaacgagctcatgctgtccatgcttttcaatcagtaagtggggcctgtggctgggtggtccctggagggtgatggccaggaggcatctccatggaaacaggcctcagaactctgccagcagagctctgagccaagtagggctttgcagaagggacagcgaccaaagatgtgaaaggaggaggctgtggctgggcccacggcctgtgggggacatgggggtgaggctggaaagg

SEQ ID NO: 304339 - DNA, 1257 bp, Homo sapiens
gtcacttggcgtccgtcgtttgccctagtcgcggcttagctgcactttccggtttcgggcaggacagatgccttgacggcagcgctaccggtggcgtgacgagaagcgactggtgcgacgcaagaggccgagggcgtagagagtcacgtttttcctcctttaagacttacctcaacacttcactccatggcagttcccgagacccgccctaaccacactatttatatcaacaacctcaatgagaagatcaagaaggatgagctaaaaaagtccctgtacgccatcttctcccagtttggccagatcctggatatcctggtatcacggagcctgaagatgaggggccaggcctttgtcatcttcaaggaggtcagcagcgccaccaacgccctgcgctccatgcagggtttccctttctatgacaaacctatgcgtatccagtatgccaagaccgactcagatatcattgccaagatgaaaggcaccttcgtggagcgggaccgcaagcgggagaagaggaagcccaagagccaggagaccccggccaccaagaaggctgtgcaaggcgggggagccacccccgtggtgggggctgtccaggggcctgtcccgggcatgccgccgatgactcaggcgccccgcattatgcaccacatgccgggccagccgccctacatgccgccccctggtatgatccccccgccaggccttgcacctggccagatcccaccaggggccatgcccccgcagcagcttatgccaggacagatgccccctgcccagcctctttctgagaatccaccgaatcacatcttgttcctcaccaacctgccagaggagaccaacgagctcatgctgtccatgcttttcaatcagttccctggcttcaaggaggtccgtctggtacccgggcggcatgacatcgccttcgtggagtttgacaatgaggtacaggcaggggcagctcgcgatgccctgcagggctttaagatcacgcagaacaacgccatgaagatctcctttgccaagaagtagcaccttttccccccatgcctgccccttcccctgttctggggccacccctttcccccttggctcagccccctgaaggtaagtccccccttgggggccttcttggagccgtgtgtgagtgagtggtcgccacacagcattgtacccagagtctgtccccagacattgcacctggcgctgttaggccggaattaaagtggctttttgaggtttggtttttcacaa

SEQ ID NO: 304340 - DNA, 1166 bp, Homo sapiens
ggcacgaggctttgtggtttggtctcagggaagtagcaggcgccggttgagagaactacggccctgtcggaagacttacctcaacacttcactccatggcagttcccgagacccgccctaaccacactatttatatcaacaacctcaatgagaagatcaagaaggatgagctaaaaaagtccctgtacgccatcttctcccagtttggccagatcctggatatcctggtatcacggagcctgaagatgaggggccaggcctttgtcatcttcaaggaggtcagcagcgccaccaacgccctgcgctccatgcagggtttccctttctatgacaaacctatgcgtatccagtatgccaagaccgactcagatatcattgccaagatgaaaggcaccttcgtggagcgggaccgcaagcgggagaagaggaagcccaagagccaggagaccccggccaccaagaaggctgtgcaaggcgggggagccacccccgtggtgggggctgtccaggggcctgtcccgggcatgccgccgatgactcaggcgccccgcattatgcaccacatgccgggccagccgccctacatgccgccccctggtatgatccccccgccaggccttgcacctggccagatcccaccaggggccatgcccccgcagcagcttatgccaggacagatgccccctgcccagcctctttctgagaatccaccgaatcacatcttgttcctcaccaacctgccagaggagaccaacgagctcatgctgtccatgcttttcaatcagttccctggcttcaaggaggtccgtctggtacccgggcggcatgacatcgccttcgtggagtttgacaatgaggtacaggcaggggcagctcgcgatgccctgcagggctttaagatcacgcagaacaacgccatgaagatctcctttgccaagaagtagcaccttttccccccatgcctgccccttcccctgttctggggccacccctttcccccttggctcagccccctgaaggtaagtccccccttgggggccttcttggagccgtgtgtgagtgagtggtcgccacacagcattgtacccagagtctgtccccagacattgcacctggcgctgttaggccggaattaaagtggctttttgaggtttggtttttcacaa

SEQ ID NO: 304341 - DNA, 1231 bp, Homo sapiens
ggcacgaggctttgtggtttggtctcagggaagtagcaggcgccggttgagagaactacggccctgtcggaaggtaacctccggtgcaaacgaccatcggcggcaggcgagcggtacgcttggcgtccgggccttcctgggcccgtctgaggaaacttgctgctcgaggccaggctgcctaggacctgtcccttttttctatactggctcccacatccgggttttttctccgggacggcccttcggatgcttgggccaatgggaatcgccatttagggtgctccgcccaccgggtcgcgtagagcatcctggaagtcgtagtaaatctctcgagagttctctccgcacgcgggctggagaagcgggtcctacgcacgctttgttgtcgcgctttgcctccgtccttccccctactcccgccttacctgacttccttttcggaggaagatccttgagcagccgacgttgggacaaaggatttggagaaacccagggctaaagtcacgtttttcctcctttaagacttacctcaacacttcactccatggcagttcccgagacccgccctaaccacactatttatatcaacaacctcaatgagaagatcaagaaggatgagctaaaaaagtccctgtacgccatcttctcccagtttggccagatcctggatatcctggtatcacggagcctgaagatgaggggccaggcctttgtcatcttcaaggaggtcagcagcgccaccaacgccctgcgctccatgcagggtttccctttctatgacaaacctatgcgtatccagtatgccaagaccgactcagatatcattgccaagatgaaaggcaccttcgtggagcgggaccgcaagcgggagaagaggaagcccaagagccaggagaccccggccaccaagaaggctgtgcaaggcgggggagccacccccgtggtgggggctgtccaggggcctgtcccgggcatgccgccgatgactcaggcgccccgcattatgcaccacatgccgggccagccgccctacatgccgccccctggtatgatccccccgccaggccttgcacctggccagatcccaccaggggccatgcccccgcagcagcttatgccaggacagatgccccctgcccagccttgcagctttttggatcccgatcattgtctacactgcagggacaaagtctgggccagttcacgcctggtcagggggctggtcgggggg

SEQ ID NO: 304342 - DNA, 1314 bp, Homo sapiens
agcggatattcgccagcgcgtcgcagaataatcgaggctcctactcacacgtttgattgatcgctcattggcctccgcaccttccacccgtactcaccgagttggcatgcacttactatgtaggagtgaagagtcgtgtgagcccacgacgttggacgacgggagtcggagaatcccagggctaacggtcacgtgtatgtgctgtccgtgtataagacgttacctccatggagttcgctgtccatggcagttcccgagacccgccctaaccacactatttatatcaacaacctcaatgagaagatcaagaaggatgagctaaaaaagtccctgtacgccatcttctcccagtttggccagatcctggatatcctggtatcacggagcctgaagatgaggggccaggcctttgtcatcttcaaggaggtcagcagcgccaccaacgccctgcgctccatgcagggtttccctttctatgacaaacctatgcgtatccagtatgccaagaccgactcagatatcattgccaagatgaaaggcaccttcgtggagcgggaccgcaagcgggagaagaggaagcccaagagccaggagaccccggccaccaagaaggctgtgcaaggcgggggagccacccccgtggtgggggctgtccaggggcctgtcccgggcatgccgccgatgactcaggcgccccgcattatgcaccacatgccgggccagccgccctacatgccgccccctggtatgatccccccgccaggccttgcacctggccagatcccaccaggggccatgcccccgcagcagcttatgccaggacagatgccccctgcccagcctctttctgagaatccaccgaatcacatcttgttcctcaccaacctgccagaggagaccaacgagctcatgctgtccatgcttttcaatcagttccctggcttcaaggaggtccgtctggtacccgggcggcatgacatcgccttcgtggagtttgacaatgaggtacaggcaggggcagctcgcgatgccctgcagggctttaagatcacgcagaacaacgccatgaagatctcctttgccaagaagtagcaccttttccccccatgcctgccccttcccctgttctggggccacccctttcccccttggctcagccccctgaaggtaagtccccccttgggggccttcttggagccgtgtgtgagtgagtggtcgccacacagcattgtacccagagtctgtccccagacattgcacctggcgctgttaggccggaattaaagtggctttttgaggtttggtttttcacaa

SEQ ID NO: 304343 - DNA, 1123 bp, Homo sapiens
  misc_feature (7)..(7): n is a, c, g, or t
  misc_feature (66)..(66): n is a, c, g, or t
  misc_feature (84)..(84): n is a, c, g, or t
  misc_feature (105)..(105): n is a, c, g, or t
  misc_feature (115)..(115): n is a, c, g, or t
cgccacntgaacaagattgagaaccaggctaatacgtttcctctttaaactcctccaacttacgcntgccgtcccacaccgccnaacacactatttttcgacacntaatgagagntcagaaggtgagctaaaaaagtccctgtacgccatcttctcccagtttggccagatcctggatatcctggtatcacggagcctgaagatgaggggccaggcctttgtcatcttcaaggaggtcagcagcgccaccaacgccctgcgctccatgcagggtttccctttctatgacaaacctatgcgtatccagtatgccaagaccgactcagatatcattgccaagatgaaaggcaccttcgtggagcgggaccgcaagcgggagaagaggaagcccaagagccaggagaccccggccaccaagaaggctgtgcaaggcgggggagccacccccgtggtgggggctgtccaggggcctgtcccgggcatgccgccgatgactcaggcgccccgcattatgcaccacatgccgggccagccgccctacatgccgccccctggtatgatccccccgccaggccttgcacctggccagatcccaccaggggccatgcccccgcagcagcttatgccaggacagatgccccctgcccagcctctttctgagaatccaccgaatcacatcttgttcctcaccaacctgccagaggagaccaacgagctcatgctgtccatgcttttcaatcagttccctggcttcaaggaggtccgtctggtacccgggcggcatgacatcgccttcgtggagtttgacaatgaggtacaggcaggggcagctcgcgatgccctgcagggctttaagatcacgcagaacaacgccatgaagatctcctttgccaagaagtagcaccttttccccccatgcctgccccttcccctgttctggggccacccctttcccccttggctcagccccctgaaggtaagtccccccttgggggccttcttggagccgtgtgtgagtgagtggtcgccacacagcattgtacccagagtctgtccccagacattgcacctggcgctgttaggccggaattaaagtggctttttgaggtttggtttttcacaa

SEQ ID NO: 304344 - DNA, 1295 bp, Homo sapiens
gaaaagaatcactcatttatcgagtgtttactacgtgccggatgctgtcctgagcactttgcatgtatgtgcacatgttcattatatagcagctctctgtaagcacatcttacagaagagtagaagagtgtacttggccacttgagtggttcctggctgcttctgtgattgttaggtcttgagagattatggacccgaggcattctgggtaccccatcaattggctgatggtcttctatttgggctgcgcttcttctaaaaaggggagctcaaaggtctttttttcccccactgcagagctaaaaaagtccctgtacgccatcttctcccagtttggccagatcctggatatcctggtatcacggagcctgaagatgaggggccaggcctttgtcatcttcaaggaggtcagcagcgccaccaacgccctgcgctccatgcagggtttccctttctatgacaaacctatgcgtatccagtatgccaagaccgactcagatatcattgccaagatgaaaggcaccttcgtggagcgggaccgcaagcgggagaagaggaagcccaagagccaggagaccccggccaccaagaaggctgtgcaaggcgggggagccacccccgtggtgggggctgtccaggggcctgtcccgggcatgccgccgatgactcaggcgccccgcattatgcaccacatgccgggccagccgccctacatgccgccccctggtatgatccccccgccaggccttgcacctggccagatcccaccaggggccatgcccccgcagcagcttatgccaggacagatgccccctgcccagcctctttctgagaatccaccgaatcacatcttgttcctcaccaacctgccagaggagaccaacgagctcatgctgtccatgcttttcaatcagttccctggcttcaaggaggtccgtctggtacccgggcggcatgacatcgccttcgtggagtttgacaatgaggtacaggcaggggcagctcgcgatgccctgcagggctttaagatcacgcagaacaacgccatgaagatctcctttgccaagaagtagcaccttttccccccatgcctgccccttcccctgttctggggccacccctttcccccttggctcagccccctgaaggtaagtccccccttgggggccttcttggagccgtgtgtgagtgagtggtcgccacacagcattgtacccagagtctgtccccagacattgcacctggcgctgttaggccggaattaaagtggctttttgaggtttggtttttcacaa

SEQ ID NO: 304345 - DNA, 1552 bp, Homo sapiens
ggcacgaggctttgtggtttggtctcagggaagtagcaggcgccggttgagagaactacggccctgtcggaaggtaacctccggtgcaaacgaccatcggcggcaggcgagcggtacgcttggcgtccgggccttcctgggcccgtctgaggaaacttgctgctcgaggccaggctgcctaggacctgtcccttttttctatactggctcccacatccgggttttttctccgggacggcccttcggatgcttgggccaatgggaatcgccatttagggtgctccgcccaccgggtcgcgtagagcatcctggaagtcgtagtaaatctctcgagagttctctccgcacgcgggctggagaagcgggtcctacgcacgctttgttgtcgcgctttgcctccgtccttccccctactcccgccttacctgacttccttttcggaggaagatccttgagcagccgacgttgggacaaaggatttggagaaacccagggctaaagtcacgtttttcctcctttaagacttacctcaacacttcactccatggcagttcccgagacccgccctaaccacactatttatatcaacaacctcaatgagaagatcaagaaggatgagctaaaaaagtccctgtacgccatcttctcccagtttggccagatcctggatatcctggtatcacggagcctgaagatgaggggccaggcctttgtcatcttcaaggagcgtatccagtatgccaagaccgactcagatatcattgccaagatgaaaggcaccttcgtggagcgggaccgcaagcgggagaagaggaagcccaagagccaggagaccccggccaccaagaaggctgtgcaaggcgggggagccacccccgtggtgggggctgtccaggggcctgtcccgggcatgccgccgatgactcaggcgccccgcattatgcaccacatgccgggccagccgccctacatgccgccccctggtatgatccccccgccaggccttgcacctggccagatcccaccaggggccatgcccccgcagcagcttatgccaggacagatgccccctgcccagcctctttctgagaatccaccgaatcacatcttgttcctcaccaacctgccagaggagaccaacgagctcatgctgtccatgcttttcaatcagttccctggcttcaaggaggtccgtctggtacccgggcggcatgacatcgccttcgtggagtttgacaatgaggtacaggcaggggcagctcgcgatgccctgcagggctttaagatcacgcagaacaacgccatgaagatctcctttgccaagaagtagcaccttttccccccatgcctgccccttcccctgttctggggccacccctttcccccttggctcagccccctgaaggtaagtccccccttgggggccttcttggagccgtgtgtgagtgagtggtcgccacacagcattgtacccagagtctgtccccagacattgcacctggcgctgttaggccggaattaaagtggctttttgaggtttggtttttcacaa

SEQ ID NO: 304346 - DNA, 1102 bp, Homo sapiens
ggcacgaggctttgtggtttggtctcagggaagtagcaggcgccggttgagagaactacggccctgtcggaaggtaacctccggtgcaaacgaccatcggcggcaggcgagcggtacgcttggcgtccgggccttcctgggcccgtctgaggaaacttgctgctcgaggccaggctgcctaggacctgtcccttttttctatactggctcccacatccgggttttttctccgggacggcccttcggatgcttgggccaatgggaatcgccatttagggtgctccgcccaccgggtcgcgtagagcatcctggaagtcgtagtaaatctctcgagagttctctccgcacgcgggctggagaagcgggtcctacgcacgctttgttgtcgcgctttgcctccgtccttccccctactcccgccttacctgacttccttttcggaggaagatccttgagcagccgacgttgggacaaaggatttggagaaacccagggctaaagtcacgtttttcctcctttaagacttacctcaacacttcactccatggcagttcccgagacccgccctaaccacactatttatatcaacaacctcaatgagaagatcaagaaggatgagctaaaaaagtccctgtacgccatcttctcccagtttggccagatcctggatatcctggtatcacggagcctgaagatgaggggccaggcctttgtcatcttcaaggaggtcagcagcgccaccaacgccctgcgctccatgcagggtttccctttctatgacaaacctatgcgtatccagtatgccaagaccgactcagatatcattgccaagatgaaaggcaccttcgtggagcgggaccgcaagcgggagaagaggaagcccaagagccaggagaccccggccaccaagaaggctgtgcaaggcgggggagccacttggctcagccccctgaaggtaagtccccccttgggggccttcttggagccgtgtgtgagtgagtggtcgccacacagcattgtacccagagtctgtccccagacattgcacctggcgctgttaggccggaattaaagtggctttttgaggtttggtttttcacaa

SEQ ID NO: 304347 - DNA, 1174 bp, Homo sapiens
ggcacgaggctttgtggtttggtctcagggaagtagcaggcgccggttgagagaactacggccctgtcggaaggtaacctccggtgcaaacgaccatcggcggcaggcgagcggtacgcttggcgtccgggccttcctgggcccgtctgaggaaacttgctgctcgaggccaggctgcctaggacctgtcccttttttctatactggctcccacatccgggttttttctccgggacggcccttcggatgcttgggccaatgggaatcgccatttagggtgctccgcccaccgggtcgcgtagagcatcctggaagtcgtagtaaatctctcgagagttctctccgcacgcgggctggagaagcgggtcctacgcacgctttgttgtcgcgctttgcctccgtccttccccctactcccgccttacctgacttccttttcggaggaagatccttgagcagccgacgttgggacaaaggatttggagaaacccagggctaaagtcacgtttttcctcctttaagacttacctcaacacttcactccatggcagttcccgagacccgccctaaccacactatttatatcaacaacctcaatgagaagatcaagaaggatgagctaaaaaagtccctgtacgccatcttctcccagtttggccagatcctggatatcctggtatcacggagcctgaagatgaggggccaggcctttgtcatcttcaaggaggtcagcagcgccaccaacctgccagaggagaccaacgagctcatgctgtccatgcttttcaatcagttccctggcttcaaggaggtccgtctggtacccgggcggcatgacatcgccttcgtggagtttgacaatgaggtacaggcaggggcagctcgcgatgccctgcagggctttaagatcacgcagaacaacgccatgaagatctcctttgccaagaagtagcaccttttccccccatgcctgccccttcccctgttctggggccacccctttcccccttggctcagccccctgaaggtaagtccccccttgggggccttcttggagccgtgtgtgagtgagtggtcgccacacagcattgtacccagagtctgtccccagacattgcacctggcgctgttaggccggaattaaagtggctttttgaggtttggtttttcacaa

SEQ ID NO: 304348 - DNA, 517 bp, Homo sapiens
tggactcagggctcttgtgctcaccgactcccctatacccccgcagctttctgagaatccaccgaatcacatcttgttcctcaccaacctgccagaggagaccaacgagctcatgctgtccatgcttttcaatcagttccctggcttcaaggaggtccgtctggtacccgggcggcatgacatcgccttcgtggagtttgacaatgaggtacaggcaggggcagctcgcgatgccctgcagggctttaagatcacgcagaacaacgccatgaagatctcctttgccaagaagtagcaccttttccccccatgcctgccccttcccctgttctggggccacccctttcccccttggctcagccccctgaaggtaagtccccccttgggggccttcttggagccgtgtgtgagtgagtggtcgccacacagcattgtacccagagtctgtccccagacattgcacctggcgctgttaggccggaattaaagtggctttttgaggtttggtttttcacaa

SEQ ID NO: 304349 - DNA, 1147 bp, Homo sapiens
ggcacgaggctttgtggtttggtctcagggaagtagcaggcgccggttgagagaactacggccctgtcggaaggtaacctccggtgcaaacgaccatcggcggcaggcgagcggtacgcttggcgtccgggccttcctgggcccgtctgaggaaacttgctgctcgaggccaggctgcctaggacctgtcccttttttctatactggctcccacatccgggttttttctccgggacggcccttcggatgcttgggccaatgggaatcgccatttagggtgctccgcccaccgggtcgcgtagagcatcctggaagtcgtagtaaatctctcgagagttctctccgcacgcgggctggagaagcgggtcctacgcacgctttgttgtcgcgctttgcctccgtccttccccctactcccgccttacctgacttccttttcggaggaagatccttgagcagccgacgttgggacaaaggatttggagaaacccagggctaaagtcacgtttttcctcctttaagacttacctcaacacttcactccatggcagttcccgagacccgccctaaccacactatttatatcaacaacctcaatgagaagatcaagaaggatggtgagttctcgggatagtccggagtccagactgtcccgcacgggctggcccctcttccgtcccctgcacccgcctctctttctaagtgtttgtccagccaaacttcgagttaactccttggcctttacacaaactacttcctgtcttcaacactccattagttcatcttacactctgccctttaacgtggtcactgctgctcatcttacaaggtttgaggtcacaggacccttcctccaggaagccttgccttgtcccttcacgtggctgccgctgacttgccgtacgctgagaccatctcccatcaagccctgattcctctgagctgtcgtggggctctctctcctcccagtggcctttgaactccgtgagggcaaggactggggctttcttggtcaccggctttttcagtgatcagcccacaatgaacatgtaccataatggtggctaacgctctgtatcatgggctggtctgtgtgctttcatataaatcttgataacatttaattctcacaacaatcttgtaggaa

SEQ ID NO: 304350 - DNA, 452 bp, Homo sapiens
  misc_feature (17)..(17): n is a, c, g, or t
  misc_feature (62)..(62): n is a, c, g, or t
agaacctagaggatccncgctacaacgccaaggcgatcaacgagctcatgctgtccatgctnttcaatcagttccctggcttcaaggaggtccgtctggtacccgggcggcatgacatcgccttcgtggagtttgacaatgaggtacaggcaggggcagctcgcgatgccctgcagggctttaagatcacgcagaacaacgccatgaagatctcctttgccaagaagtagcaccttttccccccatgcctgccccttcccctgttctggggccacccctttcccccttggctcagccccctgaaggtaagtccccccttgggggccttcttggagccgtgtgtgagtgagtggtcgccacacagcattgtacccagagtctgtccccagacattgcacctggcgctgttaggccggaattaaagtggctttttgaggtttggtttttcacaa

SEQ ID NO: 304351 - DNA, 4414 bp, Homo sapiens
caggggccgctaacggtccggcgcccctcggcgtccgcgcgcccccagcctggcggacgagcccggcggcggagatgggggcgacgggggcggcggagccgctgcaatccgtgctgtgggtgaagcagcagcgctgcgccgtgagcctggagcccgcgcgggctctgctgcgctggtggcggagcccggggcccggagccggcgcccccggcgcggatgcctgctctgtgcctgtatctgagatcatcgccgttgaggaaacagacgttcacgggaaacatcaaggcagtggaaaatggcagaaaatggaaaagccttacgcttttacagttcactgtgtaaagagagcacgacggcaccgctggaagtgggcgcaggtgactttctggtgtccagaggagcagctgtgtcacttgtggctgcagaccctgcgggagatgctggagaagctgacgtccagaccaaagcatttactggtatttatcaacccgtttggaggaaaaggacaaggcaagcggatatatgaaagaaaagtggcaccactgttcaccttagcctccatcaccactgacatcatcgttactgaacatgctaatcaggccaaggagactctgtatgagattaacatagacaaatacgacggcatcgtctgtgtcggcggagatggtatgttcagcgaggtgctgcacggtctgattgggaggacgcagaggagcgccggggtcgaccagaaccacccccgggctgtgctggtccccagtagcctccggattggaatcattcccgcagggtcaacggactgcgtgtgttactccaccgtgggcaccagcgacgcagaaacctcggcgctgcatatcgttgttggggactcgctggccatggatgtgtcctcagtccaccacaacagcacactccttcgctactccgtgtccctgctgggctacggcttctacggggacatcatcaaggacagtgagaagaaacggtggttgggtcttgccagatacgacttttcaggtttaaagaccttcctctcccaccactgctatgaagggacagtgtccttcctccctgcacaacacacggtgggatctccaagggataggaagccctgccgggcaggatgctttgtttgcaggcaaagcaagcagcagctggaggaggagcagaagaaagcactgtatggtttggaagctgcggaggacgtggaggagtggcaagtcgtctgtgggaagtttctggccatcaatgccacaaacatgtcctgtgcttgtcgccggagccccaggggcctctccccggctgcccacttgggagacgggtcttctgacctcatcctcatccggaaatgctccaggttcaattttctgagatttctcatcaggcacaccaaccagcaggaccagtttgacttcacttttgttgaagtttatcgcgtcaagaaattccagtttacgtcgaagcacatggaggatgaggacagcgacctcaaggagggggggaagaagcgctttgggcacatttgcagcagccacccctcctgctgctgcaccgtctccaacagctcctggaactgcgacggggaggtcctgcacagccctgccatcgaggtcagagtccactgccagctggttcgactctttgcacgaggaattgaagagaatccgaagccagactcacacagctgagaagccggcgtcctgctcacaaactgggaaagtgtgaaaactatttaagataattattacagaccaattatgttgatatatacatttaaatgtagaaatttatttttgatagttaaatcttgattttagaagaaaacccttttgtcaacaattttgtgtacatatttggcattttcagttctgtacgcatctgcgggttgcagcccacgccgcttactctcagcggatgcagctgctcacttgggggcactggcctcttaggttttaacgatgtcaacagtgtagtttagaaaatggcccgttagtggctctattgcaataatgttagggacattatatgatttccacgcaggtcacaccatctgggcctgaggtagcagtgggtcactttgatccactttgcaggacttattctgtaacggtttgtggccaagttttgggaagtggttgattctctttgccttcatttcaccttcctcttcgtttacggttaggacatcgctgcttgatccttacaatactgtgcaactgcaatgcaacgtggccctgcttcaggtgatccgcgggaggggcctccacgccagcgccgggaaggctgctggggcctccacacctgcctcatcacggcggcgaggctacgacaatccggctgggagcatgaccttggcgtctgttctgggagcacggatgataagctctggaagctggcagtgtgtaaagcactggcaagtttgttactgttaaaatgtcaaataccaatgctttatatcgacgcgaagtgcttaacacagccgggcttgggggcagtcaggaggaagctggccatccgtggaggaggggccggtcctggactcccgcaggactcctctgatgcagggcctgaagtctgtacacgtggtccagatttgtccttgtcttttcttcacactgagttctctatatttattgaacatcttgtccttttaagccagagtagtgtaaactgcgtctcggatgtctgtcttttgcctcgaagccacgatggatcgctggtttcctctgcagcgcgagggctccggcgaccagaggattcttcccggaaggcattcctgccgcgctccccggggcacccctcaattgtgtactacgtccttgtttagtgtgtatccgtgcccacgtagatgatgtctgtaacgtagttttgtttgaaatatgagaatatgcggcttaaactttgatctgtaaggagcggggccgtggccgtttggagcacgctgtagacaccgttcctcatgctgccgggtgggttttgcagaagctcccttagtgatttcatgtttaacaggcagcatccattttcagaatttcctggcattgatttatattttgaagcatacaggaaacttctcgtttcctcgtttagccccacccagatcaggtgaaagggcagctttaatggtggtttttatggaccacattatcagagagcactgtgcaagccaaatggttcaataatgaatgaaaattctgggtgtaaagagtaaatatgccctggctctttctaccaatgtttgctcctggttggaaagaaaccaaagatttaagacgggctgctcttccagactggctgtgcctgcctgtgcccagcaacctgtgcagccggcagtgtgcctggtgtcacgccaggaggctgtggctgctgtgggccctctggaattgtgctcctcacaaagtttccccaaaaggttcttctaagcctttattgtccctggtaaatgtttcccggctgggcgcggtggctcacgcctgtaatcccagcactttgggaggccgaggcgggtggatcacctaaggtcaggagtttgagatcagcctgcccaacatggtgaaacctcgtctctactaaaaatacacaacttagccagtcttgttggcgcacgcctgtaatctcagctactagggatgctgaggcaggagaatcgcttgaacccaagaaagaggtggaggttgcggtgagccaagattgcgccactgcactccagcctgggcaaacagagggagactccatcgccccccctcaacaaaaaaaaaagtttcccatacactggcctgccccaaaacccactaacaattttagcaaaacagtccaggccaaagaggaagcatttcatgttcaataagaaacccagccattccgcatggctggttcctgagtggctctggtgatactctccagccacctgctgacattgagaatctcagacctcgggactgctgttgcggtaccgtgtgtctgacacctgccagcagccctttgctatctgcgcgcaggatgggggtgactgcccagacattcccgctagataggctctgatttccggggcagcctttcagatgcggcagacatacaacacctgtactttagagttttaagggaaaaaaaaatcagaagtgctggttagatagtaaaaacttaggataacttagaaaggctagttttagcttcctttgtggctccctggtgcaaaacaattagcagttatgcaatggacctgattctagtttattctaattaagaagtgaggccgggtttgacttcgttcctgaatacaatcttgagtaactgggaaagtctgagtgaaaggatggcctcattctctttctaatcttgctggtttcaagattagaaaatggcattatttgatctgaaatgtttgagaagacacgaataaagttacttgggcaga

SEQ ID NO: 304352 - DNA, 3063 bp, Homo sapiens
aaaaagatgatatagccgaccggtttattgcagttcgaggcatcagctggactaatttgacttcacttttgttgaagtttatcgcgtcaagaaattccagtttacgtcgaagcacatggaggatgaggacagcgacctcaaggagggggggaagaagcgctttgggcacatttgcagcagccacccctcctgctgctgcaccgtctccaacagctcctggaactgcgacggggaggtcctgcacagccctgccatcgaggtcagagtccactgccagctggttcgactctttgcacgaggaattgaagagaatccgaagccagactcacacagctgagaagccggcgtcctgctcacaaactgggaaagtgtgaaaactatttaagataattattacagaccaattatgttgatatatacatttaaatgtagaaatttatttttgatagttaaatcttgattttagaagaaaacccttttgtcaacaattttgtgtacatatttggcattttcagttctgtacgcatctgcgggttgcagcccacgccgcttactctcagcggatgcagctgctcacttgggggcactggcctcttaggttttaacgatgtcaacagtgtagtttagaaaatggcccgttagtggctctattgcaataatgttagggacattatatgatttccacgcaggtcacaccatctgggcctgaggtagcagtgggtcactttgatccactttgcaggacttattctgtaacggtttgtggccaagttttgggaagtggttgattctctttgccttcatttcaccttcctcttcgtttacggttaggacatcgctgcttgatccttacaatactgtgcaactgcaatgcaacgtggccctgcttcaggtgatccgcgggaggggcctccacgccagcgccgggaaggctgctggggcctccacacctgcctcatcacggcggcgaggctacgacaatccggctgggagcatgaccttggcgtctgttctgggagcacggatgataagctctggaagctggcagtgtgtaaagcactggcaagtttgttactgttaaaatgtcaaataccaatgctttatatcgacgcgaagtgcttaacacagccgggcttgggggcagtcaggaggaagctggccatccgtggaggaggggccggtcctggactcccgcaggactcctctgatgcagggcctgaagtctgtacacgtggtccagatttgtccttgtcttttcttcacactgagttctctatatttattgaacatcttgtccttttaagccagagtagtgtaaactgcgtctcggatgtctgtcttttgcctcgaagccacgatggatcgctggtttcctctgcagcgcgagggctccggcgaccagaggattcttcccggaaggcattcctgccgcgctccccggggcacccctcaattgtgtactacgtccttgtttagtgtgtatccgtgcccacgtagatgatgtctgtaacgtagttttgtttgaaatatgagaatatgcggcttaaactttgatctgtaaggagcggggccgtggccgtttggagcacgctgtagacaccgttcctcatgctgccgggtgggttttgcagaagctcccttagtgatttcatgtttaacaggcagcatccattttcagaatttcctggcattgatttatattttgaagcatacaggaaacttctcgtttcctcgtttagccccacccagatcaggtgaaagggcagctttaatggtggtttttatggaccacattatcagagagcactgtgcaagccaaatggttcaataatgaatgaaaattctgggtgtaaagagtaaatatgccctggctctttctaccaatgtttgctcctggttggaaagaaaccaaagatttaagacgggctgctcttccagactggctgtgcctgcctgtgcccagcaacctgtgcagccggcagtgtgcctggtgtcacgccaggaggctgtggctgctgtgggccctctggaattgtgctcctcacaaagtttccccaaaaggttcttctaagcctttattgtccctggtaaatgtttcccggctgggcgcggtggctcacgcctgtaatcccagcactttgggaggccgaggcgggtggatcacctaaggtcaggagtttgagatcagcctgcccaacatggtgaaacctcgtctctactaaaaatacacaacttagccagtcttgttggcgcacgcctgtaatctcagctactagggatgctgaggcaggagaatcgcttgaacccaagaaagaggtggaggttgcggtgagccaagattgcgccactgcactccagcctgggcaaacagagggagactccatcgccccccctcaacaaaaaaaaaagtttcccatacactggcctgccccaaaacccactaacaattttagcaaaacagtccaggccaaagaggaagcatttcatgttcaataagaaacccagccattccgcatggctggttcctgagtggctctggtgatactctccagccacctgctgacattgagaatctcagacctcgggactgctgttgcggtaccgtgtgtctgacacctgccagcagccctttgctatctgcgcgcaggatgggggtgactgcccagacattcccgctagataggctctgatttccggggcagcctttcagatgcggcagacatacaacacctgtactttagagttttaagggaaaaaaaaatcagaagtgctggttagatagtaaaaacttaggataacttagaaaggctagttttagcttcctttgtggctccctggtgcaaaacaattagcagttatgcaatggacctgattctagtttattctaattaagaagtgaggccgggtttgacttcgttcctgaatacaatcttgagtaactgggaaagtctgagtgaaaggatggcctcattctctttctaatcttgctggtttcaagattagaaaatggcattatttgatctgaaatgtttgagaagacacgaataaagttacttgggcaga

SEQ ID NO: 304353 - DNA, 4547 bp, Homo sapiens
  misc_feature (4426)..(4426): n is a, c, g, or t
caggggccgctaacggtccggcgcccctcggcgtccgcgcgcccccagcctggcggacgagcccggcggcggagatgggggcgacgggggcggcggagccgctgcaatccgtgctgtgggtgaagcagcagcgctgcgccgtgagcctggagcccgcgcgggctctgctgcgctggtggcggagcccggggcccggagccggcgcccccggcgcggatgcctgctctgtgcctgtatctgagatcatcgccgttgaggaaacagacgttcacgggaaacatcaaggcagtggaaaatggcagaaaatggaaaagccttacgcttttacagttcactgtgtaaagagagcacgacggcaccgctggaagtgggcgcaggtgactttctggtgtccagaggagcagctgtgtcacttgtggctgcagaccctgcgggagatgctggagaagctgacgtccagaccaaagcatttactggtatttatcaacccgtttggaggaaaaggacaaggcaagcggatatatgaaagaaaagtggcaccactgttcaccttagcctccatcaccactgacatcatcgttactgaacatgctaatcaggccaaggagactctgtatgagattaacatagacaaatacgacggcatcgtctgtgtcggcggagatggtatgttcagcgaggtgctgcacggtctgattgggaggacgcagaggagcgccggggtcgaccagaaccacccccgggctgtgctggtccccagtagcctccggattggaatcattcccgcagggtcaacggactgcgtgtgttactccaccgtgggcaccagcgacgcagaaacctcggcgctgcatatcgttgttggggactcgctggccatggatgtgtcctcagtccaccacaacagcacactccttcgctactccgtgtccctgctgggctacggcttctacggggacatcatcaaggacagtgagaagaaacggtggttgggtcttgccagatacgacttttcaggtttaaagaccttcctctcccaccactgctatgaagggacagtgtccttcctccctgcacaacacacggtgggatctccaagggataggaagccctgccgggcaggatgctttgtttgcaggcaaagcaagcagcagctggaggaggagcagaagaaagcactgtatggtttggaagctgcggaggacgtggaggagtggcaagtcgtctgtgggaagtttctggccatcaatgccacaaacatgtcctgtgcttgtcgccggagccccaggggcctctccccggctgcccacttgggagacgggtcttctgacctcatcctcatccggaaatgctccaggttcaattttctgagatttctcatcaggcacaccaaccagcaggaccagtttgacttcacttttgttgaagtttatcgcgtcaagaaattccagtttacgtcgaagcacatggaggatgaggacagcgacctcaaggagggggggaagaagcgctttgggcacatttgcagcagccacccctcctgctgctgcaccgtctccaacagctcctggaactgcgacggggaggtcctgcacagccctgccatcgaggtcagagtccactgccagctggttcgactctttgcacgaggaattgaagagaatccgaagccagactcacacagctgagaagccggcgtcctgctcacaaactgggaaagtgtgaaaactatttaagataattattacagaccaattatgttgatatatacatttaaatgtagaaatttatttttgatagttaaatcttgattttagaagaaaacccttttgtcaacaattttgtgtacatatttggcattttcagttctgtacgcatctgcgggttgcagcccacgccgcttactctcagcggatgcagctgctcacttgggggcactggcctcttaggttttaacgatgtcaacagtgtagtttagaaaatggcccgttagtggctctattgcaataatgttagggacattatatgatttccacgcaggtcacaccatctgggcctgaggtagcagtgggtcactttgatccactttgcaggacttattctgtaacggtttgtggccaagttttgggaagtggttgattctctttgccttcatttcaccttcctcttcgtttacggttaggacatcgctgcttgatccttacaatactgtgcaactgcaatgcaacgtggccctgcttcaggtgatccgcgggaggggcctccacgccagcgccgggaaggctgctggggcctccacacctgcctcatcacggcggcgaggctacgacaatccggctgggagcatgaccttggcgtctgttctgggagcacggatgataagctctggaagctggcagtgtgtaaagcactggcaagtttgttactgttaaaatgtcaaataccaatgctttatatcgacgcgaagtgcttaacacagccgggcttgggggcagtcaggaggaagctggccatccgtggaggaggggccggtcctggactcccgcaggactcctctgatgcagggcctgaagtctgtacacgtggtccagatttgtccttgtcttttcttcacactgagttctctatatttattgaacatcttgtccttttaagccagagtagtgtaaactgcgtctcggatgtctgtcttttgcctcgaagccacgatggatcgctggtttcctctgcagcgcgagggctccggcgaccagaggattcttcccggaaggcattcctgccgcgctccccggggcacccctcaattgtgtactacgtccttgtttagtgtgtatccgtgcccacgtagatgatgtctgtaacgtagttttgtttgaaatatgagaatatgcggcttaaactttgatctgtaaggagcggggccgtggccgtttggagcacgctgtagacaccgttcctcatgctgccgggtgggttttgcagaagctcccttagtgatttcatgtttaacaggcagcatccattttcagaatttcctggcattgatttatattttgaagcatacaggaaacttctcgtttcctcgtttagccccacccagatcaggtgaaagggcagctttaatggtggtttttatggaccacattatcagagagcactgtgcaagccaaatggttcaataatgaatgaaaattctgggtgtaaagagtaaatatgccctggctctttctaccaatgtttgctcctggttggaaagaaaccaaagatttaagacgggctgctcttccagactggctgtgcctgcctgtgcccagcaacctgtgcagccggcagtgtgcctggtgtcacgccaggaggctgtggctgctgtgggccctctggaattgtgctcctcacaaagtttccccaaaaggttcttctaagcctttattgtccctggtaaatgtttcccggctgggcgcggtggctcacgcctgtaatcccagcactttgggaggccgaggcgggtggatcacctaaggtcaggagtttgagatcagcctgcccaacatggtgaaacctcgtctctactaaaaatacacaacttagccagtcttgttggcgcacgcctgtaatctcagctactagggatgctgaggcaggagaatcgcttgaacccaagaaagaggtggaggttgcggtgagccaagattgcgccactgcactccagcctgggcaaacagagggagactccatcgccccccctcaacaaaaaaaaaagtttcccatacactggcctgccccaaaacccactaacaattttagcaaaacagtccaggccaaagaggaagcatttcatgttcaataagaaacccagccattccgcatggctggttcctgagtggctctggtgatactctccagccacctgctgacattgagaatctcagacctcgggactgctgttgcggtaccgtgtgtctgacacctgccagcagccctttgctatctgcgcgcaggatgggggtgactgcccagacattcccgctagataggctctgatttccggggcagcctttcagatgcggcagacatacaacacctgtactttagagttttaagggaaaaaaaaatcagaagtgctggttagatagtaaaaacttaggataacttagaaaggctagttttagcttcctttgtggctccctggtgcaaaacaattagcagttatgcaatggacctgattctagtttattctaattaagaagtgaggccgggtttgacttcgttcctgaatacaatcttgagtaactgggaaagtctgagtgaaaggatggcctcattctctttctaatcttgctggtttcaagattagaaaatggcattatttgatctgaaatgtttgagaagacacgaataaagttacttgggcagaaaaaaaaaaaanaaaaaaaaaaactgagggggggcccgtcccatatcccctaagggagtgattacaataattgccggcgttacaagtcggacggaaaaccgcgtaccaattatgcctgaaaatccctttgcat

SEQ ID NO: 304354 - DNA, 4360 bp, Homo sapiens
caggggccgctaacggtccggcgcccctcggcgtccgcgcgcccccagcctggcggacgagcccggcggcggagatgggggcgacgggggcggcggagccgctgcaatccgtgctgtgggtgaagcagcagcgctgcgccgtgagcctggagcccgcgcgggctctgctgcgctggtggcggagcccggggcccggagccggcgcccccggcgcggatgcctgctctgtgcctgtatctgagatcatcgccgttgaggaaacagacgttcacgggaaacatcaaggcagtggaaaatggcagaaaatggaaaagccttacgcttttacagttcactgtgtaaagagagcacgacggcaccgctggaagtgggcgcaggtgactttctggtgtccagaggagcagctgtgtcacttgtggctgcagaccctgcgggagatgctggagaagctgacgtccagaccaaagcatttactggtatttatcaacccgtttggaggaaaaggacaaggcaagcggatatatgaaagaaaagtggcaccactgttcaccttagcctccatcaccactgacatcatcgttactgaacatgctaatcaggccaaggagactctgtatgagattaacatagacaaatacgacggcatcgtctgtgtcggcggagatggtatgttcagcgaggtgctgcacggtctgattgggaggacgcagaggagcgccggggtcgaccagaaccacccccgggctgtgctggtccccagtagcctccggattggaatcattcccgcagggtcaacggactgcgtgtgttactccaccgtgggcaccagcgacgcagaaacctcggcgctgcatatcgttgttggggactcgctggccatggatgtgtcctcagtccaccacaacagcacactccttcgctactccgtgtccctgctgggctacggcttctacggggacatcatcaaggacagtgagaagaaacggtggttgggtcttgccagatacgacttttcaggtttaaagaccttcctctcccaccactgctatgaagggacagtgtccttcctccctgcacaacacacggtgggatctccaagggataggaagccctgccgggcaggatgctttgtttgcaggcaaagcaagcagcagctggaggaggagcagaagaaagcactgtatggtttggaagctgcggaggacgtggaggagtggcaagtcgtctgtgggaagtttctggccatcaatgccacaaacatgtcctgtgcttgtcgccggagccccaggggcctctccccggctgcccacttgggagacgggtcttctgacctcatcctcatccggaaatgctccaggttcaattttctgagatttctcatcaggcacaccaaccagcaggaccagtttgacttcacttttgttgaagtttatcgcgtcaagaaattccagtttacgtcgaagcacatggaggatgaggacagcgacctcaaggagggggggaagaagcgctttgggcacatttgcagcagccacccctcctgctgctgcaccgtctccaacagctcctggaactgcgacggggaggtcctgcacagccctgccatcgaggtcagagtccactgccagctggttcgactctttgcacgaggaattgaagagaatccgaagccagactcacacagctgagaagccggcgtcctgctcacaaactgggaaagtgtgaaaactatttaagataattattacagaccaattatgttgatatatacatttaaatgtagaaatttatttttgatagttaaatcttgattttagaagaaaacccttttgtcaacaattttgtgtacatatttggcattttcagttctgtacgcatctgcgggttgcagcccacgccgcttactctcagcggatgcagctgctcacttgggggcactggcctcttaggttttaacgatgtcaacagtgtagtttagaaaatggcccgttagtggctctattgcaataatgttagggacattatatgatttccacgcaggtcacaccatctgggcctgaggtagcagtgggtcactttgatccactttgcaggacttattctgtaacggtttgtggccaagttttgggaagtggttgattctctttgccttcatttcaccttcctcttcgtttacggttaggacatcgctgcttgatccttacaatactgtgcaactgcaatgcaacgtggccctgcttcaggtgatccgcgggaggggcctccacgccagcgccgggaaggctgctggggcctccacacctgcctcatcacggcggcgaggctacgacaatccggctgggagcatgaccttggcgtctgttctgggagcacggatgataagctctggaagctggcagtgtgtaaagcactggcaagtttgttactgttaaaatgtcaaataccaatgctttatatcgacgcgaagtgcttaacacagccgggcttgggggcagtcaggaggaagctggccatccgtggaggaggggccggtcctggactcccgcaggactcctctgatgcagggcctgaagtctgtacacgtggtccagatttgtccttgtcttttcttcacactgagttctctatatttattgaacatcttgtccttttaagccagagtagtgtaaactgcgtctcggatgtctgtcttttgcctcgaagccacgatggatcgctggtttcctctgcagcgcgagggctccggcgaccagaggattcttcccggaaggcattcctgccgcgctccccggggcacccctcaattgtgtactacgtccttgtttagtgtgtatccgtgcccacgtagatgatgtctgtaacgtagttttgtttgaaatatgagaatatgcggcttaaactttgatctgtaaggagcggggccgtggccgtttggagcacgctgtagacaccgttcctcatgctgccgggtgggttttgcagaagctcccttagtgatttcatgtttaacaggcagcatccattttcagaatttcctggcattgatttatattttgaagcatacaggaaacttctcgtttcctcgtttagccccacccagatcaggtgaaagggcagctttaatggtggtttttatggaccacattatcagagagcactgtgcaagccaaatggttcaataatgaatgaaaattctgggtgtaaagagtaaatatgccctggctctttctaccaatgtttgctcctggttggaaagaaaccaaagatttaagacgggctgctcttccagactggctgtgcctgcctgtgcccagcaacctgtgcagccggcagtgtgcctggtgtcacgccaggaggctgtggctgctgtgggccctctggaattgtgctcctcacaaagtttccccaaaaggttcttctaagcctttattgtccctggtaaatgtttcccggctgggcgcggtggctcacgcctgtaatcccagcactttgggaggccgaggcgggtggatcacctaaggtcaggagtttgagatcagcctgcccaacatggtgaaacctcgtctctactaaaaatacacaacttagccagtcttgttggcgcacgcctgtaatctcagctactagggatgctgaggcaggagaatcgcttgaacccaagaaagaggtggaggttgcggtgagccaagattgcgccactgcactccagcctgggcaaacagagggagactccatcgccccccctcaacaaaaaaaaaagtttcccatacactggcctgccccaaaacccactaacaattttagcaaaacagtccaggccaaagaggaagcatttcatgttcaataagaaacccagccattccgcatggctggttcctgagtggctctggtgatactctccagccacctgctgacattgagaatctcagacctcgggactgctgttgcggtaccgtgtgtctgacacctgccagcagccctttgctatctgcgcgcaggatgggggtgactgcccagacattcccgctagataggctctgatttccggggcagcctttcagatgcggcagacatacaacacctgtactttagagttttaagggaaaaaaaaatcagaagtgctggttagatagtaaaaacttaggataacttagaaaggctagttttagcttcctttgtggctccctggtgcatgaggccgggtttgacttcgttcctgaatacaatcttgagtaactgggaaagtctgagtgaaaggatggcctcattctctttctaatcttgctggtttcaagattagaaaatggcattatttgatctgaaatgtttgagaagacacgaataaagttacttgggcaga

SEQ ID NO: 304355 - DNA, 814 bp, Homo sapiens
caggggccgctaacggtccggcgcccctcggcgtccgcgcgcccccagcctggcggacgagcccggcggcggagatgggggcgacgggggcggcggagccgctgcaatccgtgctgtgggtgaagcagcagcgctgcgccgtgagcctggagcccgcgcgggctctgctgcgctggtggcggagcccggggcccggagccggcgcccccggcgcggatgcctgctctgtgcctgtatctgagatcatcgccgttgaggaaacagacgttcacgggaaacatcaaggcagtggaaaatggcagaaaatggaaaagccttacgcttttacagttcactgtgtaaagagagcacgacggcaccgctggaagtgggcgcaggtgactttctggtgtccagaggagcagctgtgtcacttgtggctgcagaccctgcgggagatgctggagaagctgagtacgtgtgtgtttggactgagagacaggatggccgtggtggcatgcgcatgcctgattgggtgatcttcctgaagtgtctccccgtttcgtgcagctggccataccccaggtggacatgatgagtcaggctgacttaatttctcatgagcagaccatcccagtgaatgcaaagggcatgggctccacagcctggaccctggcatggagtccagccccctgctcactggccaggaggcctgggggcgggtcacttacccttctgagcctcagtttctctttctggaagcggagatggtaatagcttttacattcgaggtgaatgtgagaattaaactgggcacatggaggaatacacctca

SEQ ID NO: 304356 - DNA, 412 bp, Homo sapiens
acatcttcttactacactttggtatagtgtacaattttggaagtaacttgtataataaggaaaaattataaaagagacgtaatctctttcaaagaaattattatttgccggcaattaaataccaggaacgctgcatgtcatcgcgcagactgtggcccgagagaggttcatgttcacgttccctgaggtcagcttgatcccgtcccataagagcgatgtagaattgaagagggaattttatctaggaaatccgcctgaaggtgttacaggaactcattttaaaagaatggatgatttgccttttacgtgaggactcacagatgtgaatataaactgtgtgatgtaatttttccccacagttactgaacatgctaatcaggccaaggagactctgtatgagattaacatagac

SEQ ID NO: 304357 - DNA, 304 bp, Homo sapiens
gctgccttccctcacggccgttctctcccacaggggactcgctggccatggatgtgtcctcagtccaccacaacagcacactccttcgctactccgtgtccctgctgggctacggcttctacggggacatcatcaaggacagtgagaagaaacggtggttgggtcttgccagatacgacttttcaggtaactcagaataatgcagactcgctccccgctggtcgtgccccgactgccttcacagatgttacctgactgaatccactgagcaccgtcagaggtgggcccccacctgctcacagac

SEQ ID NO: 304358 - DNA, 407 bp, Homo sapiens
aaaacttaggataacttagaaaggctagttttagcttcctttgtggctccctggtgcaaaacaattagcagttatgcaatggacctgattctagtttattctaattaagaagtgaggccgggtttgacttcgttcctgaatacaatcttgagtaactgggaaagtctgagtgaaaggatggcctcattctctttctaatcttgctggtttcaagattagaaaatggcattatttgatctgaaatgtttgagaagacacgaataaagttacttgggcagacttggcttgctttctttcctttacacatacctgttattttcaaagcagaatatttttcatgaaaacacacacaatttaaagaacaagaataaaatgaagcaaggtgtcaccaccacctatgccaggca

SEQ ID NO: 304359 - DNA, 873 bp, Homo sapiens
gattcacatccattggtcaggggcaaataccactagctctgcatcctcagtcactttgtgccatttcatcaggtcagagccaaaggaaagcttgaaaaatgaagacattagcaggacttgttctgggacttgtcatctttgatgctgctgtgactgccccaactctagagtccatcaactatgactcagaaacctatgatgccaccttagaagacctggataatttgtacaactatgaaaacatacctgttgataaagttgagattgaaatagccacagtgatgccttcagggaacagagagctcctcactccacccccacagcctgagaaggcccaggaagaggaagaggaggaggaatctactcccaggctgattgatggctcttctccccaggagcctgaattcacaggggttctggggccacacacaaatgaagactttccaacctgtcttttgtgtacttgtataagtaccaccgtgtactgtgatgaccatgaacttgatgctattcctccgctgccaaagaacaccgcttatttctattcccgctttaacagaattaaaaagatcaacaaaaatgactttgcaagcctaagtatggatgacagcattaacggccttcaccgctttacacacttcctttaaatttttacattgttaaatgttagcactgagaatgaaacttgaatgccaaagcctggttcatgaatcaatagttttttgttatttaaaaatttgagagtttgctttaacaattataagaaaaacaacaaataagcaatggtcatttcaaaaccatataggtgatgttttcaaatgagcaatttaaactaaatatgcataataaataattatattgtacatgctggaa

SEQ ID NO: 304360 - DNA, 1553 bp, Homo sapiens
gattcacatccattggtcaggggcaaataccactagctctgcatcctcagtcactttgtgccatttcatcaggtcagagccaaaggaaagcttgaaaaatgaagacattagcaggacttgttctgggacttgtcatctttgatgctgctgtgactgccccaactctagagtccatcaactatgactcagaaacctatgatgccaccttagaagacctggataatttgtacaactatgaaaacatacctgttgataaagttgagattgaaatagccacagtgatgccttcagggaacagagagctcctcactccacccccacagcctgagaaggcccaggaagaggaagaggaggaggaatctactcccaggctgattgatggctcttctccccaggagcctgaattcacaggggttctggggccacacacaaatgaagactttccaacctgtcttttgtgtacttgtataagtaccaccgtgtactgtgatgaccatgaacttgatgctattcctccgctgccaaagaacaccgcttatttctattcccgctttaacagaattaaaaagatcaacaaaaatgactttgcaagcctaagtgatttaaaaaggattgatctgacatcaaatttaatatctgagattgatgaagatgcattccgaaaactgcctcaacttcgagagcttgtcctgcgtgacaacaaaataaggcagctcccagaattgccaaccactttgacatttattgatattagcaacaatagacttggaaggaaagggataaagcaagaagcatttaaagacatgtatgatctccatcatctgtacctcactgataacaacttggaccacatccctctgccactcccagaaaatctacgagcccttcacctccagaataacaacattctggaaatgcacgaagatacgttctgcaatgttaaaaatttgacttatattcgtaaggcactagaggacattcgattggatggaaaccctattaatctcagcaaaactcctcaagcatacatgtgtctacctcgtctgcctgttgggagccttgtctaatttcagataatggttagcattacgatggctactataaataaaccattcttactgctctcttccaaaacaaaactcagcatgatactttgagattgtgttctgagagatgatatgactacataaaatacaattaaaaatgtttataatgaaaatgtagtaatttaagaaaacaccagatgagttaggaataaacctataacatttacaaaaagagcaaaactaagtgatagaaaatatttcacacatgttcttatagatcatgtatcacttgcaagttttaggagttcatatcctatatcatttcaaattaagtacataataaagtaaaattttgaaatgaacactttaggtatttttgccaagatttagatgtttttaattaaacttttctcttcctttttttttcactaaagcatgtttattcccctaatccattaaagagcatgaaaaaaagaataaatgtatttgaaaattaaaaaaaaagcc

SEQ ID NO: 304361 - DNA, 2935 bp, Homo sapiens
agagatgctcaatgactcccaatacaacccaaagagacaaacgcttgttttttctgccacactcaccctggtgcatcaggctcctgctcgaatccttcataagaagcacaccaagaaaatggataaaacagccaaacttgacctccttatgcagaaaattggcatgaggggcaagcccaaggtcattgacctcacaaggaatgaggccacggtggagacgctaacagagaccaagatccattgtgagactgatgagaaagacttctacttgtactacttcctgatgcagtatccaggccgcagcttagtgtttgccaacagtatctcctgcatcaaacgcctctctgggctcctcaaagtccttgatatcatgcccttgaccctgcatgcctgtatgcaccagaagcagaggctcagaaacctggagcagtttgcccgtctggaagactgtgttctcttggcaacagatgtggcggctcggggtctggatattcctaaagtccagcatgtcatccattaccaggtcccacgtacctcggagatttatgtccaccgaagtggtcgaactgctcgagctaccaatgaaggcctcagtctgatgctcattgggcctgaggatgtgatcaactttaagaagatttacaaagcgctcaagaaagatgaggatatcccactgttccccgtgcagacaaaatacatggatgtggtcaaggagcgaatccgtttagctcgacagattgagaaatctgagtatcggaacttccaggcttgcctgcacaactcttggattgagcaggcagcagtgccctgctctgttggtggttggggacagctcgcctgcagtggatgccgtggtggagtgcaactcaaaattggacccaacaaagaccactctcctcaagatggcggactgtggcggcctcccgcagatctcccagccggccaagctcgctgaggccttcaagtacttcgtgcagggcatgggatacatgccctcggctagcatgacccgcctgatgcggtcccgcacagcctctggttccagcgtcacttctctggatggcacccgcagccgctcccacaccagcgagggcacccgaagccgctcccacaccagcgagggcacccgcagccgctcgcacaccagcgagggggcccacctggacatcacccccaactcgggtgctgctgggaacagcgccgggcccaagtccatggaggtctcctgctaggcggcctgcccagctgccgcccccggactctgatctctgtagtggccccctcctccccggccccttttcgccccctgcctgccatactgcgcctaactcggtattaatccaaagcttattttgtaagagtgagctctggtggagacaaatgaggtctattacgtgggtgccctctccaaaggcggggtggcggtggaccaaaggaaggaagcaagcatctccgcatcgcatcctcttccattaaccagtggccggttgccactctcctcccctccctcagagacaccaaactgccaaaaacaagacgcgtagcagcacacacttcacaaagccaagcctaggccgccctgagcatcctggttcaaacgggtgcctggtcagaaggccagccgcccacttcccgtttcctctttaactgaggagaagctgatccagtttccggaaacaaaatccttttctcatttggggaggggggtaatagtgacatgcaggcacctcttttaaacaggcaaaacaggaagggggaaaaggtgggattcatgtcgaggctagaggcatttggaacaacaaatctacgtagttaacttgaagaaaccgatttttaaagttggtgcatctagaaagctttgaatgcagaagcaaacaagcttgatttttctagcatcctcttaatgtgcagcaaaagcaggcgacaaaatctcctggctttacagacaaaaatatttcagcaaacgttgggcatcatggtttttgaaggctttagttctgctttctgcctctcctccacagccccaacctcccacccctgatacatgagccagtgattattcttgttcagggagaagatcatttagatttgttttgcattccttagaatggagggcaacattccacagctgccctggctgtgatgagtgtccttgcaggggccggagtaggagcactggggtgggggcggaattggggttactcgatgtaagggattccttgttgttgtgttgagatccagtgcagttgtgatttctgtggatcccagcttggttccaggaattttgtgtgattggcttaaatccagttttcaatcttcgacagctgggctggaacgtgaactcagtagctgaacctgtctgacccggtcacgttcttggatcctcagaactctttgctcttgtcggggtgggggtgggaactcacgtggggagcggtggctgagaaaatgtaaggattctggaatacatattccatgggactttccttccctctcctgcttcctcttttcctgctccctaacctttcgccgaatggggcagcaccactgacgtttctgggcggccagtgcggctgccaggttcctgtactactgccttgtacttttcattttggctcaccgtggattttctcataggaagtttggtcagagtgaattgaatattgtaagtcagccactgggacccgaggatttctgggaccccgcagttgggaggaggaagtagtccagccttccaggtggcgtgagaggcaatgactcgttacctgccgcccatcaccttggaggccttccctggccttgagtagaaaagtcggggatcggggcaagagaggctgagtacggatgggaaactattgtgcacaagtctttccagaggagtttcttaatgagatatttgtatttatttccagaccaataaatttgtaactttgca

SEQ ID NO: 304362 - DNA, 717 bp, Homo sapiens
tggatggccctctttgctgaggacttggtgaatgtttggagcagggtaagctagcagtagctgggtctttattcagcacttatttgctgtgcatcttgtgcatgggcctctgaaaataaggaactggatatagtcccaggccctgcatttgggggatcaggtccaggagggaactggagacaggaactgagtttctatcaagggggatgtccttgaggcctgcatgtaggggggagtccagcaatgccaccctgcacccagggaagtggggttttgctgaccttgttaactactgttagctcctggtttctcatccacccactttactcctttccagatctcaggatggacccaagctctgccggacatggtggtgtcccacctttttgggaaggaagaaatgcagagtaacgtggaagtggtccacacctaccgccagcacattgtgaatgacatgaaccccggcaacctgcacctgttcatcaatgcctacaacagccggcgcgacctggagattgagcgaccaatgccgggaacccacacagtcaccctgcagtgccctgctctgttggtggttggggacagctcgcctgcagtggatgccgtggtggagtgcaactcaaaattggacccaacaaagaccactctcctcaagatggcggactgtggcggcctcccgcagatctcccacccgcccagctcgctgtatgagcccaa

SEQ ID NO: 304363 - DNA, 789 bp, Homo sapiens
tgctgtacaggtttgtacagcaaacctaggagcaaagggctgttctatacagccttggtgagttgtagactatactgtctaggtgtgtgtaagtatactctgagatcttcacacaatgacaaaatctcctaatgatgaattttctcagaaagtatccctgttattcagcgatgcataactctgtctctctctctgtgtgtgtgtgtgtgtgtgtgtgtgtgtgtgtgtatgcatgtgtttatcctggaagtaagtaatacagttgttactgccacaactagagagcatttgtgctgtgcgccttgtttgattgatgaggtcgatggtgtgttacacccatttgatagctggagaagctgagcctccgtgggttgaagtgacttgcccaaggcaggcctgcaaagcagcgggcttcctacttctcctgcacttcctctttctccttcccactctctctaggacccgataccgtgtctgctgtgctggaacctcagttttgcatggggtggggccggggagcagcagcctgctctgctgcccacactgcctttttctgggtacttctctcaagctttggtttgccttggaaagttcctagtgtttcagattgctgggatgtctgtctcactttgtgtcttgaattgcagctaaacaaccctgagatggtggagggccttgtccttatcaacgtgaacccttgtgcggaaggctggatggactgggccgcctccaagaggtgaggtgggggcctgtcaggccggcgggatccctgcaagaagagggacaggt

SEQ ID NO: 304364 - DNA, 716 bp, Homo sapiens
ggcctcgggtgatctggctccccagcaactgactgcattttctctccttgtctctcgcagccggccaagctcgctgaggccttcaagtacttcgtgcagggcatgggatacagtgagtatggcattccccgtgtgcagtgggtcggggcatgtgtcggaattggaagtgctctgtcctgagccaggtttggatgagcaattctgtgtccccctggccagcttcagctttctgggaggaaacagttaggtgtgtggagggcatgtggcagcctggaggatctagcctctcatttatcagtgaggctcatttttcctcctttgttgaatagaagttgtttcacaccagggattttggggggtttagatgaggactgtccctttaagcaccaagacaatgaccaacagtgaaacaataacatttttaaaaattttgatcacaagttttaagagaccactagctacagtgatgatgaagatggtgtcgatgatgatgaaagattactaacacattattttatctcactgaaccatcacagtactcctttgacatattcttagcccatcttatcagtgatgaagctgaggcttcggggttgtaagcagggagcagagggcggatctgtggaaattctttgaagactgtgaagctctgtggaagtggctaacaaagttgcttacattccaggtggagcatgccatagtcaagtcatgagctt

SEQ ID NO: 304365 - DNA, 963 bp, Homo sapiens
tcttggggaatggagtgaaattatctgtagggcctagcatagtgcctggcacgtagcaagctgcaagtgatggttgccacggagacaccagcagccttgcctggtggggctggattgttccctacccacggtccaccctgttcctcctttgtaaggcaggacaaggcagggcagggcagcgggcggatgggcatcctttcggaaaaaattcatagagcgcagagggccttggctgtggtgtttggcactaacgagcttccctctctcctagatggcggactgtggcggcctcccgcagatctcccagccggccaagctcgctgaggccttcaagtacttcgtgcagggcatgggatacagtgagtatggcattccccgtgtgcagtgggtcggggcatgtgtcggaattggaagtgctctgtcctgagccaggtttggatgagcaattctgtgtccccctggccagcttcagctttctgggaggaaacagttaggtgtgtggagggcatgtggcagcctggaggatctagcctctcatttatcagtgaggctcatttttcctcctttgttgaatagaagttgtttcacaccagggattttggggggtttagatgaggactgtccctttaagcaccaagacaatgaccaacagtgaaacaataacatttttaaaaattttgatcacaagttttaagagaccactagctacagtgatgatgaagatggtgtcgatgatgatgaaagattactaacacattattttatctcactgaaccatcacagtactcctttgacatattcttagcccatcttatcagtgatgaagctgaggcttcggggttgtaagcagggagcagagggcggatctgtggaaattctttgaagactgtgaagctctgtggaagtggctaacaaagttgcttacattccaggtggagcatgccatagtcaagtcatgagctt

SEQ ID NO: 304366 - DNA, 408 bp, Homo sapiens
ttagaatggagggcaacattccacagctgccctggctgtgatgagtgttcctccccggccccttttcgccccctgcctgccatactgcgcctaactcggtattaatccaaagcttattttgtaagagtgagctctggtggagacaaatgaggtctattacgtgggtgccctctccaaaggcggggtggcggtggaccaaaggaaggaagcaagcatctccgcatcgcatcctcttccattaaccagtggccggttgccactctcctcccctccctcagagacaccaaactgccaaaaacaagagaggctgagtacggatgggaaactattgtgcacaagtctttccagaggagtttcttaatgagatatttgtatttatttccagaccaataaatttgtaactttgca

SEQ ID NO: 304367 - DNA, 464 bp, Homo sapiens
tggatggccctctttgctgaggacttggtgaatgtttggagcagggtaagctagcagtagctgggtctttattcagcacttatttgctgtgcatcttgtgcatgggcctctgaaaataaggaactggatatagtcccaggccctgcatttgggggatcaggtccaggagggaactggagacaggaactgagtttctatcaagggggatgtccttgaggcctgcatgtaggggggagtccagcaatgccaccctgcacccagggaagtggggttttgctgaccttgttaactactgttagctcctggtttctcatccacccactttactcctttccagatctcaggatggacccaagctctgccggacatggtggtgtcccacctttttgggaaggtgagttgcgtggtctggcaaatctgttgttcctgctgagcaaggcattgtgtggtgctcagcacagggc

SEQ ID NO: 304368 - DNA, 526 bp, Homo sapiens
ggcctcgggtgatctggctccccagcaactgactgcattttctctccttgtctctcgcagccggccaagctcgctgaggccttcaagtacttcgtgcagggcatgggatacagtgagtatggcattccccgtgtgcagtgggtcggggcatgtgtcggaattggaagtgcttggcttgatgaaccctttgcacacctggcatcagtgctcactgtacgcttctcatcctgctcagtagacatcccagatttgtgggtgagaagtaggggctcagagaaatatgtgagctgcggatgtggcattgaccccaattctttctgaattcaaaactagctctttaagacaattcagcaaggattaattctgtttgggagtgcctgacatcaaaagcccctccctgtgcctatcaaggagataacataagccctgcatgcttggtgtggatcaactgcccctgtttctgatgtctgactcagtgtggcctcctagccatgatgcttcagttgggtggagtactagtttccta

SEQ ID NO: 304369 - DNA, 3058 bp, Homo sapiens
agtcgccctccgcccgcacgtacaacaaacctcaaacctcgcctggctcccagctggtgctgaagctcgtcagttcaccatccgccctcggcttccgcggggcgctgggccgccagcctcggcaccgtcctttcctttctccctcgcgttaggcaggtgacagcagggacatgtctcgggagatgcaggatgtagacctcgctgaggtgaagcctttggtggagaaaggggagaccatcaccggcctcctgcaagagtttgatgtccaggagcaggacatcgagactttacatggctctgttcacgtcacgctgtgtgggactcccaagggaaaccggcctgtcatcctcacctaccatgacatcggcatgaaccacaaaacctgctacaaccccctcttcaactacgaggacatgcaggagatcacccagcactttgccgtctgccacgtggacgcccctggccagcaggacggcgcagcctccttccccgcagggtacatgtacccctccatggatcagctggctgaaatgcttcctggagtccttcaacagtttgggctgaaaagcattattggcatgggaacaggagcaggcgcctacatcctaactcgatttgctctaaacaaccctgagatggtggagggccttgtccttatcaacgtgaacccttgtgcggaaggctggatggactgggccgcctccaagatctcaggatggacccaagctctgccggacatggtggtgtcccacctttttgggaaggaagaaatgcagagtaacgtggaagtggtccacacctaccgccagcacattgtgaatgacatgaaccccggcaacctgcacctgttcatcaatgcctacaacagccggcgcgacctggagattgagcgaccaatgccgggaacccacacagtcaccctgcagtgccctgctctgttggtggttggggacagctcgcctgcagtggatgccgtggtggagtgcaactcaaaattggacccaacaaagaccactctcctcaagatggcggactgtggcggcctcccgcagatctcccagccggccaagctcgctgaggccttcaagtacttcgtgcagggcatgggatacatgccctcggctagcatgacccgcctgatgcggtcccgcacagcctctggttccagcgtcacttctctggatggcacccgcagccgctcccacaccagcgagggcacccgaagccgctcccacaccagcgagggcacccgcagccgctcgcacaccagcgagggggcccacctggacatcacccccaactcgggtgctgctgggaacagcgccgggcccaagtccatggaggtctcctgctaggcggcctgcccagctgccgcccccggactctgatctctgtagtggccccctcctccccggccccttttcgccccctgcctgccatactgcgcctaactcggtattaatccaaagcttattttgtaagagtgagctctggtggagacaaatgaggtctattacgtgggtgccctctccaaaggcggggtggcggtggaccaaaggaaggaagcaagcatctccgcatcgcatcctcttccattaaccagtggccggttgccactctcctcccctccctcagagacaccaaactgccaaaaacaagacgcgtagcagcacacacttcacaaagccaagcctaggccgccctgagcatcctggttcaaacgggtgcctggtcagaaggccagccgcccacttcccgtttcctctttaactgaggagaagctgatccagtttccggaaacaaaatccttttctcatttggggaggggggtaatagtgacatgcaggcacctcttttaaacaggcaaaacaggaagggggaaaaggtgggattcatgtcgaggctagaggcatttggaacaacaaatctacgtagttaacttgaagaaaccgatttttaaagttggtgcatctagaaagctttgaatgcagaagcaaacaagcttgatttttctagcatcctcttaatgtgcagcaaaagcaggcgacaaaatctcctggctttacagacaaaaatatttcagcaaacgttgggcatcatggtttttgaaggctttagttctgctttctgcctctcctccacagccccaacctcccacccctgatacatgagccagtgattattcttgttcagggagaagatcatttagatttgttttgcattccttagaatggagggcaacattccacagctgccctggctgtgatgagtgtccttgcaggggccggagtaggagcactggggtgggggcggaattggggttactcgatgtaagggattccttgttgttgtgttgagatccagtgcagttgtgatttctgtggatcccagcttggttccaggaattttgtgtgattggcttaaatccagttttcaatcttcgacagctgggctggaacgtgaactcagtagctgaacctgtctgacccggtcacgttcttggatcctcagaactctttgctcttgtcggggtgggggtgggaactcacgtggggagcggtggctgagaaaatgtaaggattctggaatacatattccatgggactttccttccctctcctgcttcctcttttcctgctccctaacctttcgccgaatggggcagcaccactgacgtttctgggcggccagtgcggctgccaggttcctgtactactgccttgtacttttcattttggctcaccgtggattttctcataggaagtttggtcagagtgaattgaatattgtaagtcagccactgggacccgaggatttctgggaccccgcagttgggaggaggaagtagtccagccttccaggtggcgtgagaggcaatgactcgttacctgccgcccatcaccttggaggccttccctggccttgagtagaaaagtcggggatcggggcaagagaggctgagtacggatgggaaactattgtgcacaagtctttccagaggagtttcttaatgagatatttgtatttatttccagaccaataaatttgtaactttgca

SEQ ID NO: 304370 - DNA, 2918 bp, Homo sapiens
agtcgccctccgcccgcacgtacaacaaacctcaaacctcgcctggctcccagctggtgctgaagctcgtcagttcaccatccgccctcggcttccgcggggcgctgggccgccagcctcggcaccgtcctttcctttctccctcgcgttaggcaggtgacagcagggacatgtctcgggagatgcaggatgtagacctcgctgaggtgaagcctttggtggagaaaggggagaccatcaccggcctcctgcaagagtttgatgtccaggagcaggacatcgagactttacatggctctgttcacgtcacgctgtgtgggactcccaagggaaaccggcctgtcatcctcacctaccatgacatcggcatgaaccacaaaacctgctacaaccccctcttcaactacgaggacatgcaggagatcacccagcactttgccgtctgccacgtggacgcccctggccagcaggacggcgcagcctccttccccgcagggtacatgtacccctccatggatcagctggctgaaatgcttcctggagtccttcaacagtttgggctgaaaagcattattggcatgggaacaggagcaggcgcctacatcctaactcgatttgctctaaacaaccctgagatggtggagggccttgtccttatcaacgtgaacccttgtgcggaaggctggatggactgggccgcctccaagatctcaggatggacccaagctctgccggacatggtggtgtcccacctttttgggaaggaagaaatgcagagtaacgtggaagtggtccacacctaccgccagcacattgtgaatgacatgaaccccggcaacctgcacctgttcatcaatgcctacaacagccggcgcgacctggagattgagcgaccaatgccgggaacccacacagtcaccctgcagtgccctgctctgttggtggttggggacagctcgcctgcagtggatgccgtggtggagtgcaactcaaaattggacccaacaaagaccactctcctcaagatggcggactgtggcggcctcccgcagatctcccagccggccaagctcgctgaggccttcaagtacttcgtgcagggcatgggatacatgccctcggctagcatgacccgcctgatgcggtcccgcacagcctctggttccagcgtcacttctctggatggcacccgcagccgctcccacaccagcgagggcacccgaagccgctcccacaccagcgagggcacccgcagccgctcgcacaccagcgagggggcccacctggacatcacccccaactcgggtgctgctgggaacagcgccgggcccaagtccatggaggtctcctgctaggcggcctgcccagctgccgcccccggactctgatctctgtagtggccccccggtggaccaaaggaaggaagcaagcatctccgcatcgcatcctcttccattaaccagtggccggttgccactctcctcccctccctcagagacaccaaactgccaaaaacaagacgcgtagcagcacacacttcacaaagccaagcctaggccgccctgagcatcctggttcaaacgggtgcctggtcagaaggccagccgcccacttcccgtttcctctttaactgaggagaagctgatccagtttccggaaacaaaatccttttctcatttggggaggggggtaatagtgacatgcaggcacctcttttaaacaggcaaaacaggaagggggaaaaggtgggattcatgtcgaggctagaggcatttggaacaacaaatctacgtagttaacttgaagaaaccgatttttaaagttggtgcatctagaaagctttgaatgcagaagcaaacaagcttgatttttctagcatcctcttaatgtgcagcaaaagcaggcgacaaaatctcctggctttacagacaaaaatatttcagcaaacgttgggcatcatggtttttgaaggctttagttctgctttctgcctctcctccacagccccaacctcccacccctgatacatgagccagtgattattcttgttcagggagaagatcatttagatttgttttgcattccttagaatggagggcaacattccacagctgccctggctgtgatgagtgtccttgcaggggccggagtaggagcactggggtgggggcggaattggggttactcgatgtaagggattccttgttgttgtgttgagatccagtgcagttgtgatttctgtggatcccagcttggttccaggaattttgtgtgattggcttaaatccagttttcaatcttcgacagctgggctggaacgtgaactcagtagctgaacctgtctgacccggtcacgttcttggatcctcagaactctttgctcttgtcggggtgggggtgggaactcacgtggggagcggtggctgagaaaatgtaaggattctggaatacatattccatgggactttccttccctctcctgcttcctcttttcctgctccctaacctttcgccgaatggggcagcaccactgacgtttctgggcggccagtgcggctgccaggttcctgtactactgccttgtacttttcattttggctcaccgtggattttctcataggaagtttggtcagagtgaattgaatattgtaagtcagccactgggacccgaggatttctgggaccccgcagttgggaggaggaagtagtccagccttccaggtggcgtgagaggcaatgactcgttacctgccgcccatcaccttggaggccttccctggccttgagtagaaaagtcggggatcggggcaagagaggctgagtacggatgggaaactattgtgcacaagtctttccagaggagtttcttaatgagatatttgtatttatttccagaccaataaatttgtaactttgca

SEQ ID NO: 304371 - DNA, 3174 bp, Homo sapiens
tagtcacaggtacagtaacctgtggggccagtggggcctgagggcaaggaagcaaggaagcgcaggcttgatggcctgttttccagatggagcaaacagtccggggcagagatggtggcgggcaagccctttccccagcatttggtgcatttaacagcgcagtctgagccaggcctctgtcccctgcctcctgggagtcccctcctagccctggtccttggagtggcttctggccagagagagctgctgcccgaagccggggctcttatggccagatgagaagagagcttcctcaaaacacagttggaaacaggctggctgtcttcagccacgcggatgccatgaaccccacatgaccagcccactgtctgctgtgtctcctcaggagcaggacatcgagactttacatggctctgttcacgtcacgctgtgtgggactcccaagggaaaccggcctgtcatcctcacctaccatgacatcggcatgaaccacaaaacctgctacaaccccctcttcaactacgaggacatgcaggagatcacccagcactttgccgtctgccacgtggacgcccctggccagcaggacggcgcagcctccttccccgcagggtacatgtacccctccatggatcagctggctgaaatgcttcctggagtccttcaacagtttgggctgaaaagcattattggcatgggaacaggagcaggcgcctacatcctaactcgatttgctctaaacaaccctgagatggtggagggccttgtccttatcaacgtgaacccttgtgcggaaggctggatggactgggccgcctccaagatctcaggatggacccaagctctgccggacatggtggtgtcccacctttttgggaaggaagaaatgcagagtaacgtggaagtggtccacacctaccgccagcacattgtgaatgacatgaaccccggcaacctgcacctgttcatcaatgcctacaacagccggcgcgacctggagattgagcgaccaatgccgggaacccacacagtcaccctgcagtgccctgctctgttggtggttggggacagctcgcctgcagtggatgccgtggtggagtgcaactcaaaattggacccaacaaagaccactctcctcaagatggcggactgtggcggcctcccgcagatctcccagccggccaagctcgctgaggccttcaagtacttcgtgcagggcatgggatacatgccctcggctagcatgacccgcctgatgcggtcccgcacagcctctggttccagcgtcacttctctggatggcacccgcagccgctcccacaccagcgagggcacccgaagccgctcccacaccagcgagggcacccgcagccgctcgcacaccagcgagggggcccacctggacatcacccccaactcgggtgctgctgggaacagcgccgggcccaagtccatggaggtctcctgctaggcggcctgcccagctgccgcccccggactctgatctctgtagtggccccctcctccccggccccttttcgccccctgcctgccatactgcgcctaactcggtattaatccaaagcttattttgtaagagtgagctctggtggagacaaatgaggtctattacgtgggtgccctctccaaaggcggggtggcggtggaccaaaggaaggaagcaagcatctccgcatcgcatcctcttccattaaccagtggccggttgccactctcctcccctccctcagagacaccaaactgccaaaaacaagacgcgtagcagcacacacttcacaaagccaagcctaggccgccctgagcatcctggttcaaacgggtgcctggtcagaaggccagccgcccacttcccgtttcctctttaactgaggagaagctgatccagtttccggaaacaaaatccttttctcatttggggaggggggtaatagtgacatgcaggcacctcttttaaacaggcaaaacaggaagggggaaaaggtgggattcatgtcgaggctagaggcatttggaacaacaaatctacgtagttaacttgaagaaaccgatttttaaagttggtgcatctagaaagctttgaatgcagaagcaaacaagcttgatttttctagcatcctcttaatgtgcagcaaaagcaggcgacaaaatctcctggctttacagacaaaaatatttcagcaaacgttgggcatcatggtttttgaaggctttagttctgctttctgcctctcctccacagccccaacctcccacccctgatacatgagccagtgattattcttgttcagggagaagatcatttagatttgttttgcattccttagaatggagggcaacattccacagctgccctggctgtgatgagtgtccttgcaggggccggagtaggagcactggggtgggggcggaattggggttactcgatgtaagggattccttgttgttgtgttgagatccagtgcagttgtgatttctgtggatcccagcttggttccaggaattttgtgtgattggcttaaatccagttttcaatcttcgacagctgggctggaacgtgaactcagtagctgaacctgtctgacccggtcacgttcttggatcctcagaactctttgctcttgtcggggtgggggtgggaactcacgtggggagcggtggctgagaaaatgtaaggattctggaatacatattccatgggactttccttccctctcctgcttcctcttttcctgctccctaacctttcgccgaatggggcagcaccactgacgtttctgggcggccagtgcggctgccaggttcctgtactactgccttgtacttttcattttggctcaccgtggattttctcataggaagtttggtcagagtgaattgaatattgtaagtcagccactgggacccgaggatttctgggaccccgcagttgggaggaggaagtagtccagccttccaggtggcgtgagaggcaatgactcgttacctgccgcccatcaccttggaggccttccctggccttgagtagaaaagtcggggatcggggcaagagaggctgagtacggatgggaaactattgtgcacaagtctttccagaggagtttcttaatgagatatttgtatttatttccagaccaataaatttgtaactttgca

SEQ ID NO: 304372 - DNA, 2741 bp, Homo sapiens
actacatacttccgaccctggagcctccgtagacctaaccatgacatcggcatgaaccacaaaacctgctacaaccccctcttcaactacgaggacatgcaggagatcacccagcactttgccgtctgccacgtggacgcccctggccagcaggacggcgcagcctccttccccgcagggtacatgtacccctccatggatcagctggctgaaatgcttcctggagtccttcaacagtttgggctgaaaagcattattggcatgggaacaggagcaggcgcctacatcctaactcgatttgctctaaacaaccctgagatggtggagggccttgtccttatcaacgtgaacccttgtgcggaaggctggatggactgggccgcctccaagatctcaggatggacccaagctctgccggacatggtggtgtcccacctttttgggaaggaagaaatgcagagtaacgtggaagtggtccacacctaccgccagcacattgtgaatgacatgaaccccggcaacctgcacctgttcatcaatgcctacaacagccggcgcgacctggagattgagcgaccaatgccgggaacccacacagtcaccctgcagtgccctgctctgttggtggttggggacagctcgcctgcagtggatgccgtggtggagtgcaactcaaaattggacccaacaaagaccactctcctcaagatggcggactgtggcggcctcccgcagatctcccagccggccaagctcgctgaggccttcaagtacttcgtgcagggcatgggatacatgccctcggctagcatgacccgcctgatgcggtcccgcacagcctctggttccagcgtcacttctctggatggcacccgcagccgctcccacaccagcgagggcacccgaagccgctcccacaccagcgagggcacccgcagccgctcgcacaccagcgagggggcccacctggacatcacccccaactcgggtgctgctgggaacagcgccgggcccaagtccatggaggtctcctgctaggcggcctgcccagctgccgcccccggactctgatctctgtagtggccccctcctccccggccccttttcgccccctgcctgccatactgcgcctaactcggtattaatccaaagcttattttgtaagagtgagctctggtggagacaaatgaggtctattacgtgggtgccctctccaaaggcggggtggcggtggaccaaaggaaggaagcaagcatctccgcatcgcatcctcttccattaaccagtggccggttgccactctcctcccctccctcagagacaccaaactgccaaaaacaagacgcgtagcagcacacacttcacaaagccaagcctaggccgccctgagcatcctggttcaaacgggtgcctggtcagaaggccagccgcccacttcccgtttcctctttaactgaggagaagctgatccagtttccggaaacaaaatccttttctcatttggggaggggggtaatagtgacatgcaggcacctcttttaaacaggcaaaacaggaagggggaaaaggtgggattcatgtcgaggctagaggcatttggaacaacaaatctacgtagttaacttgaagaaaccgatttttaaagttggtgcatctagaaagctttgaatgcagaagcaaacaagcttgatttttctagcatcctcttaatgtgcagcaaaagcaggcgacaaaatctcctggctttacagacaaaaatatttcagcaaacgttgggcatcatggtttttgaaggctttagttctgctttctgcctctcctccacagccccaacctcccacccctgatacatgagccagtgattattcttgttcagggagaagatcatttagatttgttttgcattccttagaatggagggcaacattccacagctgccctggctgtgatgagtgtccttgcaggggccggagtaggagcactggggtgggggcggaattggggttactcgatgtaagggattccttgttgttgtgttgagatccagtgcagttgtgatttctgtggatcccagcttggttccaggaattttgtgtgattggcttaaatccagttttcaatcttcgacagctgggctggaacgtgaactcagtagctgaacctgtctgacccggtcacgttcttggatcctcagaactctttgctcttgtcggggtgggggtgggaactcacgtggggagcggtggctgagaaaatgtaaggattctggaatacatattccatgggactttccttccctctcctgcttcctcttttcctgctccctaacctttcgccgaatggggcagcaccactgacgtttctgggcggccagtgcggctgccaggttcctgtactactgccttgtacttttcattttggctcaccgtggattttctcataggaagtttggtcagagtgaattgaatattgtaagtcagccactgggacccgaggatttctgggaccccgcagttgggaggaggaagtagtccagccttccaggtggcgtgagaggcaatgactcgttacctgccgcccatcaccttggaggccttccctggccttgagtagaaaagtcggggatcggggcaagagaggctgagtacggatgggaaactattgtgcacaagtctttccagaggagtttcttaatgagatatttgtatttatttccagaccaataaatttgtaactttgca

SEQ ID NO: 304373 - DNA, 2688 bp, Homo sapiens
tggatggccctctttgctgaggacttggtgaatgtttggagcagggtaagctagcagtagctgggtctttattcagcacttatttgctgtgcatcttgtgcatgggcctctgaaaataaggaactggatatagtcccaggccctgcatttgggggatcaggtccaggagggaactggagacaggaactgagtttctatcaagggggatgtccttgaggcctgcatgtaggggggagtccagcaatgccaccctgcacccagggaagtggggttttgctgaccttgttaactactgttagctcctggtttctcatccacccactttactcctttccagatctcaggatggacccaagctctgccggacatggtggtgtcccacctttttgggaaggaagaaatgcagagtaacgtggaagtggtccacacctaccgccagcacattgtgaatgacatgaaccccggcaacctgcacctgttcatcaatgcctacaacagccggcgcgacctggagattgagcgaccaatgccgggaacccacacagtcaccctgcagtgccctgctctgttggtggttggggacagctcgcctgcagtggatgccgtggtggagtgcaactcaaaattggacccaacaaagaccactctcctcaagatggcggactgtggcggcctcccgcagatctcccagccggccaagctcgctgaggccttcaagtacttcgtgcagggcatgggatacatgccctcggctagcatgacccgcctgatgcggtcccgcacagcctctggttccagcgtcacttctctggatggcacccgcagccgctcccacaccagcgagggcacccgaagccgctcccacaccagcgagggcacccgcagccgctcgcacaccagcgagggggcccacctggacatcacccccaactcgggtgctgctgggaacagcgccgggcccaagtccatggaggtctcctgctaggcggcctgcccagctgccgcccccggactctgatctctgtagtggccccctcctccccggccccttttcgccccctgcctgccatactgcgcctaactcggtattaatccaaagcttattttgtaagagtgagctctggtggagacaaatgaggtctattacgtgggtgccctctccaaaggcggggtggcggtggaccaaaggaaggaagcaagcatctccgcatcgcatcctcttccattaaccagtggccggttgccactctcctcccctccctcagagacaccaaactgccaaaaacaagacgcgtagcagcacacacttcacaaagccaagcctaggccgccctgagcatcctggttcaaacgggtgcctggtcagaaggccagccgcccacttcccgtttcctctttaactgaggagaagctgatccagtttccggaaacaaaatccttttctcatttggggaggggggtaatagtgacatgcaggcacctcttttaaacaggcaaaacaggaagggggaaaaggtgggattcatgtcgaggctagaggcatttggaacaacaaatctacgtagttaacttgaagaaaccgatttttaaagttggtgcatctagaaagctttgaatgcagaagcaaacaagcttgatttttctagcatcctcttaatgtgcagcaaaagcaggcgacaaaatctcctggctttacagacaaaaatatttcagcaaacgttgggcatcatggtttttgaaggctttagttctgctttctgcctctcctccacagccccaacctcccacccctgatacatgagccagtgattattcttgttcagggagaagatcatttagatttgttttgcattccttagaatggagggcaacattccacagctgccctggctgtgatgagtgtccttgcaggggccggagtaggagcactggggtgggggcggaattggggttactcgatgtaagggattccttgttgttgtgttgagatccagtgcagttgtgatttctgtggatcccagcttggttccaggaattttgtgtgattggcttaaatccagttttcaatcttcgacagctgggctggaacgtgaactcagtagctgaacctgtctgacccggtcacgttcttggatcctcagaactctttgctcttgtcggggtgggggtgggaactcacgtggggagcggtggctgagaaaatgtaaggattctggaatacatattccatgggactttccttccctctcctgcttcctcttttcctgctccctaacctttcgccgaatggggcagcaccactgacgtttctgggcggccagtgcggctgccaggttcctgtactactgccttgtacttttcattttggctcaccgtggattttctcataggaagtttggtcagagtgaattgaatattgtaagtcagccactgggacccgaggatttctgggaccccgcagttgggaggaggaagtagtccagccttccaggtggcgtgagaggcaatgactcgttacctgccgcccatcaccttggaggccttccctggccttgagtagaaaagtcggggatcggggcaagagaggctgagtacggatgggaaactattgtgcacaagtctttccagaggagtttcttaatgagatatttgtatttatttccagaccaataaatttgtaactttgca

SEQ ID NO: 304374 - DNA, 2081 bp, Homo sapiens
ttttatctgaaggctgcagggatcaagtcttctctggggctggcacgtagaagagcatgtggctggtggacgggcatgcctggctcctcacctggcagtctcctgccctctaaccggctgtctcttgttcccctagtgccctcggctagcatgacccgcctgatgcggtcccgcacagcctctggttccagcgtcacttctctggatggcacccgcagccgctcccacaccagcgagggcacccgaagccgctcccacaccagcgagggcacccgcagccgctcgcacaccagcgagggggcccacctggacatcacccccaactcgggtgctgctgggaacagcgccgggcccaagtccatggaggtctcctgctaggcggcctgcccagctgccgcccccggactctgatctctgtagtggccccctcctccccggccccttttcgccccctgcctgccatactgcgcctaactcggtattaatccaaagcttattttgtaagagtgagctctggtggagacaaatgaggtctattacgtgggtgccctctccaaaggcggggtggcggtggaccaaaggaaggaagcaagcatctccgcatcgcatcctcttccattaaccagtggccggttgccactctcctcccctccctcagagacaccaaactgccaaaaacaagacgcgtagcagcacacacttcacaaagccaagcctaggccgccctgagcatcctggttcaaacgggtgcctggtcagaaggccagccgcccacttcccgtttcctctttaactgaggagaagctgatccagtttccggaaacaaaatccttttctcatttggggaggggggtaatagtgacatgcaggcacctcttttaaacaggcaaaacaggaagggggaaaaggtgggattcatgtcgaggctagaggcatttggaacaacaaatctacgtagttaacttgaagaaaccgatttttaaagttggtgcatctagaaagctttgaatgcagaagcaaacaagcttgatttttctagcatcctcttaatgtgcagcaaaagcaggcgacaaaatctcctggctttacagacaaaaatatttcagcaaacgttgggcatcatggtttttgaaggctttagttctgctttctgcctctcctccacagccccaacctcccacccctgatacatgagccagtgattattcttgttcagggagaagatcatttagatttgttttgcattccttagaatggagggcaacattccacagctgccctggctgtgatgagtgtccttgcaggggccggagtaggagcactggggtgggggcggaattggggttactcgatgtaagggattccttgttgttgtgttgagatccagtgcagttgtgatttctgtggatcccagcttggttccaggaattttgtgtgattggcttaaatccagttttcaatcttcgacagctgggctggaacgtgaactcagtagctgaacctgtctgacccggtcacgttcttggatcctcagaactctttgctcttgtcggggtgggggtgggaactcacgtggggagcggtggctgagaaaatgtaaggattctggaatacatattccatgggactttccttccctctcctgcttcctcttttcctgctccctaacctttcgccgaatggggcagcaccactgacgtttctgggcggccagtgcggctgccaggttcctgtactactgccttgtacttttcattttggctcaccgtggattttctcataggaagtttggtcagagtgaattgaatattgtaagtcagccactgggacccgaggatttctgggaccccgcagttgggaggaggaagtagtccagccttccaggtggcgtgagaggcaatgactcgttacctgccgcccatcaccttggaggccttccctggccttgagtagaaaagtcggggatcggggcaagagaggctgagtacggatgggaaactattgtgcacaagtctttccagaggagtttcttaatgagatatttgtatttatttccagaccaataaatttgtaactttgca

SEQ ID NO: 304375 - DNA, 1701 bp, Homo sapiens
ttagaatggagggcaacattccacagctgccctggctgtgatgagtgttcctccccggccccttttcgccccctgcctgccatactgcgcctaactcggtattaatccaaagcttattttgtaagagtgagctctggtggagacaaatgaggtctattacgtgggtgccctctccaaaggcggggtggcggtggaccaaaggaaggaagcaagcatctccgcatcgcatcctcttccattaaccagtggccggttgccactctcctcccctccctcagagacaccaaactgccaaaaacaagacgcgtagcagcacacacttcacaaagccaagcctaggccgccctgagcatcctggttcaaacgggtgcctggtcagaaggccagccgcccacttcccgtttcctctttaactgaggagaagctgatccagtttccggaaacaaaatccttttctcatttggggaggggggtaatagtgacatgcaggcacctcttttaaacaggcaaaacaggaagggggaaaaggtgggattcatgtcgaggctagaggcatttggaacaacaaatctacgtagttaacttgaagaaaccgatttttaaagttggtgcatctagaaagctttgaatgcagaagcaaacaagcttgatttttctagcatcctcttaatgtgcagcaaaagcaggcgacaaaatctcctggctttacagacaaaaatatttcagcaaacgttgggcatcatggtttttgaaggctttagttctgctttctgcctctcctccacagccccaacctcccacccctgatacatgagccagtgattattcttgttcagggagaagatcatttagatttgttttgcattccttagaatggagggcaacattccacagctgccctggctgtgatgagtgtccttgcaggggccggagtaggagcactggggtgggggcggaattggggttactcgatgtaagggattccttgttgttgtgttgagatccagtgcagttgtgatttctgtggatcccagcttggttccaggaattttgtgtgattggcttaaatccagttttcaatcttcgacagctgggctggaacgtgaactcagtagctgaacctgtctgacccggtcacgttcttggatcctcagaactctttgctcttgtcggggtgggggtgggaactcacgtggggagcggtggctgagaaaatgtaaggattctggaatacatattccatgggactttccttccctctcctgcttcctcttttcctgctccctaacctttcgccgaatggggcagcaccactgacgtttctgggcggccagtgcggctgccaggttcctgtactactgccttgtacttttcattttggctcaccgtggattttctcataggaagtttggtcagagtgaattgaatattgtaagtcagccactgggacccgaggatttctgggaccccgcagttgggaggaggaagtagtccagccttccaggtggcgtgagaggcaatgactcgttacctgccgcccatcaccttggaggccttccctggccttgagtagaaaagtcggggatcggggcaagagaggctgagtacggatgggaaactattgtgcacaagtctttccagaggagtttcttaatgagatatttgtatttatttccagaccaataaatttgtaactttgca

SEQ ID NO: 304376 - DNA, 1949 bp, Homo sapiens
attaaacaaaatccttttctcatttggggaggggggtaatagtgacatgcaggcacctcttttaaacaggcaaaacaggaagggggaaaaggtgggattcatgtcgaggctaaacctcgcctggctcccagctggtgctgaagctcgtcagttcaccatccgccctcggcttccgcggggcgctgggccgccagcctcggcaccgtcctttcctttctccctcgcgttaggcaggtgacagcagggacatgtctcgggagatgcaggatgtagacctcgctgaggtgaagcctttggtggagaaaggggagaccagcgagggcacccgcagccgctcgcacaccagcgagggggcccacctggacatcacccccaactcgggtgctgctgggaacagcgccgggcccaagtccatggaggtctcctgctaggcggccggtggaccaaaggaaggaagcaagcatctccgcatcgcatcctcttccattaaccagtggccggttgccactctcctcccctccctcagagacaccaaactgccaaaaacaagacgcgtagcagcacacacttcacaaagccaagcctaggccgccctgagcatcctggttcaaacgggtgcctggtcagaaggccagccgcccacttcccgtttcctctttaactgaggagaagctgatccagtttccggaaacaaaatccttttctcatttggggaggggggtaatagtgacatgcaggcacctcttttaaacaggcaaaacaggaagggggaaaaggtgggattcatgtcgaggctagaggcatttggaacaacaaatctacgtagttaacttgaagaaaccgatttttaaagttggtgcatctagaaagctttgaatgcagaagcaaacaagcttgatttttctagcatcctcttaatgtgcagcaaaagcaggcgacaaaatctcctggctttacagacaaaaatatttcagcaaacgttgggcatcatggtttttgaaggctttagttctgctttctgcctctcctccacagccccaacctcccacccctgatacatgagccagtgattattcttgttcagggagaagatcatttagatttgttttgcattccttagaatggagggcaacattccacagctgccctggctgtgatgagtgtccttgcaggggccggagtaggagcactggggtgggggcggaattggggttactcgatgtaagggattccttgttgttgtgttgagatccagtgcagttgtgatttctgtggatcccagcttggttccaggaattttgtgtgattggcttaaatccagttttcaatcttcgacagctgggctggaacgtgaactcagtagctgaacctgtctgacccggtcacgttcttggatcctcagaactctttgctcttgtcggggtgggggtgggaactcacgtggggagcggtggctgagaaaatgtaaggattctggaatacatattccatgggactttccttccctctcctgcttcctcttttcctgctccctaacctttcgccgaatggggcagcaccactgacgtttctgggcggccagtgcggctgccaggttcctgtactactgccttgtacttttcattttggctcaccgtggattttctcataggaagtttggtcagagtgaattgaatattgtaagtcagccactgggacccgaggatttctgggaccccgcagttgggaggaggaagtagtccagccttccaggtggcgtgagaggcaatgactcgttacctgccgcccatcaccttggaggccttccctggccttgagtagaaaagtcggggatcggggcaagagaggctgagtacggatgggaaactattgtgcacaagtctttccagaggagtttcttaatgagatatttgtatttatttccagaccaataaatttgtaactttgca

SEQ ID NO: 304377 - DNA, 3004 bp, Homo sapiens
agtcgccctccgcccgcacgtacaacaaacctcaaacctcgcctggctcccagctggtgctgaagctcgtcagttcaccatccgccctcggcttccgcggggcgctgggccgccagcctcggcaccgtcctttcctttctccctcgcgttaggcaggtgacagcagggacatgtctcgggagatgcaggatgtagacctcgctgaggtgaagcctttggtggagaaaggggagaccatcaccggcctcctgcaagagtttgatgtccaggagcaggacatcgagactttacatggctctgttcacgtcacgctgtgtgggactcccaagggaaaccggcctgtcatcctcacctaccatgacatcggcatgaaccacaaaacctgctacaaccccctcttcaactacgaggacatgcaggagatcacccagcactttgccgtctgccacgtggacgcccctggccagcaggacggcgcagcctccttccccgcagggtacatgtacccctccatggatcagctggctgaaatgcttcctggagtccttcaacagtttgggctgaaaagcattattggcatgggaacaggagcaggcgcctacatcctaactcgatttgctctaaacaaccctgagatggtggagggccttgtccttatcaacgtgaacccttgtgcggaaggctggatggactgggccgcctccaagatctcaggatggacccaagctctgccggacatggtggtgtcccacctttttgggaaggaagaaatgcagagtaacgtggaagtggtccacacctaccgccagcacattgtgaatgacatgaaccccggcaacctgcacctgttcatcaatgcctacaacagccggcgcgacctggagattgagcgaccaatgccgggaacccacacagtcaccctgcagtgccctgctctgttggtggttggggacagctcgcctgcagtggatgccgtggtggagtgcaactcaaaattggacccaacaaagaccactctcctcaagatggcggactgtggcggcctcccgcagatctcccagccggccaagctcgctgaggccttcaagtacttcgtgcagggcatgggatacatgccctcggctagcatgacccgcctgatgcggtcccgcacagcctctggttccagcgtcacttctctggatggcacccgcagccgctcccacaccagcgagggcacccgaagccgctcccacaccagcgagggcacccgcagccgctcgcacaccagcgagggggcccacctggacatcacccccaactcgggtgctgctgggaacagcgccgggcccaagtccatggaggtctcctgctaggcggcctgcccagctgccgcccccggactctgatctctgtagtggccccctcctccccggccccttttcgccccctgcctgccatactgcgcctaactcggtattaatccaaagcttattttgtaagagtgagctctggtggagacaaatgaggtctattacgtgggtgccctctccaaaggcggggtggcggtggaccaaaggaaggaagcaagcatctccgcatcgcatcctcttccattaaccagtggccggttgccactctcctcccctccctcagagacaccaaactgccaaaaacaagacgcgtagcagcacacacttcacaaagccaagcctaggccgccctgagcatcctggttcaaacgggtgcctggtcagaaggccagccgcccacttcccgtttcctctttaactgaggagaagctgatccagtttccggaaacaaaatccttttctcatttggggaggggggtaatagtgacatgcaggcacctcttttaaacaggcaaaacaggaagggggaaaaggtgggattcatgtcgaggctagaggcatttggaacaacaaatctacgtagttaacttgaagaaaccgatttttaaagttggtgcatctagaaagctttgaatgcagaagcaaacaagcttgatttttctagcatcctcttaatgtgcagcaaaagcaggcgacaaaatctcctggctttacagacaaaaatatttcagcaaacgttgggcatcatggtttttgaaggctttagttctgctttctgcctctcctccacagccccaacctcccacccctgatacatgagccagtgattattcttgttcagggagaagatcatttagatttgttttgcattccttagaatggagggcaacattccacagctgccctggctgtgatgagtgtccttgcaggggccggagtaggagcactggggtgggggcggaattggggttactcgatgtaagggattccttgttgttgtgttgagatccagtgcagttgtgatttctgtggatcccagcttggttccaggaattttgtgtgattggcttaaatccagttttcaatcttcgacagctgggctggaacgtgaactcagtagctgaacctgtctgacccggtcacgttcttggatcctcagaactctttgctcttgtcggggtgggggtgggaactcacgtggggagcggtggctgagcttcctcttttcctgctccctaacctttcgccgaatggggcagcaccactgacgtttctgggcggccagtgcggctgccaggttcctgtactactgccttgtacttttcattttggctcaccgtggattttctcataggaagtttggtcagagtgaattgaatattgtaagtcagccactgggacccgaggatttctgggaccccgcagttgggaggaggaagtagtccagccttccaggtggcgtgagaggcaatgactcgttacctgccgcccatcaccttggaggccttccctggccttgagtagaaaagtcggggatcggggcaagagaggctgagtacggatgggaaactattgtgcacaagtctttccagaggagtttcttaatgagatatttgtatttatttccagaccaataaatttgtaactttgca

SEQ ID NO: 304378 - DNA, 3519 bp, Homo sapiens
  misc_feature (3141)..(3141): n is a, c, g, or t
  misc_feature (3374)..(3374): n is a, c, g, or t
agtcgccctccgcccgcacgtacaacaaacctcaaacctcgcctggctcccagctggtgctgaagctcgtcagttcaccatccgccctcggcttccgcggggcgctgggccgccagcctcggcaccgtcctttcctttctccctcgcgttaggcaggtgacagcagggacatgtctcgggagatgcaggatgtagacctcgctgaggtgaagcctttggtggagaaaggggagaccatcaccggcctcctgcaagagtttgatgtccaggagcaggacatcgagactttacatggctctgttcacgtcacgctgtgtgggactcccaagggaaaccggcctgtcatcctcacctaccatgacatcggcatgaaccacaaaacctgctacaaccccctcttcaactacgaggacatgcaggagatcacccagcactttgccgtctgccacgtggacgcccctggccagcaggacggcgcagcctccttccccgcagggtacatgtacccctccatggatcagctggctgaaatgcttcctggagtccttcaacagtttgggctgaaaagcattattggcatgggaacaggagcaggcgcctacatcctaactcgatttgctctaaacaaccctgagatggtggagggccttgtccttatcaacgtgaacccttgtgcggaaggctggatggactgggccgcctccaagatctcaggatggacccaagctctgccggacatggtggtgtcccacctttttgggaaggaagaaatgcagagtaacgtggaagtggtccacacctaccgccagcacattgtgaatgacatgaaccccggcaacctgcacctgttcatcaatgcctacaacagccggcgcgacctggagattgagcgaccaatgccgggaacccacacagtcaccctgcagtgccctgctctgttggtggttggggacagctcgcctgcagtggatgccgtggtggagtgcaactcaaaattggacccaacaaagaccactctcctcaagatggcggactgtggcggcctcccgcagatctcccagccggccaagctcgctgaggccttcaagtacttcgtgcagggcatgggatacatgccctcggctagcatgacccgcctgatgcggtcccgcacagcctctggttccagcgtcacttctctggatggcacccgcagccgctcccacaccagcgagggcacccgaagccgctcccacaccagcgagggcacccgcagccgctcgcacaccagcgagggggcccacctggacatcacccccaactcgggtgctgctgggaacagcgccgggcccaagtccatggaggtctcctgctaggcggcctgcccagctgccgcccccggactctgatctctgtagtggccccctcctccccggccccttttcgccccctgcctgccatactgcgcctaactcggtattaatccaaagcttattttgtaagagtgagctctggtggagacaaatgaggtctattacgtgggtgccctctccaaaggcggggtggcggtggaccaaaggaaggaagcaagcatctccgcatcgcatcctcttccattaaccagtggccggttgccactctcctcccctccctcagagacaccaaactgccaaaaacaagacgcgtagcagcacacacttcacaaagccaagcctaggccgccctgagcatcctggttcaaacgggtgcctggtcagaaggccagccgcccacttcccgtttcctctttaactgaggagaagctgatccagtttccggaaacaaaatccttttctcatttggggaggggggtaatagtgacatgcaggcacctcttttaaacaggcaaaacaggaagggggaaaaggtgggattcatgtcgaggctagaggcatttggaacaacaaatctacgtagttaacttgaagaaaccgatttttaaagttggtgcatctagaaagctttgaatgcagaagcaaacaagcttgatttttctagcatcctcttaatgtgcagcaaaagcaggcgacaaaatctcctggctttacagacaaaaatatttcagcaaacgttgggcatcatggtttttgaaggctttagttctgctttctgcctctcctccacagccccaacctcccacccctgatacatgagccagtgattattcttgttcagggagaagatcatttagatttgttttgcattccttagaatggagggcaacattccacagctgccctggctgtgatgagtgtccttgcaggggccggagtaggagcactggggtgggggcggaattggggttactcgatgtaagggattccttgttgttgtgttgagatccagtgcagttgtgatttctgtggatcccagcttggttccaggaattttgtgtgattggcttaaatccagttttcaatcttcgacagctgggctggaacgtgaactcagtagctgaacctgtctgacccggtcacgttcttggatcctcagaactctttgctcttgtcggggtgggggtgggaactcacgtggggagcggtggctgagaaaatgtaaggattctggaatacatattccatgggactttccttccctctcctgcttcctcttttcctgctccctaacctttcgccgaatggggcagcaccactgacgtttctgggcggccagtgcggctgccaggttcctgtactactgccttgtacttttcattttggctcaccgtggattttctcataggaagtttggtcagagtgaattgaatattgtaagtcagccactgggacccgaggatttctgggaccccgcagttgggaggaggaagtagtccagccttccaggtggcgtgagaggcaatgactcgttacctgccgcccatcaccttggaggccttccctggccttgagtagaaaagtcggggatcggggcaagagaggctgagtacggatgggaaactattgtgcacaagtctttccagaggagtttcttaatgagatatttgtatttatttccagaccaataaatttgtaactttgcaaaaaaaaaaaaaaaaaatgtacccctccatggatcagctggctgaaatgcttcctggagtccttcaacagtttgggctgaaangcattattggcatgggaacaggagcaggcgcctacatcctaactcgatttgctctaaacaaccctgagatggtggagggccttgtccttatcaacgtgaacccttgtgcggaaggctggatggactgggccgcctccaagatctcaggatggacccaagctctgccggacatggtggtgtcccacctttttgggaaggaagaaatgcagagtacgtggaagtggtccacaccnaccgccagcacattgtgaatgacatgaaccccggcaacctgcacctgttcatcaatgcctacaacagccggcgcgacctggagattgagcgaccaatgccgggaacccacacagtcacagtatctacattaccgggtccggctca

SEQ ID NO: 304379 - DNA, 3457 bp, Homo sapiens
agtcgccctccgcccgcacgtacaacaaacctcaaacctcgcctggctcccagctggtgctgaagctcgtcagttcaccatccgccctcggcttccgcggggcgctgggccgccagcctcggcaccgtcctttcctttctccctcgcgttaggcaggtgacagcagggacatgtctcgggagatgcaggatgtagacctcgctgaggtgaagcctttggtggagaaaggggagaccatcaccggcctcctgcaagagtttgatgtccaggagcaggacatcgagactttacatggctctgttcacgtcacgctgtgtgggactcccaagggaaaccggcctgtcatcctcacctaccatgacatcggcatgaaccacaaaacctgctacaaccccctcttcaactacgaggacatgcaggagatcacccagcactttgccgtctgccacgtggacgcccctggccagcaggacggcgcagcctccttccccgcagggtacatgtacccctccatggatcagctggctgaaatgcttcctggagtccttcaacagtttgggctgaaaagcattattggcatgggaacaggagcaggcgcctacatcctaactcgatttgctctaaacaaccctgagatggtggagggccttgtccttatcaacgtgaacccttgtgcggaaggctggatggactgggccgcctccaagatctcaggatggacccaagctctgccggacatggtggtgtcccacctttttgggaaggaagaaatgcagagtaacgtggaagtggtccacacctaccgccagcacattgtgaatgacatgaaccccggcaacctgcacctgttcatcaatgcctacaacagccggcgcgacctggagattgagcgaccaatgccgggaacccacacagtcaccctgcagtgccctgctctgttggtggttggggacagctcgcctgcagtggatgccgtggtggagtgcaactcaaaattggacccaacaaagaccactctcctcaagatggcggactgtggcggcctcccgcagatctcccagccggccaagctcgctgaggccttcaagtacttcgtgcagggcatgggatacatgccctcggctagcatgacccgcctgatgcggtcccgcacagcctctggttccagcgtcacttctctggatggcacccgcagccgctcccacaccagcgagggcacccgaagccgctcccacaccagcgagggcacccgcagccgctcgcacaccagcgagggggcccacctggacatcacccccaactcgggtgctgctgggaacagcgccgggcccaagtccatggaggtctcctgctaggcggcctgcccagctgccgcccccggactctgatctctgtagtggccccctcctccccggccccttttcgccccctgcctgccatactgcgcctaactcggtattaatccaaagcttattttgtaagagtgagctctggtggagacaaatgaggtctattacgtgggtgccctctccaaaggcggggtggcggtggaccaaaggaaggaagcaagcatctccgcatcgcatcctcttccattaaccagtggccggttgccactctcctcccctccctcagagacaccaaactgccaaaaacaagacgcgtagcagcacacacttcacaaagccaagcctaggccgccctgagcatcctggttcaaacgggtgcctggtcagaaggccagccgcccacttcccgtttcctctttaactgaggagaagctgatccagtttccggaaacaaaatccttttctcatttggggaggggggtaatagtgacatgcaggcacctcttttaaacaggcaaaacaggaagggggaaaaggtgggattcatgtcgaggctagaggcatttggaacaacaaatctacgtagttaacttgaagaaaccgatttttaaagttggtgcatctagaaagctttgaatgcagaagcaaacaagcttgatttttctagcatcctcttaatgtgcagcaaaagcaggcgacaaaatctcctggctttacagacaaaaatatttcagcaaacgttgggcatcatggtttttgaaggctttagttctgctttctgcctctcctccacagccccaacctcccacccctgatacatgagccagtgattattcttgttcagggagaagatcatttagatttgttttgcattccttagaatggagggcaacattccacagctgccctggctgtgatgagtgtccttgcaggggccggagtaggagcactggggtgggggcggaattggggttactcgatgtaagggattccttgttgttgtgttgagatccagtgcagttgtgatttctgtggatcccagcttggttccaggaattttgtgtgattggcttaaatccagttttcaatcttcgacagctgggctggaacgtgaactcagtagctgaacctgtctgacccggtcacgttcttggatcctcagaactctttgctcttgtcggggtgggggtgggaactcacgtggggagcggtggctgagaaaatgtaaggattctggaatacatattccatgggactttccttccctctcctgcttcctcttttcctgctccctaacctttcgccgaatggggcagcaccactgacgtttctgggcggccagtgcggctgccaggttcctgtactactgccttgtacttttcattttggctcaccgtggattttctcataggaagtttggtcagagtgaattgaatattgtaagtcagccactgggacccgaggatttctgggaccccgcagttgggaggaggaagtagtccagccttccaggtggcgtgagaggcaatgactcgttacctgccgcccatcaccttggaggccttccctggccttgagtagaaaagtcggggatcggggcaagagaggctgagtacggatgggaaactattgtgcacaagtctttccagaggagtttcttaatgagatatttgtatttatttccagaccaataaatttgtaactttgcaaaaaaaaaaaaaaaaaaaaaaaaaaaaaaaaaaaaaaaaaaaaaaaaaaaaagagggggggggcgcggcgccaaaagaattcccccgcgggggggcgcccaacttgtcgcgcgcgccacccacgcagtttttttgatgcgcaacaagaggggggcccccccaattggagagggggggccgctagatattaaataagacgccgagcggagcgcggggggcgcgccgcgtgtataacaaacccacggtgcgcggggagagggggagaaacaaaaccggcgcgcacagcgcggggggagactaccctgtggggggaagaaggggagccctccccctcaacgacgcggggggggggggaggagaaaccattgtggggggggcaacaaacctcaccccctacga

SEQ ID NO: 304380 - DNA, 3363 bp, Homo sapiens
agtcgccctccgcccgcacgtacaacaaacctcaaacctcgcctggctcccagctggtgctgaagctcgtcagttcaccatccgccctcggcttccgcggggcgctgggccgccagcctcggcaccgtcctttcctttctccctcgcgttaggcaggtgacagcagggacatgtctcgggagatgcaggatgtagacctcgctgaggtgaagcctttggtggagaaaggggagaccatcaccggcctcctgcaagagtttgatgtccaggagcaggacatcgagactttacatggctctgttcacgtcacgctgtgtgggactcccaagggaaaccggcctgtcatcctcacctaccatgacatcggcatgaaccacaaaacctgctacaaccccctcttcaactacgaggacatgcaggagatcacccagcactttgccgtctgccacgtggacgcccctggccagcaggacggcgcagcctccttccccgcagggtacatgtacccctccatggatcagctggctgaaatgcttcctggagtccttcaacagtttgggctgaaaagcattattggcatgggaacaggagcaggcgcctacatcctaactcgatttgctctaaacaaccctgagatggtggagggccttgtccttatcaacgtgaacccttgtgcggaaggctggatggactgggccgcctccaagatctcaggatggacccaagctctgccggacatggtggtgtcccacctttttgggaaggaagaaatgcagagtaacgtggaagtggtccacacctaccgccagcacattgtgaatgacatgaaccccggcaacctgcacctgttcatcaatgcctacaacagccggcgcgacctggagattgagcgaccaatgccgggaacccacacagtcaccctgcagtgccctgctctgttggtggttggggacagctcgcctgcagtggatgccgtggtggagtgcaactcaaaattggacccaacaaagaccactctcctcaagatggcggactgtggcggcctcccgcagatctcccagccggccaagctcgctgaggccttcaagtacttcgtgcagggcatgggatacatgccctcggctagcatgacccgcctgatgcggtcccgcacagcctctggttccagcgtcacttctctggatggcacccgcagccgctcccacaccagcgagggcacccgaagccgctcccacaccagcgagggcacccgcagccgctcgcacaccagcgagggggcccacctggacatcacccccaactcgggtgctgctgggaacagcgccgggcccaagtccatggaggtctcctgctaggcggcctgcccagctgccgcccccggactctgatctctgtagtggccccctcctccccggccccttttcgccccctgcctgccatactgcgcctaactcggtattaatccaaagcttattttgtaagagtgagctctggtggagacaaatgaggtctattacgtgggtgccctctccaaaggcggggtggcggtggaccaaaggaaggaagcaagcatctccgcatcgcatcctcttccattaaccagtggccggttgccactctcctcccctccctcagagacaccaaactgccaaaaacaagacgcgtagcagcacacacttcacaaagccaagcctaggccgccctgagcatcctggttcaaacgggtgcctggtcagaaggccagccgcccacttcccgtttcctctttaactgaggagaagctgatccagtttccggaaacaaaatccttttctcatttggggaggggggtaatagtgacatgcaggcacctcttttaaacaggcaaaacaggaagggggaaaaggtgggattcatgtcgaggctagaggcatttggaacaacaaatctacgtagttaacttgaagaaaccgatttttaaagttggtgcatctagaaagctttgaatgcagaagcaaacaagcttgatttttctagcatcctcttaatgtgcagcaaaagcaggcgacaaaatctcctggctttacagacaaaaatatttcagcaaacgttgggcatcatggtttttgaaggctttagttctgctttctgcctctcctccacagccccaacctcccacccctgatacatgagccagtgattattcttgttcagggagaagatcatttagatttgttttgcattccttagaatggagggcaacattccacagctgccctggctgtgatgagtgtccttgcaggggccggagtaggagcactggggtgggggcggaattggggttactcgatgtaagggattccttgttgttgtgttgagatccagtgcagttgtgatttctgtggatcccagcttggttccaggaattttgtgtgattggcttaaatccagttttcaatcttcgacagctgggctggaacgtgaactcagtagctgaacctgtctgacccggtcacgttcttggatcctcagaactctttgctcttgtcggggtgggggtgggaactcacgtggggagcggtggctgagaaaatgtaaggattctggaatacatattccatgggactttccttccctctcctgcttcctcttttcctgctccctaacctttcgccgaatggggcagcaccactgacgtttctgggcggccagtgcggctgccaggttcctgtactactgccttgtacttttcattttggctcaccgtggattttctcataggaagtttggtcagagtgaattgaatattgtaagtcagccactgggacccgaggatttctgggaccccgcagttgggaggaggaagtagtccagccttccaggtggcgtgagaggcaatgactcgttacctgccgcccatcaccttggaggccttccctggccttgagtagaaaagtcggggatcggggcaagagaggctgagtacggatgggaaactattgtgcacaagtctttccagaggagtttcttaatgagatatttgtatttatttccagaccaataaatttgtaactttgcaaaaaaaaacaacacgacccacatacagccatcaatctccgtctgaaactgcatgctcaacaacacccaccacacacgttgtttgctggcgcccatgcccgccccgacagcaaggtcgttgaacacccactcgtggggcggcagcggccagcaacgacggctgcacaacattggcacagcgttctcgcaagaaaccatcgcggtccaactaggctgctgcgtctaccacaaaaaacgcgccggcggcaccggctgtgcacaacacccgtggggtagagccctagcgcactcacggccccggcgcaa

SEQ ID NO: 304381 - DNA, 1364 bp, Homo sapiens
attaaacaaaatccttttctcatttggggaggggggtaatagtgacatgcaggcacctcttttaaacaggcaaaacaggaagggggaaaaggtgggattcatgtcgaggctaaacctcgcctggctcccagctggtgctgaagctcgtcagttcaccatccgccctcggcttccgcggggcgctgggccgccagcctcggcaccgtcctttcctttctccctcgcgttaggagcaggacatcgagactttacatggctctgttcacgtcacgctgtgtgggactcccaagggaaaccggcctgtcatcctcacctaccatgacatcggcatgaaccacaaaacctgctacaaccccctcttcaactacgaggacatgcaggagatcacccagcactttgccgtctgccacgtggacgcccctggccagcaggacggcgcagcctccttccccgcaggctcccacccctgatacatgagccagtgattattcttgttcagggagaagatcatttagatttgttttgcattccttagaatggagggcaacattccacagctgccctggctgtgatgagtgtccttgcaggggccggagtaggagcactggggtgggggcggaattggggttactcgatgtaagggattccttgttgttgtgttgagatccagtgcagttgtgatttctgtggatcccagcttggttccaggaattttgtgtgattggcttaaatccagttttcaatcttcgacagctgggctggaacgtgaactcagtagctgaacctgtctgacccggtcacgttcttggatcctcagaactctttgctcttgtcggggtgggggtgggaactcacgtggggagcggtggctgagaaaatgtaaggattctggaatacatattccatgggactttccttccctctcctgcttcctcttttcctgctccctaacctttcgccgaatggggcagcaccactgacgtttctgggcggccagtgcggctgccaggttcctgtactactgccttgtacttttcattttggctcaccgtggattttctcataggaagtttggtcagagtgaattgaatattgtaagtcagccactgggacccgaggatttctgggaccccgcagttgggaggaggaagtagtccagccttccaggtggcgtgagaggcaatgactcgttacctgccgcccatcaccttggaggccttccctggccttgagtagaaaagtcggggatcggggcaagagaggctgagtacggatgggaaactattgtgcacaagtctttccagaggagtttcttaatgagatatttgtatttatttccagaccaataaatttgtaactttgca

SEQ ID NO: 304382 - DNA, 2969 bp, Homo sapiens
  misc_feature (2810)..(2810): n is a, c, g, or t
agtcgccctccgcccgcacgtacaacaaacctcaaacctcgcctggctcccagctggtgctgaagctcgtcagttcaccatccgccctcggcttccgcggggcgctgggccgccagcctcggcaccgtcctttcctttctccctcgcgttaggcaggtgacagcagggacatgtctcgggagatgcaggatgtagacctcgctgaggtgaagcctttggtggagaaaggggagaccatcaccggcctcctgcaagagtttgatgtccaggagcaggacatcgagactttacatggctctgttcacgtcacgctgtgtgggactcccaagggaaaccggcctgtcatcctcacctaccatgacatcggcatgaaccacaaaacctgctacaaccccctcttcaactacgaggacatgcaggagatcacccagcactttgccgtctgccacgtggacgcccctggccagcaggacggcgcagcctccttccccgcagggtacatgtacccctccatggatcagctggctgaaatgcttcctggagtccttcaacagtttgggctgaaaagcattattggcatgggaacaggagcaggcgcctacatcctaactcgatttgctctaaacaaccctgagatggtggagggccttgtccttatcaacgtgaacccttgtgcggaaggctggatggactgggccgcctccaagatctcaggatggacccaagctctgccggacatggtggtgtcccacctttttgggaaggaagaaatgcagagtaacgtggaagtggtccacacctaccgccagcacattgtgaatgacatgaaccccggcaacctgcacctgttcatcaatgcctacaacagccggcgcgacctggagattgagcgaccaatgccgggaacccacacagtcaccctgcagtgccctgctctgttggtggttggggacagctcgcctgcagtggatgccgtggtggagtgcaactcaaaattggacccaacaaagaccactctcctcaagatggcggactgtggcggcctcccgcagatctcccagccggccaagctcgctgaggccttcaagtacttcgtgcagggcatgggatacatgccctcggctagcatgacccgcctgatgcggtcccgcacagcctctggttccagcgtcacttctctggatggcacccgcagccgctcccacaccagcgagggcacccgaagccgctcccacaccagcgagggcacccgcagccgctcgcacaccagcgagggggcccacctggacatcacccccaactcgggtgctgctgggaacagcgccgggcccaagtccatggaggtctcctgctaggcggcctgcccagctgccgcccccggactctgatctctgtagtggccccctcctccccggccccttttcgccccctgcctgccatactgcgcctaactcggtattaatccaaagcttattttgtaagagtgagctctggtggagacaaatgaggtctattacgtgggtgccctctccaaaggcggggtggcggtggaccaaaggaaggaagcaagcatctccgcatcgcatcctcttccattaaccagtggccggttgccactctcctcccctccctcagagacaccaaactgccaaaaacaagacgcgtagcagcacacacttcacaaagccaagcctaggccgccctgagcatcctggttcaaacgggtgcctggtcagaaggccagccgcccacttcccgtttcctctttaactgaggagaagctgatccagtttccggaaacaaaatccttttctcatttggggaggggggtaatagtgacatgcaggcacctcttttaaacaggcaaaacaggaagggggaaaaggtgggattcatgtcgaggctagaggcatttggaacaacaaatctacgtagttaacttgaagaaaccgatttttaaagttggtgcatctagaaagctttgaatgcagaagcaaacaagcttgatttttctagcatcctcttaatgtgcagcaaaagcaggcgacaaaatctcctggctttacagacaaaaatatttcagcaaacgttgggcatcatggtttttgaaggctttagttctgctttctgcctctcctccacagccccaacctcccacccctgatacatgagccagtgattattcttgttcagggagaagatcatttagatttgttttgcattccttagaatggagggcaacattccacagctgccctggctgtgatgagtgtccttgcaggggccggagtaggagcactggggtgggggcggaattggggttactcgatgtaagggattccttgttgttgtgttgagatccagtgcagttgtgatttctgtggatcccagcttggttccaggaattttgtgtgattggcttaaatccagttttcaatcttcgacagctgggctggaacgtgaactcagtagctgaacctgtctgacccggtcacgttcttggatcctcagaactctttgctcttgtcgggagctaagctcccaacaagattcttttctgtttttctgagacagggtctcgatctgtcatgcccaggctggaatgcagaccttgtctcaaaaacgaaacaaaacaaaacaacaacaacaacaacccccccaccaaaaaaaaaaaggagaaggagaaaaaattttttctccagaaattaattccattggaagggccgacttatccccatttattttcccccgggaaggcttaccttttctctcacaattaggtgtgtaaaccccatttttaaccatacttnagacttttaaattttggtggtctaattttggaaggcgggtcatctaaattatcgggagatggagactttctatgaaagaggcttatacccttttaaaattgtcggggtcttaaaaaacagaaccggtccgggataaaggaaaggagcggtgttgaaggt

SEQ ID NO: 304383 - DNA, 1717 bp, Homo sapiens
agtcgccctccgcccgcacgtacaacaaacctcaaacctcgcctggctcccagctggtgctgaagctcgtcagttcaccatccgccctcggcttccgcggggcgctgggccgccagcctcggcaccgtcctttcctttctccctcgcgttaggcaggtgacagcagggacatgtctcgggagatgcaggatgtagacctcgctgaggtgaagcctttggtggagaaaggggagaccatcaccggcctcctgcaagagtttgatgtccaggagcaggacatcgagactttacatggctctgttcacgtcacgctgtgtgggactcccaagggaaaccggcctgtcatcctcacctaccatgacatcggcatgaaccacaaaacctgctacaaccccctcttcaactacgaggacatgcaggagatcacccagcactttgccgtctgccacgtggacgcccctggccagcaggacggcgcagcctccttccccgcagggtacatgtacccctccatggatcagctggctgaaatgcttcctggagtccttcaacagtttgggctgaaaagcattattggcatgggaacaggagcaggcgcctacatcctaactcgatttgctctaaacaaccctgagatggtggagggccttgtccttatcaacgtgaacccttgtgcggaaggctggatggactgggccgcctccaagatctcaggatggacccaagctctgccggacatggtggtgtcccacctttttgggaaggaagaaatgcagagtaacgtggaagtggtccacacctaccgccagcacattgtgaatgacatgaaccccggcaacctgcacctgttcatcaatgcctacaacagccggcgcgacctggagattgagcgaccaatgccgggaacccacacagtcaccctgcagtgccctgctctgttggtggttggggacagctcgcctgcagtggatgccgtggtggagtgcaactcaaaattggacccaacaaagaccactctcctcaagatggcggactgtggcggcctcccgcagatctcccagccggccaagctcgctgaggccttcaagtacttcgtgcagggcatgggatacagtgagtatggcattccccgtgtgcagtgggtcggggcatgtgtcggaattggaagtgctctgtcctgagccaggtttggatgagcaattctgtgtccccctggccagcttcagctttctgggaggaaacagttaggtgtgtggagggcatgtggcagcctggaggatctagcctctcatttatcagtgaggctcatttttcctcctttgttgaatagaagttgtttcacaccagggattttggggggtttagatgaggactgtccctttaagcaccaagacaatgaccaacagtgaaacaataacatttttaaaaattttgatcacaagttttaagagaccactagctacagtgatgatgaagatggtgtcgatgatgatgaaagattactaacacattattttatctcactgaaccatcacagtactcctttgacatattcttagcccatcttatcagtgatgaagctgaggcttcggggttgtaagcagggagcagagggcggatctgtggaaattctttgaagactgtgaagctctgtggaagtggctaacaaagttgcttacattccaggtggagcatgccatagtcaagtcatgagctt

SEQ ID NO: 304384 - DNA, 1191 bp, Homo sapiens
  misc_feature (947)..(947): n is a, c, g, or t
  misc_feature (1033)..(1033): n is a, c, g, or t
  misc_feature (1036)..(1036): n is a, c, g, or t
  misc_feature (1076)..(1076): n is a, c, g, or t
  misc_feature (1090)..(1090): n is a, c, g, or t
  misc_feature (1093)..(1093): n is a, c, g, or t
  misc_feature (1160)..(1160): n is a, c, g, or t
agtcgccctccgcccgcacgtacaacaaacctcaaacctcgcctggctcccagctggtgctgaagctcgtcagttcaccatccgccctcggcttccgcggggcgctgggccgccagcctcggcaccgtcctttcctttctccctcgcgttaggcaggtgacagcagggacatgtctcgggagatgcaggatgtagacctcgctgaggtgaagcctttggtggagaaaggggagaccatcaccggcctcctgcaagagtttgatgtccaggagcaggacatcgagactttacatggctctgttcacgtcacgctgtgtgggactcccaagggaaaccggcctgtcatcctcacctaccatgacatcggcatgaaccacaaaacctgctacaaccccctcttcaactacgaggacatgcaggagatcacccagcactttgccgtctgccacgtggacgcccctggccagcaggacggcgcagcctccttccccgcagggtacatgtacccctccatggatcagctggctgaaatgcttcctggagtccttcaacagtttgggctgaaaagcattattggcatgggaacaggagcaggcgcctacatcctaactcgatttgctctaaacaaccctgagatggtggagggccttgtccttatcaacgtgaacccttgtgcggaaggctggatggactgggccgcctccaagatctcaggatggacccaagctctgccggacatggtggtgtcccacctttttgggaaggaagaaatgcagagtaacgtggaagtggtccacacctaccgccagcacattgtgaatgacatgaaccccggcaacctgcacctgttcatcaatgcctacaacagcggcgcgactggagatgagcgacgatgcgggaacacacagtcatctgcagtgtctgctctgtggtggtggggcgctcgnctgcgtgatgcgtgtgagtgcactcatattgaccacaagacactctctcagatggcggctgtgcggctccgcagatctccagcggncangctcgctgaggcttcagtattcgtgcaggatgggtaatgnctcggtagcatgancgnctgatgcgtccgccagctctggttcagcgtattttggtgacgcgcgtcaacaggaggacgagcgtcnacagaggacgagcgtcgcacacagggcactg

SEQ ID NO: 304385 - DNA, 834 bp, Homo sapiens
agtcgccctccgcccgcacgtacaacaaacctcaaacctcgcctggctcccagctggtgctgaagctcgtcagttcaccatccgccctcggcttccgcggggcgctgggccgccagcctcggcaccgtcctttcctttctccctcgcgttaggcaggtgacagcagggacatgtctcgggagatgcaggatgtagacctcgctgaggtgaagcctttggtggagaaaggggagaccatcaccggcctcctgcaagagtttgatgtccaggagcaggacatcgagactttacatggctctgttcacgtcacgctgtgtgggactcccaagggaaaccggcctgtcatcctcacctaccatgacatcggcatgaaccacaaaacctgctacaaccccctcttcaactacgaggacatgcaggagatcacccagcactttgccgtctgccacgtggacgcccctggccagcaggacggcgcagcctccttccccgcagggtacatgtacccctccatggatcagctggctgaaatgcttcctggagtccttcaacagtttgggctgaaaagcattattggcatgggaacaggagcaggcgcctacatcctaactcgatttgctctaaacaaccctgagatggtggagggccttgtccttatcaacgtgaacccttgtgcggaaggctggatggactgggccgcctccaagatctcaggatggacccaagctctgccggacatggtggtgtcccacctttttgggaaggtgagttgcgtggtctggcaaatctgttgttcctgctgagcaaggcattgtgtggtgctcagcacagggc

SEQ ID NO: 304386 - DNA, 700 bp, Homo sapiens
agtcgccctccgcccgcacgtacaacaaacctcaaacctcgcctggctcccagctggtgctgaagctcgtcagttcaccatccgccctcggcttccgcggggcgctgggccgccagcctcggcaccgtcctttcctttctccctcgcgttaggcaggtgacagcagggacatgtctcgggagatgcaggatgtagacctcgctgaggtgaagcctttggtggagaaaggggagaccatcaccggcctcctgcaagagtttgatgtccaggagcaggacatcgagactttacatggctctgttcacgtcacgctgtgtgggactcccaagggaaaccggcctgtcatcctcacctaccatgacatcggcatgaaccacaaaacctgctacaaccccctcttcaactacgaggacatgcaggagatcacccagcactttgccgtctgccacgtggacgcccctggccagcaggacggcgcagcctccttccccgcaggcttccaggtggcgtgagaggcaatgactcgttacctgccgcccatcaccttggaggccttccctggccttgagtagaaaagtcggggatcggggcaagagaggctgagtacggatgggaaactattgtgcacaagtctttccagaggagtttcttaatgagatatttgtatttatttccagaccaataaatttgtaactttgca

SEQ ID NO: 304387 - DNA, 731 bp, Homo sapiens
agtcgccctccgcccgcacgtacaacaaacctcaaacctcgcctggctcccagctggtgctgaagctcgtcagttcaccatccgccctcggcttccgcggggcgctgggccgccagcctcggcaccgtcctttcctttctccctcgcgttaggcaggtgacagcagggacatgtctcgggagatgcaggatgtagacctcgctgaggtgaagcctttggtggagaaaggggagaccatcaccggcctcctgcaagagtttgatgtccaggagcaggacatcgagactttacatggctctgttcacgtcacgctgtgtgggactcccaagggaaaccggcctgtcatcctcacctaccatgacatcggcatgaaccacaaaacctgctacaaccccctcttcaactacgaggacatgcaggagatcacccagcactttgccgtctgccacgtggacgcccctggccagcaggacggcgcagcctccttccccgcagggtacatgtacccctccatggatcagctggctgaaatgcttcctggagtccttcaacagtttgggtaagagcgaaggatcagctccttctctgtctgcagagaagcctggtttctagcatcttcctgccccttggctttgatctggactgaccactaaaattaaggttgcaatttagagatgaggcaagaaattagctcgtcactctgtgaacactgttcttcacacagtctctga

SEQ ID NO: 304388 - DNA, 566 bp, Homo sapiens
tgtagtcccagctactcaggaggctgaggcaggagaatggcgtgaccctgggaggcggagcttgcagtgagctgcgatcacaccactgtactctaacctgggcgacagagcaagactccgtctcaaaaaaaaaaaaaaaagagaaaaggaaagcctgcctttgtgaggaattaaggagaccccacaaaggaggaagtgtaggtacagattcaggtcatagaaaggcccatatgtcccaatattatttctcttacagagaaaacagatgaaattgacaattttttttgtcttttcacagaccatcaccggcctcctgcaagagtttgatgtccaggcaagtagaggatgtggctttccttccccttcctcatcccgtcttctctttttcctttttctttccattggtttaagtagatcattgtgcaaacattgcgggcaaggggagagaaggcagtggtctcagctaggtcctcaccctcagctgctgctcccagacagaagctgacttgagtgctggccaaagaatcaggaaccagtcacttcccacgaaagcaggacagagacac

SEQ ID NO: 304389 - DNA, 326 bp, Homo sapiens
ggtgtctgtgagcctcagtatcctctcccaggaaatccactgcgctggccccaatgggaagactgggttgggtccatgggctgtgtgtacaagggacctcctcatcccctgcagtgcatcacgagggaggtgaagctgctgggcagagcgcaggcctggccttcttgccattggtcttggatttgcttcctttaggaaacctctcagcaggaagtgttgaccttttggcctttgtctccttgcaggcaggtgacagcagggacatgtctcgggagatgcaggatgtagacctcgctgaggtgaagcctttggtggagaaaggggag

SEQ ID NO: 304390 - DNA, 2304 bp, Homo sapiens
tcttggggaatggagtgaaattatctgtagggcctagcatagtgcctggcacgtagcaagctgcaagtgatggttgccacggagacaccagcagccttgcctggtggggctggattgttccctacccacggtccaccctgttcctcctttgtaaggcaggacaaggcagggcagggcagcgggcggatgggcatcctttcggaaaaaattcatagagcgcagagggccttggctgtggtgtttggcactaacgagcttccctctctcctagatggcggactgtggcggcctcccgcagatctcccagccggccaagctcgctgaggccttcaagtacttcgtgcagggcatgggatacatgccctcggctagcatgacccgcctgatgcggtcccgcacagcctctggttccagcgtcacttctctggatggcacccgcagccgctcccacaccagcgagggcacccgaagccgctcccacaccagcgagggcacccgcagccgctcgcacaccagcgagggggcccacctggacatcacccccaactcgggtgctgctgggaacagcgccgggcccaagtccatggaggtctcctgctaggcggcctgcccagctgccgcccccggactctgatctctgtagtggccccctcctccccggccccttttcgccccctgcctgccatactgcgcctaactcggtattaatccaaagcttattttgtaagagtgagctctggtggagacaaatgaggtctattacgtgggtgccctctccaaaggcggggtggcggtggaccaaaggaaggaagcaagcatctccgcatcgcatcctcttccattaaccagtggccggttgccactctcctcccctccctcagagacaccaaactgccaaaaacaagacgcgtagcagcacacacttcacaaagccaagcctaggccgccctgagcatcctggttcaaacgggtgcctggtcagaaggccagccgcccacttcccgtttcctctttaactgaggagaagctgatccagtttccggaaacaaaatccttttctcatttggggaggggggtaatagtgacatgcaggcacctcttttaaacaggcaaaacaggaagggggaaaaggtgggattcatgtcgaggctagaggcatttggaacaacaaatctacgtagttaacttgaagaaaccgatttttaaagttggtgcatctagaaagctttgaatgcagaagcaaacaagcttgatttttctagcatcctcttaatgtgcagcaaaagcaggcgacaaaatctcctggctttacagacaaaaatatttcagcaaacgttgggcatcatggtttttgaaggctttagttctgctttctgcctctcctccacagccccaacctcccacccctgatacatgagccagtgattattcttgttcagggagaagatcatttagatttgttttgcattccttagaatggagggcaacattccacagctgccctggctgtgatgagtgtccttgcaggggccggagtaggagcactggggtgggggcggaattggggttactcgatgtaagggattccttgttgttgtgttgagatccagtgcagttgtgatttctgtggatcccagcttggttccaggaattttgtgtgattggcttaaatccagttttcaatcttcgacagctgggctggaacgtgaactcagtagctgaacctgtctgacccggtcacgttcttggatcctcagaactctttgctcttgtcggggtgggggtgggaactcacgtggggagcggtggctgagaaaatgtaaggattctggaatacatattccatgggactttccttccctctcctgcttcctcttttcctgctccctaacctttcgccgaatggggcagcaccactgacgtttctgggcggccagtgcggctgccaggttcctgtactactgccttgtacttttcattttggctcaccgtggattttctcataggaagtttggtcagagtgaattgaatattgtaagtcagccactgggacccgaggatttctgggaccccgcagttgggaggaggaagtagtccagccttccaggtggcgtgagaggcaatgactcgttacctgccgcccatcaccttggaggccttccctggccttgagtagaaaagtcggggatcggggcaagagaggctgagtacggatgggaaactattgtgcacaagtctttccagaggagtttcttaatgagatatttgtatttatttccagaccaataaatttgtaactttgca

SEQ ID NO: 304391 - DNA, 446 bp, Homo sapiens
gaaacaaaatgaatgtgctttgccaccgagacacctaatttttttctcatcttacttttttctcttctctccctcactgctgttcttcagacaaaacctgctacaaccccctcttcaactacgaggacatgcaggagatcacccagcactttgccgtctgccacgtggacgcccctggccagcaggacggcgcagcctccttccccgcagggtacatgtacccctccatggatcagctggctgaaatgcttcctggagtccttcaacagtttgggtaagagcgaaggatcagctccttctctgtctgcagagaagcctggtttctagcatcttcctgccccttggctttgatctggactgaccactaaaattaaggttgcaatttagagatgaggcaagaaattagctcgtcactctgtgaacactgttcttcacacagtctctga

SEQ ID NO: 304392 - DNA, 3136 bp, Homo sapiens
attaaacaaaatccttttctcatttggggaggggggtaatagtgacatgcaggcacctcttttaaacaggcaaaacaggaagggggaaaaggtgggattcatgtcgaggctaaacctcgcctggctcccagctggtgctgaagctcgtcagttcaccatccgccctcggcttccgcggggcgctgggccgccagcctcggcaccgtcctttcctttctccctcgcgttaggcaggtgacagcagggacatgtctcgggagatgcaggatgtagacctcgctgaggtgaagcctttggtggagaaaggggagaccatcaccggcctcctgcaagagtttgatgtccaggagcaggacatcgagactttacatggctctgttcacgtcacgctgtgtgggactcccaagggaaaccggcctgtcatcctcacctaccatgacatcggcatgaaccacaaaacctgctacaaccccctcttcaactacgaggacatgcaggagatcacccagcactttgccgtctgccacgtggacgcccctggccagcaggacggcgcagcctccttccccgcagggtacatgtacccctccatggatcagctggctgaaatgcttcctggagtccttcaacagtttgggctgaaaagcattattggcatgggaacaggagcaggcgcctacatcctaactcgatttgctctaaacaaccctgagatggtggagggccttgtccttatcaacgtgaacccttgtgcggaaggctggatggactgggccgcctccaagatctcaggatggacccaagctctgccggacatggtggtgtcccacctttttgggaaggaagaaatgcagagtaacgtggaagtggtccacacctaccgccagcacattgtgaatgacatgaaccccggcaacctgcacctgttcatcaatgcctacaacagccggcgcgacctggagattgagcgaccaatgccgggaacccacacagtcaccctgcagtgccctgctctgttggtggttggggacagctcgcctgcagtggatgccgtggtggagtgcaactcaaaattggacccaacaaagaccactctcctcaagatggcggactgtggcggcctcccgcagatctcccagccggccaagctcgctgaggccttcaagtacttcgtgcagggcatgggatacatgccctcggctagcatgacccgcctgatgcggtcccgcacagcctctggttccagcgtcacttctctggatggcacccgcagccgctcccacaccagcgagggcacccgaagccgctcccacaccagcgagggcacccgcagccgctcgcacaccagcgagggggcccacctggacatcacccccaactcgggtgctgctgggaacagcgccgggcccaagtccatggaggtctcctgctaggcggcctgcccagctgccgcccccggactctgatctctgtagtggccccctcctccccggccccttttcgccccctgcctgccatactgcgcctaactcggtattaatccaaagcttattttgtaagagtgagctctggtggagacaaatgaggtctattacgtgggtgccctctccaaaggcggggtggcggtggaccaaaggaaggaagcaagcatctccgcatcgcatcctcttccattaaccagtggccggttgccactctcctcccctccctcagagacaccaaactgccaaaaacaagacgcgtagcagcacacacttcacaaagccaagcctaggccgccctgagcatcctggttcaaacgggtgcctggtcagaaggccagccgcccacttcccgtttcctctttaactgaggagaagctgatccagtttccggaaacaaaatccttttctcatttggggaggggggtaatagtgacatgcaggcacctcttttaaacaggcaaaacaggaagggggaaaaggtgggattcatgtcgaggctagaggcatttggaacaacaaatctacgtagttaacttgaagaaaccgatttttaaagttggtgcatctagaaagctttgaatgcagaagcaaacaagcttgatttttctagcatcctcttaatgtgcagcaaaagcaggcgacaaaatctcctggctttacagacaaaaatatttcagcaaacgttgggcatcatggtttttgaaggctttagttctgctttctgcctctcctccacagccccaacctcccacccctgatacatgagccagtgattattcttgttcagggagaagatcatttagatttgttttgcattccttagaatggagggcaacattccacagctgccctggctgtgatgagtgtccttgcaggggccggagtaggagcactggggtgggggcggaattggggttactcgatgtaagggattccttgttgttgtgttgagatccagtgcagttgtgatttctgtggatcccagcttggttccaggaattttgtgtgattggcttaaatccagttttcaatcttcgacagctgggctggaacgtgaactcagtagctgaacctgtctgacccggtcacgttcttggatcctcagaactctttgctcttgtcggggtgggggtgggaactcacgtggggagcggtggctgagaaaatgtaaggattctggaatacatattccatgggactttccttccctctcctgcttcctcttttcctgctccctaacctttcgccgaatggggcagcaccactgacgtttctgggcggccagtgcggctgccaggttcctgtactactgccttgtacttttcattttggctcaccgtggattttctcataggaagtttggtcagagtgaattgaatattgtaagtcagccactgggacccgaggatttctgggaccccgcagttgggaggaggaagtagtccagccttccaggtggcgtgagaggcaatgactcgttacctgccgcccatcaccttggaggccttccctggccttgagtagaaaagtcggggatcggggcaagagaggctgagtacggatgggaaactattgtgcacaagtctttccagaggagtttcttaatgagatatttgtatttatttccagaccaataaatttgtaactttgca

SEQ ID NO: 304393 - DNA, 2962 bp, Homo sapiens
  misc_feature (35)..(35): n is a, c, g, or t
tctctccccaggtaaaaggcagctcggcacgtccnttcctttctccctcgcgttaggcaggtgacagcagggacatgtctcgggagatgcaggatgtagacctcgctgaggtgaagcctttggtggagaaaggggagaccatcaccggcctcctgcaagagtttgatgtccaggagcaggacatcgagactttacatggctctgttcacgtcacgctgtgtgggactcccaagggaaaccggcctgtcatcctcacctaccatgacatcggcatgaaccacaaaacctgctacaaccccctcttcaactacgaggacatgcaggagatcacccagcactttgccgtctgccacgtggacgcccctggccagcaggacggcgcagcctccttccccgcagggtacatgtacccctccatggatcagctggctgaaatgcttcctggagtccttcaacagtttgggctgaaaagcattattggcatgggaacaggagcaggcgcctacatcctaactcgatttgctctaaacaaccctgagatggtggagggccttgtccttatcaacgtgaacccttgtgcggaaggctggatggactgggccgcctccaagatctcaggatggacccaagctctgccggacatggtggtgtcccacctttttgggaaggaagaaatgcagagtaacgtggaagtggtccacacctaccgccagcacattgtgaatgacatgaaccccggcaacctgcacctgttcatcaatgcctacaacagccggcgcgacctggagattgagcgaccaatgccgggaacccacacagtcaccctgcagtgccctgctctgttggtggttggggacagctcgcctgcagtggatgccgtggtggagtgcaactcaaaattggacccaacaaagaccactctcctcaagatggcggactgtggcggcctcccgcagatctcccagccggccaagctcgctgaggccttcaagtacttcgtgcagggcatgggatacatgccctcggctagcatgacccgcctgatgcggtcccgcacagcctctggttccagcgtcacttctctggatggcacccgcagccgctcccacaccagcgagggcacccgaagccgctcccacaccagcgagggcacccgcagccgctcgcacaccagcgagggggcccacctggacatcacccccaactcgggtgctgctgggaacagcgccgggcccaagtccatggaggtctcctgctaggcggcctgcccagctgccgcccccggactctgatctctgtagtggccccctcctccccggccccttttcgccccctgcctgccatactgcgcctaactcggtattaatccaaagcttattttgtaagagtgagctctggtggagacaaatgaggtctattacgtgggtgccctctccaaaggcggggtggcggtggaccaaaggaaggaagcaagcatctccgcatcgcatcctcttccattaaccagtggccggttgccactctcctcccctccctcagagacaccaaactgccaaaaacaagacgcgtagcagcacacacttcacaaagccaagcctaggccgccctgagcatcctggttcaaacgggtgcctggtcagaaggccagccgcccacttcccgtttcctctttaactgaggagaagctgatccagtttccggaaacaaaatccttttctcatttggggaggggggtaatagtgacatgcaggcacctcttttaaacaggcaaaacaggaagggggaaaaggtgggattcatgtcgaggctagaggcatttggaacaacaaatctacgtagttaacttgaagaaaccgatttttaaagttggtgcatctagaaagctttgaatgcagaagcaaacaagcttgatttttctagcatcctcttaatgtgcagcaaaagcaggcgacaaaatctcctggctttacagacaaaaatatttcagcaaacgttgggcatcatggtttttgaaggctttagttctgctttctgcctctcctccacagccccaacctcccacccctgatacatgagccagtgattattcttgttcagggagaagatcatttagatttgttttgcattccttagaatggagggcaacattccacagctgccctggctgtgatgagtgtccttgcaggggccggagtaggagcactggggtgggggcggaattggggttactcgatgtaagggattccttgttgttgtgttgagatccagtgcagttgtgatttctgtggatcccagcttggttccaggaattttgtgtgattggcttaaatccagttttcaatcttcgacagctgggctggaacgtgaactcagtagctgaacctgtctgacccggtcacgttcttggatcctcagaactctttgctcttgtcggggtgggggtgggaactcacgtggggagcggtggctgagaaaatgtaaggattctggaatacatattccatgggactttccttccctctcctgcttcctcttttcctgctccctaacctttcgccgaatggggcagcaccactgacgtttctgggcggccagtgcggctgccaggttcctgtactactgccttgtacttttcattttggctcaccgtggattttctcataggaagtttggtcagagtgaattgaatattgtaagtcagccactgggacccgaggatttctgggaccccgcagttgggaggaggaagtagtccagccttccaggtggcgtgagaggcaatgactcgttacctgccgcccatcaccttggaggccttccctggccttgagtagaaaagtcggggatcggggcaagagaggctgagtacggatgggaaactattgtgcacaagtctttccagaggagtttcttaatgagatatttgtatttatttccagaccaataaatttgtaactttgca

SEQ ID NO: 304394 - DNA, 3085 bp, Homo sapiens
tgctgtacaggtttgtacagcaaacctaggagcaaagggctgttctatacagccttggtgagttgtagactatactgtctaggtgtgtgtaagtatactctgagatcttcacacaatgacaaaatctcctaatgatgaattttctcagaaagtatccctgttattcagcgatgcataactctgtctctctctctgtgtgtgtgtgtgtgtgtgtgtgtgtgtgtgtgtatgcatgtgtttatcctggaagtaagtaatacagttgttactgccacaactagagagcatttgtgctgtgcgccttgtttgattgatgaggtcgatggtgtgttacacccatttgatagctggagaagctgagcctccgtgggttgaagtgacttgcccaaggcaggcctgcaaagcagcgggcttcctacttctcctgcacttcctctttctccttcccactctctctaggacccgataccgtgtctgctgtgctggaacctcagttttgcatggggtggggccggggagcagcagcctgctctgctgcccacactgcctttttctgggtacttctctcaagctttggtttgccttggaaagttcctagtgtttcagattgctgggatgtctgtctcactttgtgtcttgaattgcagctaaacaaccctgagatggtggagggccttgtccttatcaacgtgaacccttgtgcggaaggctggatggactgggccgcctccaagatctcaggatggacccaagctctgccggacatggtggtgtcccacctttttgggaaggaagaaatgcagagtaacgtggaagtggtccacacctaccgccagcacattgtgaatgacatgaaccccggcaacctgcacctgttcatcaatgcctacaacagccggcgcgacctggagattgagcgaccaatgccgggaacccacacagtcaccctgcagtgccctgctctgttggtggttggggacagctcgcctgcagtggatgccgtggtggagtgcaactcaaaattggacccaacaaagaccactctcctcaagatggcggactgtggcggcctcccgcagatctcccagccggccaagctcgctgaggccttcaagtacttcgtgcagggcatgggatacatgccctcggctagcatgacccgcctgatgcggtcccgcacagcctctggttccagcgtcacttctctggatggcacccgcagccgctcccacaccagcgagggcacccgaagccgctcccacaccagcgagggcacccgcagccgctcgcacaccagcgagggggcccacctggacatcacccccaactcgggtgctgctgggaacagcgccgggcccaagtccatggaggtctcctgctaggcggcctgcccagctgccgcccccggactctgatctctgtagtggccccctcctccccggccccttttcgccccctgcctgccatactgcgcctaactcggtattaatccaaagcttattttgtaagagtgagctctggtggagacaaatgaggtctattacgtgggtgccctctccaaaggcggggtggcggtggaccaaaggaaggaagcaagcatctccgcatcgcatcctcttccattaaccagtggccggttgccactctcctcccctccctcagagacaccaaactgccaaaaacaagacgcgtagcagcacacacttcacaaagccaagcctaggccgccctgagcatcctggttcaaacgggtgcctggtcagaaggccagccgcccacttcccgtttcctctttaactgaggagaagctgatccagtttccggaaacaaaatccttttctcatttggggaggggggtaatagtgacatgcaggcacctcttttaaacaggcaaaacaggaagggggaaaaggtgggattcatgtcgaggctagaggcatttggaacaacaaatctacgtagttaacttgaagaaaccgatttttaaagttggtgcatctagaaagctttgaatgcagaagcaaacaagcttgatttttctagcatcctcttaatgtgcagcaaaagcaggcgacaaaatctcctggctttacagacaaaaatatttcagcaaacgttgggcatcatggtttttgaaggctttagttctgctttctgcctctcctccacagccccaacctcccacccctgatacatgagccagtgattattcttgttcagggagaagatcatttagatttgttttgcattccttagaatggagggcaacattccacagctgccctggctgtgatgagtgtccttgcaggggccggagtaggagcactggggtgggggcggaattggggttactcgatgtaagggattccttgttgttgtgttgagatccagtgcagttgtgatttctgtggatcccagcttggttccaggaattttgtgtgattggcttaaatccagttttcaatcttcgacagctgggctggaacgtgaactcagtagctgaacctgtctgacccggtcacgttcttggatcctcagaactctttgctcttgtcggggtgggggtgggaactcacgtggggagcggtggctgagaaaatgtaaggattctggaatacatattccatgggactttccttccctctcctgcttcctcttttcctgctccctaacctttcgccgaatggggcagcaccactgacgtttctgggcggccagtgcggctgccaggttcctgtactactgccttgtacttttcattttggctcaccgtggattttctcataggaagtttggtcagagtgaattgaatattgtaagtcagccactgggacccgaggatttctgggaccccgcagttgggaggaggaagtagtccagccttccaggtggcgtgagaggcaatgactcgttacctgccgcccatcaccttggaggccttccctggccttgagtagaaaagtcggggatcggggcaagagaggctgagtacggatgggaaactattgtgcacaagtctttccagaggagtttcttaatgagatatttgtatttatttccagaccaataaatttgtaactttgca

SEQ ID NO: 304395 - DNA, 2632 bp, Homo sapiens
aagatttgcctacgaaagggacagtgatgaagctaagctctagatccaggatgtctgacttcaaattgaaactcccaaagtaatgagtttggaagggtggggtgtggcctttccaggatgggggtcttttctgctcccagcggatagtgaaacccctgtctgcacctggttgggcgtgttgctttcccaaaggttttttttttaggtccgtcgctgtcttgtggattaggcattattatctttactttgtctccaaataacctggagaatggagagagtagtgaccagctcagggccacagtgcgatgaggaccatcttctcacctctctaaatgcaggaagaaatgcagagtaacgtggaagtggtccacacctaccgccagcacattgtgaatgacatgaaccccggcaacctgcacctgttcatcaatgcctacaacagccggcgcgacctggagattgagcgaccaatgccgggaacccacacagtcaccctgcagtgccctgctctgttggtggttggggacagctcgcctgcagtggatgccgtggtggagtgcaactcaaaattggacccaacaaagaccactctcctcaagatggcggactgtggcggcctcccgcagatctcccagccggccaagctcgctgaggccttcaagtacttcgtgcagggcatgggatacatgccctcggctagcatgacccgcctgatgcggtcccgcacagcctctggttccagcgtcacttctctggatggcacccgcagccgctcccacaccagcgagggcacccgaagccgctcccacaccagcgagggcacccgcagccgctcgcacaccagcgagggggcccacctggacatcacccccaactcgggtgctgctgggaacagcgccgggcccaagtccatggaggtctcctgctaggcggcctgcccagctgccgcccccggactctgatctctgtagtggccccctcctccccggccccttttcgccccctgcctgccatactgcgcctaactcggtattaatccaaagcttattttgtaagagtgagctctggtggagacaaatgaggtctattacgtgggtgccctctccaaaggcggggtggcggtggaccaaaggaaggaagcaagcatctccgcatcgcatcctcttccattaaccagtggccggttgccactctcctcccctccctcagagacaccaaactgccaaaaacaagacgcgtagcagcacacacttcacaaagccaagcctaggccgccctgagcatcctggttcaaacgggtgcctggtcagaaggccagccgcccacttcccgtttcctctttaactgaggagaagctgatccagtttccggaaacaaaatccttttctcatttggggaggggggtaatagtgacatgcaggcacctcttttaaacaggcaaaacaggaagggggaaaaggtgggattcatgtcgaggctagaggcatttggaacaacaaatctacgtagttaacttgaagaaaccgatttttaaagttggtgcatctagaaagctttgaatgcagaagcaaacaagcttgatttttctagcatcctcttaatgtgcagcaaaagcaggcgacaaaatctcctggctttacagacaaaaatatttcagcaaacgttgggcatcatggtttttgaaggctttagttctgctttctgcctctcctccacagccccaacctcccacccctgatacatgagccagtgattattcttgttcagggagaagatcatttagatttgttttgcattccttagaatggagggcaacattccacagctgccctggctgtgatgagtgtccttgcaggggccggagtaggagcactggggtgggggcggaattggggttactcgatgtaagggattccttgttgttgtgttgagatccagtgcagttgtgatttctgtggatcccagcttggttccaggaattttgtgtgattggcttaaatccagttttcaatcttcgacagctgggctggaacgtgaactcagtagctgaacctgtctgacccggtcacgttcttggatcctcagaactctttgctcttgtcggggtgggggtgggaactcacgtggggagcggtggctgagaaaatgtaaggattctggaatacatattccatgggactttccttccctctcctgcttcctcttttcctgctccctaacctttcgccgaatggggcagcaccactgacgtttctgggcggccagtgcggctgccaggttcctgtactactgccttgtacttttcattttggctcaccgtggattttctcataggaagtttggtcagagtgaattgaatattgtaagtcagccactgggacccgaggatttctgggaccccgcagttgggaggaggaagtagtccagccttccaggtggcgtgagaggcaatgactcgttacctgccgcccatcaccttggaggccttccctggccttgagtagaaaagtcggggatcggggcaagagaggctgagtacggatgggaaactattgtgcacaagtctttccagaggagtttcttaatgagatatttgtatttatttccagaccaataaatttgtaactttgca

SEQ ID NO: 304396 - DNA, 1974 bp, Homo sapiens
tgcggtaccgtcaggtggtgtgtcaattgtggtcaggcaggcactccagagaatacgtgcaccagttacggcaggaatgctatgcgttgaatgggacacagcgcttcctggaaagatacatctacaaccgggcagtgagttcgtgcgcttcgacagcgacgtagtcgtggagttccgtgcggtgactggagctggggcggcctgatgaggattgtcctcgggtgctgctgggaacagcgccgggcccaagtccatggaggtctcctgctaggcggcctgcccagctgccgcccccggactctgatctctgtagtggccccctcctccccggccccttttcgccccctgcctgccatactgcgcctaactcggtattaatccaaagcttattttgtaagagtgagctctggtggagacaaatgaggtctattacgtgggtgccctctccaaaggcggggtggcggtggaccaaaggaaggaagcaagcatctccgcatcgcatcctcttccattaaccagtggccggttgccactctcctcccctccctcagagacaccaaactgccaaaaacaagacgcgtagcagcacacacttcacaaagccaagcctaggccgccctgagcatcctggttcaaacgggtgcctggtcagaaggccagccgcccacttcccgtttcctctttaactgaggagaagctgatccagtttccggaaacaaaatccttttctcatttggggaggggggtaatagtgacatgcaggcacctcttttaaacaggcaaaacaggaagggggaaaaggtgggattcatgtcgaggctagaggcatttggaacaacaaatctacgtagttaacttgaagaaaccgatttttaaagttggtgcatctagaaagctttgaatgcagaagcaaacaagcttgatttttctagcatcctcttaatgtgcagcaaaagcaggcgacaaaatctcctggctttacagacaaaaatatttcagcaaacgttgggcatcatggtttttgaaggctttagttctgctttctgcctctcctccacagccccaacctcccacccctgatacatgagccagtgattattcttgttcagggagaagatcatttagatttgttttgcattccttagaatggagggcaacattccacagctgccctggctgtgatgagtgtccttgcaggggccggagtaggagcactggggtgggggcggaattggggttactcgatgtaagggattccttgttgttgtgttgagatccagtgcagttgtgatttctgtggatcccagcttggttccaggaattttgtgtgattggcttaaatccagttttcaatcttcgacagctgggctggaacgtgaactcagtagctgaacctgtctgacccggtcacgttcttggatcctcagaactctttgctcttgtcggggtgggggtgggaactcacgtggggagcggtggctgagaaaatgtaaggattctggaatacatattccatgggactttccttccctctcctgcttcctcttttcctgctccctaacctttcgccgaatggggcagcaccactgacgtttctgggcggccagtgcggctgccaggttcctgtactactgccttgtacttttcattttggctcaccgtggattttctcataggaagtttggtcagagtgaattgaatattgtaagtcagccactgggacccgaggatttctgggaccccgcagttgggaggaggaagtagtccagccttccaggtggcgtgagaggcaatgactcgttacctgccgcccatcaccttggaggccttccctggccttgagtagaaaagtcggggatcggggcaagagaggctgagtacggatgggaaactattgtgcacaagtctttccagaggagtttcttaatgagatatttgtatttatttccagaccaataaatttgtaactttgca

SEQ ID NO: 304397 - DNA, 2063 bp, Homo sapiens
agtcgccctccgcccgcacgtacaacaaacctcaaacctcgcctggctcccagctggtgctgaagctcgtcagttcaccatccgccctcggcttccgcggggcgctgggccgccagcctcggcaccgtcctttcctttctccctcgcgttaggcaggtgacagcagggacatgtctcgggagatgcaggatgtagacctcgctgaggtgaagcctttggtggagaaaggggagaccatcaccggcctcctgcaagagtttgatgtccaggagcaggacatcgagactttacatggctctgttcacgtcacgctgtgtgggactcccaagggaaaccggcctgtcatcctcacctaccatgacatcggcatgaaccacaaaacctgctacaaccccctcttcaactacgaggacatgcaggagatcacccagcactttgccgtctgccacgtggacgcccctggccagcaggacggcgcagcctccttccccgcagggtacatgtacccctccatggatcagctggctgaaatgcttcctggagtccttcaacagtttgggctgaaaagcattattggcatgggaacaggagcaggcgcctacatcctaactcgatttgctctaaacaaccctgagatggtggagggccttgtccttatcaacgtgaacccttgtgcggaaggctggatggactgggccgcctccaagatctcaggatggacccaagctctgccggacatggtggtgtcccacctttttgggaaggaagaaatgcagagtaacgtggaagtggtccacacctaccgccagcacattgtgaatgacatgaaccccggcaacctgcacctgttcatcaatgcctacaacagccggcgcgacctggagattgagcgaccaatgccgggaacccacacagtcaccctgcagtgccctgctctgttggtggttggggacagctcgcctgcagtggatgccgtggtggagtgcaactcaaaattggacccaacaaagaccactctcctcaagatggcggactgtggcggcctcccgcagatctcccagccggccaagctcgctgaggccttcaagtacttcgtgcagggcatgggatacatgccctcggctagcatgacccgcctgatgcggtcccgcacagcctctggttccagcgtcacttctctggatggcacccgcagccgctcccacaccagcgagggcacccgaagccgctcccacaccagcgagggcacccgcagccgctcgcacaccagcgagggggcccacctggacatcacccccaactcgggtgctgctgggaacagcgccgggcccaagtccatggaggtctcctgctaggcggcctgcccagctgccgcccccggactctgatctctgtagtggccccctcctccccggccccttttcgccccctgcctgccatactgcgcctaactcggtattaatccaaagcttattttgtaagagtgagctctggtggagacaaatgaggtctattacgtgggtgccctctccaaaggcggggtggcggtggaccaaaggaaggaagcaagcatctccgcatcgcatcctcttccattaaccagtggccggttgccactctcctcccctccctcagagacaccaaactgccaaaaacaagacgcgtagcagcacacacttcacaaagccaaggccagtgcggctgccaggttcctgtactactgccttgtacttttcattttggctcaccgtggattttctcataggaagtttggtcagagtgaattgaatattgtaagtcagccactgggacccgaggatttctgggaccccgcagttgggaggaggaagtagtccagccttccaggtggcgtgagaggcaatgactcgttacctgccgcccatcaccttggaggccttccctggccttgagtagaaaagtcggggatcggggcaagagaggctgagtacggatgggaaactattgtgcacaagtctttccagaggagtttcttaatgagatatttgtatttatttccagaccaataaatttgtaactttgca

SEQ ID NO: 304398 - DNA, 2141 bp, Homo sapiens
agtcgccctccgcccgcacgtacaacaaacctcaaacctcgcctggctcccagctggtgctgaagctcgtcagttcaccatccgccctcggcttccgcggggcgctgggccgccagcctcggcaccgtcctttcctttctccctcgcgttaggcaggtgacagcagggacatgtctcgggagatgcaggatgtagacctcgctgaggtgaagcctttggtggagaaaggggagaccatcaccggcctcctgcaagagtttgatgtccaggagcaggacatcgagactttacatggctctgttcacgtcacgctgtgtgggactcccaagggaaaccggcctgtcatcctcacctaccatgacatcggcatgaaccacaaaacctgctacaaccccctcttcaactacgaggacatgcaggagatcacccagcactttgccgtctgccacgtggacgcccctggccagcaggacggcgcagcctccttccccgcagggtacatgtacccctccatggatcagctggctgaaatgcttcctggagtccttcaacagtttgggctgaaaagcattattggcatgggaacaggagcaggcgcctacatcctaactcgatttgctctaaacaaccctgagatggtggagggccttgtccttatcaacgtgaacccttgtgcggaaggctggatggactgggccgcctccaagatctcaggatggacccaagctctgccggacatggtggtgtcccacctttttgggaaggaagaaatgcagagtaacgtggaagtggtccacacctaccgccagcacattgtgaatgacatgaaccccggcaacctgcacctgttcatcaatgcctacaacagccggcgcgacctggagattgagcgaccaatgccgggaacccacacagtcaccctgcagtgccctgctctgttggtggttggggacagctcgcctgcagtggatgccgtggtggagtgcaactcaaaattggacccaacaaagaccactctcctcaagatggcggactgtggcggcctcccgcagatctcccagccggccaagctcgctgaggccttcaagtacttcgtgcagggcatgggatacatgccctcggctagcatgacccgcctgatgcggtcccgcacagcctctggttccagcgtcacttctctggatggcacccgcagccgctcccacaccagcgagggcacccgaagccgctcccacaccagcgagggcacccgcagccgctcgcacaccagcgagggggcccacctggacatcacccccaactcgggtgctgctgggaacagcgccgggcccaagtccatggaggtctcctgctaggcggcctgcccagctgccgcccccggactctgatctctgtagtggccccctcctccccggccccttttcgccccctgcctgccatactgcgcctaactcggtattaatccaaagcttattttgtaagagtgagctctggtggagacaaatgaggtctattacgtgggtgccctctccaaaggcggggtggcggtggaccaaaggaaggaagcaagcatctccgcatcgcatcctcttccattaaccagtggccggttgccactctcctcccctccctcagagacaccaaactgccaaaaacaagacgcgtagcagcacacacttcacaaagccaagcctaggccgccctgagcatcctggttcaaacgggtgcctggtcagaaggccagccgcccacttcccgtttcctctttaactgaggagaagctgatccagtttccggaaacaaaatccttttctcatttggggaggggggtaatagtgacatgcaggcacctcttttaaacaggcaaaacaggaagggggaaaaggtgggattcatgtcgaggctagaggcatttggaacaacaaatctacgtagttaacttgaagaaaccgatttttaaagttggtgcatctagaaagctttgaatgcagaagcaaacaagcttgatttttctagcatcctcttaatgtgcagcaaaagcaggcgacaaaatctcctggctttacagacaaaaatatttcagcaaacgttgggcatcatggtttttggcagtttggtgtctctgagggcgcgggcggccg

SEQ ID NO: 304399 - DNA, 1527 bp, Homo sapiens
agtcgccctccgcccgcacgtacaacaaacctcaaacctcgcctggctcccagctggtgctgaagctcgtcagttcaccatccgccctcggcttccgcggggcgctgggccgccagcctcggcaccgtcctttcctttctccctcgcgttaggcaggtgacagcagggacatgtctcgggagatgcaggatgtagacctcgctgaggtgaagcctttggtggagaaaggggagaccatcaccggcctcctgcaagagtttgatgtccaggagcaggacatcgagactttacatggctctgttcacgtcacgctgtgtgggactcccaagggaaaccggcctgtcatcctcacctaccatgacatcggcatgaaccacaaaacctgctacaaccccctcttcaactacgaggacatgcaggagatcacccagcactttgccgtctgccacgtggacgcccctggccagcaggacggcgcagcctccttccccgcagggtacatgtacccctccatggatcagctggctgaaatgcttcctggagtccttcaacagtttgggctgaaaagcattattggcatgggaacaggagcaggcgcctacatcctaactcgatttgctctaaacaaccctgagatggtggagggccttgtccttatcaacgtgaacccttgtgcggaaggctggatggactgggccgcctccaagatctcaggatggacccaagctctgccggacatggtggtgtcccacctttttgggaaggaagaaatgcagagtaacgtggaagtggtccacacctaccgccagcacattgtgaatgacatgaaccccggcaacctgcacctgttcatcaatgcctacaacagccggcgcgacctggagattgagcgaccaatgccgggaacccacacagtcaccctgcagtgccctgctctgttggtggttggggacagctcgcctgcagtggatgccgtggtggagtgcaactcaaaattggacccaacaaagaccactctcctcaagatggcggactgtggcggcctcccgcagatctcccagccggccaagctcgctgaggccttcaagtacttcgtgcagggcatgggatacagtgagtatggcattccccgtgtgcagtgggtcggggcatgtgtcggaattggaagtgcttggcttgatgaaccctttgcacacctggcatcagtgctcactgtacgcttctcatcctgctcagtagacatcccagatttgtgggtgagaagtaggggctcagagaaatatgtgagctgcggatgtggcattgaccccaattctttctgaattcaaaactagctctttaagacaattcagcaaggattaattctgtttgggagtgcctgacatcaaaagcccctccctgtgcctatcaaggagataacataagccctgcatgcttggtgtggatcaactgcccctgtttctgatgtctgactcagtgtggcctcctagccatgatgcttcagttgggtggagtactagtttccta

SEQ ID NO: 304400 - DNA, 949 bp, Homo sapiens
agtcgccctccgcccgcacgtacaacaaacctcaaacctcgcctggctcccagctggtgctgaagctcgtcagttcaccatccgccctcggcttccgcggggcgctgggccgccagcctcggcaccgtcctttcctttctccctcgcgttaggcaggtgacagcagggacatgtctcgggagatgcaggatgtagacctcgctgaggtgaagcctttggtggagaaaggggagaccatcaccggcctcctgcaagagtttgatgtccaggagcaggacatcgagactttacatggctctgttcacgtcacgctgtgtgggactcccaagggaaaccggcctgtcatcctcacctaccatgacatcggcatgaaccacaaaacctgctacaaccccctcttcaactacgaggacatgcaggagatcacccagcactttgccgtctgccacgtggacgcccctggccagcaggacggcgcagcctccttccccgcagggtacatgtacccctccatggatcagctggctgaaatgcttcctggagtccttcaacagtttgggctgaaaagcattattggcatgggaacaggagcaggcgcctacatcctaactcgatttgctctaaacaaccctgagatggtggagggccttgtccttatcaacgtgaacccttgtgcggaaggctggatggactgggccgcctccaagcctttcgattaccaggcattggtattagatactgtgatgtgtgcagttacttcttgcagtccttcccttgaccttgtggccttgaagttcctggcactcccagttccagattagaagtctgagacccagagatctcaggatggacccaagctctgccggacatggtggtgtcccacctttttgggaaggaagaatgcgaagtacgtggaatcccctaacggcgcattgggattgcttaaacc

SEQ ID NO: 304401 - DNA, 945 bp, Homo sapiens
  misc_feature (567)..(567): n is a, c, g, or t
  misc_feature (800)..(800): n is a, c, g, or t
agtcgccctccgcccgcacgtacaacaaacctcaaacctcgcctggctcccagctggtgctgaagctcgtcagttcaccatccgccctcggcttccgcggggcgctgggccgccagcctcggcaccgtcctttcctttctccctcgcgttaggcaggtgacagcagggacatgtctcgggagatgcaggatgtagacctcgctgaggtgaagcctttggtggagaaaggggagaccatcaccggcctcctgcaagagtttgatgtccaggagcaggacatcgagactttacatggctctgttcacgtcacgctgtgtgggactcccaagggaaaccggcctgtcatcctcacctaccatgacatcggcatgaaccacaaaacctgctacaaccccctcttcaactacgaggacatgcaggagatcacccagcactttgccgtctgccacgtggacgcccctggccagcaggacggcgcagcctccttccccgcagggtacatgtacccctccatggatcagctggctgaaatgcttcctggagtccttcaacagtttgggctgaaangcattattggcatgggaacaggagcaggcgcctacatcctaactcgatttgctctaaacaaccctgagatggtggagggccttgtccttatcaacgtgaacccttgtgcggaaggctggatggactgggccgcctccaagatctcaggatggacccaagctctgccggacatggtggtgtcccacctttttgggaaggaagaaatgcagagtacgtggaagtggtccacaccnaccgccagcacattgtgaatgacatgaaccccggcaacctgcacctgttcatcaatgcctacaacagccggcgcgacctggagattgagcgaccaatgccgggaacccacacagtcacagtatctacattaccgggtccggctca

SEQ ID NO: 304402 - DNA, 391 bp, Homo sapiens
ggcttggctggatgggagtgggagatttctccaggggaggggtcctcatgctaatgatgcatttgtttcctgcagccggcgcgacctggagattgagcgaccaatgccgggaacccacacagtcaccctgcagtgagtggcttttctctcccccagcacttgcagtcggggctgcccactataaaggtggccttgctggcagggccttctttctgagtgtggcaggacattgtgtcagtgagacctggatatattccacccagagactgagcattacccagcctgacttggacttctccctgtgccggtggcatccgtttctagggtgtccccatgacctaggcctttgatcttggagaaggatggttgattgtacttgggacagcattta

SEQ ID NO: 304403 - DNA, 2912 bp, Homo sapiens
ggcgagccccgcagactgagtgctccggggagctgtcagtgtcaggctctgggagagaggaagtgatcgctcccggaggagcgcgagccgagcggccggcgcagcgtgagacagcacatcctgcccgcgccggccccgccaccttcgggagccgcctgcaccaacgctgccgccgcccaggagccgccgccggctcggggagcccagttccgccgctgccgagcgcgtccaggaaaccaacatgtctgacaaaagtgacttaaaagctgagctagagcgcaaaaagcagcgcttagcacagataagagaagagaagaaacggaaggaagaggagaggaaacaagaaagaggctgatatgcagcagaagaaagaacccgttcaggacgactctgatctggatcgcaaacgacgagagacagaggctttgctgcaaagcattggtatctcaccggagccgcctctagtcccaacccctatgtctccctcctcgaaatcagtgagcactcccagtgaagctggaagccaagactcaggcgatctggggccattaacaagaagaagactgcataaactgggcgtgtcaaaggtcacccaagtggatttcctgccaagggaagtagtgtcctactcaaaggagacccagactcctcttgccacgcatcagtctgaagaggatgaggaagatgaggaaatggtggaatctaaagttggccaggactcagaactggaaaatcaggacaaaaaacaggaagtgaaggaagcccctccaagagagttgacagaggaagaaaaacagcagatccttcattcagaggaatttctcatcttttttgaccggacaatacgggtaattgaaagagccctggctgaagattccgacatcttttttgactacagcggccgagagttagaggaaaaagatggggatgttcaggctggagccaatctttctttcaatcgtcagttctatgatgaacattggtccaagcatcgagtggtcacttgtatggactggtccctccagtaccctgagctgatggtggcttcttacaacaacaatgaagatgctccccatgaaccagatggagtggccttggtttggaacatgaagtttaagaaaaccacaccagaatacgtcttccactgtcagtcctctgtgatgtcggtctgcttcgcccgtttccatcctaacttggtggttggtgggacttactcgggccagattgtcctctgggacaatcgcagtcatcgaaggactccagtgcagcggacacccttatcagctgctgcacacacgcatcccgtgtactgtgtaaatgttgttgggacccagaatgctcataacctcatcactgtctccactgatggcaaaatgtgttcctggagcctggacatgctctcaactccacaggagagcatggagctggtgtacaataagtccaagcctgtcgctgttaccggaatggctttcccaacgggagacgtcaataacttcgtggttggcagtgaggaaggtacagtctacacggcttgtcgtcatggaagcaaagcaggtattggtgaggtctttgaaggtcaccaagggccagtgacaggaattaactgccacatggcagtgggcccaatcgacttttctcacctgtttgtcacatcatcatttgactggactgtcaaactgtggaccaccaagcacaacaagccgctctactcctttgaagacaatgcagactatgtgtacgatgtcatgtggtcccccgtgcatcctgcgctttttgcctgcgtggacgggatggggcgcttggacctctggaacctcaacaatgacaccgaggttccaacagcaagtgtggccattgagggggcatccgccctaaaccgtgttcgttgggcccaagctggcaaagaagttgctgttggggactcggaaggccgtatttgggtctatgacgttggagagcttgcagttccccacaatgatgaatggacccgatttgccaggacccttgtggaaattcgtgctaacagagctgatagcgaggaggaaggcactgttgagttatctgcctagtggaaatgagccacccccactgcagcccccacctttgtgtcctagagctcagcgtctgcagtcaagtctcttgtattcggtgtccattcagtatcagtattgctgtgacattttgggtgccatattgtgccagctttgctccaagtattctaaatgtgtcccatcatgctttccactgacccaaaattcaccacagcatttctatctttatatttctgtctcaaaaatgaagagaagggggttatgggttaagttgctgccttttaactactttgtagctgtatttaatagctggaaacctctggttaaatttgtgcttacatgcactcctggcatagtcctattaaatccatatgaagccagatatgattgggtgcagatgtggtgttcctcatattatggtacagggccaaagacttgagacgtggtgttttacatggtgactcacattatgaatggatttactagaagaacattgctgctccttatttattgtagtgtgctgcatggaacgtatttatttgaaagcattaaaataaatgatcctagagcatgtgcataatgagaggactgtattctctctgctgctgttgaggttatattaagttccacatagcaattacagtatgccagttccactgaagacatgaaatctttagaggtttcttgcagtgaacgaaatgaattttaatgcctattatttctgggtactttaacaatatttcaaatatcattgaccactaatacttctcactgaagctaacacagtctgacaaaagtctatggttcctaaatatgacatcagtgttgccaataaaatgtttcaaaccaagaagaaccaga

SEQ ID NO: 304404 - DNA, 1017 bp, Homo sapiens
ggcgagccccgcagactgagtgctccggggagctgtcagtgtcaggctctgggagagaggaagtgatcgctcccggaggagcgcgagccgagcggccggcgcagcgtgagacagcacatcctgcccgcgccggccccgccaccttcgggagccgcctgcaccaacgctgccgccgcccaggagccgccgccggctcggggagcccagttccgccgctgccgagcgcgtccaggaaaccaacatgtctgacaaaagtgacttaaaagctgagctagagcgcaaaaagcagcgcttagcacagataagagaagagaagaaacggaaggaagaggagaggaaacaagaaagaggctgatatgcagcagaagaaagaacccgttcaggacgactctgatctggatcgcaaacgacgagagacagaggctttgctgcaaagcattggtatctcaccggagccgcctctagtcccaacccctatgtctccctcctcgaaatcagtgagcactcccagtgaagctggaagccaagactcaggcgatctggggccattaacaagagacgaagcattgctatgttccccaggctggtcttgaacttctggcctcaaatgattctcctccctcttcatcccaaagtggtgggatcctcctgcctctccctcccaaagtgctgagattacaggcaggacccattgtgcccagcctaaaaatctcttactattatagaaacaacacctgtgtattttatacaactagaaaatataaatgagcaaaaataacaaaataaaaacatcatgtttccaccaccagagtagcactcttagcaccttagtgcttattcttttatattatatgtatgtcatcatatataatgataaatgacatcttactgtgaaaactgttgaacctgctttttcaatcaagtgtatttttatatttcaatgtattttcaccttatctagtatctacactatcttcaaatttccccaattggccccaataaaatcctgtagtattt

SEQ ID NO: 304405 - DNA, 2963 bp, Homo sapiens
ggcgagccccgcagactgagtgctccggggagctgtcagtgtcaggctctgggagagaggaagtgatcgctcccggaggagcgcgagccgagcggccggcgcagcgtgagacagcacatcctgcccgcgccggccccgccaccttcgggagccgcctgcaccaacgctgccgccgcccaggagccgccgccggctcggggagcccagttccgccgctgccgagcgcgtccaggaaaccaacatgtctgacaaaagtgacttaaaagctgagctagagcgcaaaaagcagcgcttagcacagataagagaagagaagaaacggaaggaagaggagaggaaacaagaaagaggctgatatgcagcagaagaaagaacccgttcaggacgactctgatctggatcgcaaacgacgagagacagaggctttgctgcaaagcattggtatctcaccggagccgcctctagtgcagccgctgcattttttaacatgggatacctgttattttcattatttagtcccaacccctatgtctccctcctcgaaatcagtgagcactcccagtgaagctggaagccaagactcaggcgatctggggccattaacaagaagaagactgcataaactgggcgtgtcaaaggtcacccaagtggatttcctgccaagggaagtagtgtcctactcaaaggagacccagactcctcttgccacgcatcagtctgaagaggatgaggaagatgaggaaatggtggaatctaaagttggccaggactcagaactggaaaatcaggacaaaaaacaggaagtgaaggaagcccctccaagagagttgacagaggaagaaaaacagcagatccttcattcagaggaatttctcatcttttttgaccggacaatacgggtaattgaaagagccctggctgaagattccgacatcttttttgactacagcggccgagagttagaggaaaaagatggggatgttcaggctggagccaatctttctttcaatcgtcagttctatgatgaacattggtccaagcatcgagtggtcacttgtatggactggtccctccagtaccctgagctgatggtggcttcttacaacaacaatgaagatgctccccatgaaccagatggagtggccttggtttggaacatgaagtttaagaaaaccacaccagaatacgtcttccactgtcagtcctctgtgatgtcggtctgcttcgcccgtttccatcctaacttggtggttggtgggacttactcgggccagattgtcctctgggacaatcgcagtcatcgaaggactccagtgcagcggacacccttatcagctgctgcacacacgcatcccgtgtactgtgtaaatgttgttgggacccagaatgctcataacctcatcactgtctccactgatggcaaaatgtgttcctggagcctggacatgctctcaactccacaggagagcatggagctggtgtacaataagtccaagcctgtcgctgttaccggaatggctttcccaacgggagacgtcaataacttcgtggttggcagtgaggaaggtacagtctacacggcttgtcgtcatggaagcaaagcaggtattggtgaggtctttgaaggtcaccaagggccagtgacaggaattaactgccacatggcagtgggcccaatcgacttttctcacctgtttgtcacatcatcatttgactggactgtcaaactgtggaccaccaagcacaacaagccgctctactcctttgaagacaatgcagactatgtgtacgatgtcatgtggtcccccgtgcatcctgcgctttttgcctgcgtggacgggatggggcgcttggacctctggaacctcaacaatgacaccgaggttccaacagcaagtgtggccattgagggggcatccgccctaaaccgtgttcgttgggcccaagctggcaaagaagttgctgttggggactcggaaggccgtatttgggtctatgacgttggagagcttgcagttccccacaatgatgaatggacccgatttgccaggacccttgtggaaattcgtgctaacagagctgatagcgaggaggaaggcactgttgagttatctgcctagtggaaatgagccacccccactgcagcccccacctttgtgtcctagagctcagcgtctgcagtcaagtctcttgtattcggtgtccattcagtatcagtattgctgtgacattttgggtgccatattgtgccagctttgctccaagtattctaaatgtgtcccatcatgctttccactgacccaaaattcaccacagcatttctatctttatatttctgtctcaaaaatgaagagaagggggttatgggttaagttgctgccttttaactactttgtagctgtatttaatagctggaaacctctggttaaatttgtgcttacatgcactcctggcatagtcctattaaatccatatgaagccagatatgattgggtgcagatgtggtgttcctcatattatggtacagggccaaagacttgagacgtggtgttttacatggtgactcacattatgaatggatttactagaagaacattgctgctccttatttattgtagtgtgctgcatggaacgtatttatttgaaagcattaaaataaatgatcctagagcatgtgcataatgagaggactgtattctctctgctgctgttgaggttatattaagttccacatagcaattacagtatgccagttccactgaagacatgaaatctttagaggtttcttgcagtgaacgaaatgaattttaatgcctattatttctgggtactttaacaatatttcaaatatcattgaccactaatacttctcactgaagctaacacagtctgacaaaagtctatggttcctaaatatgacatcagtgttgccaataaaatgtttcaaaccaagaagaaccaga

SEQ ID NO: 304406 - DNA, 1978 bp, Homo sapiens
ggcgagccccgcagactgagtgctccggggagctgtcagtgtcaggctctgggagagaggaagtgatcgctcccggaggagcgcgagccgagcggccggcgcagcgtgagacagcacatcctgcccgcgccggccccgccaccttcgggagccgcctgcaccaacgctgccgccgcccaggagccgccgccggctcggggagcccagttccgccgctgccgagcgcgtccaggaaaccaacatgtctgacaaaagtgacttaaaagctgagctagagcgcaaaaagcagcgcttagcacagataagagaagagaagaaacggaaggaagaggagaggaaacaagaaagaggctgatatgcagcagaagaaagaacccgttcaggacgactctgatctggatcgcaaacgacgagagacagaggctttgctgcaaagcattggtatctcaccggagccgcctctagtcccaacccctatgtctccctcctcgaaatcagtgagcactcccagtgaagctggaagccaagactcaggcgatctggggccattaacaaggaccctgcagtgggacacagacccctcagtgctccagctgcagtcagactcagaacttggaagaagactgcataaactgggcgtgtcaaaggtcacccaagtggatttcctgccaagggaagtagtgtcctactcaaaggagacccagactcctcttgccacgcatcagtctgaagaggatgaggaagatgaggaaatggtggaatctaaagttggccaggactcagaactggaaaatcaggacaaaaaacaggaagtgaaggaagcccctccaagagagttgacagaggaagaaaaacagcagatccttcattcagaggaatttctcatcttttttgaccggacaatacgggtaattgaaagagccctggctgaagattccgacatcttttttgactacagcggccgagagttagaggaaaaagatggggatgttcaggctggagccaatctttctttcaatcgtcagttctatgatgaacattggtccaagcatcgagtggtcacttgtatggactggtccctccagtaccctgagctgatggtggcttcttacaacaacaatgaagatgctccccatgaaccagatggagtggccttggtttggaacatgaagtttaagaaaaccacaccagaatacgtcttccactgtcagtcctctgtgatgtcggtctgcttcgcccgtttccatcctaacttggtggttggtgggacttactcgggccagattgtcctctgggacaatcgcagtcatcgaaggactccagtgcagcggacacccttatcagctgctgcacacacgcatcccgtgtactgtgtaaatgttgttgggacccagaatgctcataacctcatcactgtctccactgatggcaaaatgtgttcctggagcctggacatgctctcaactccacaggagagcatggagctggtgtacaataagtccaagcctgtcgctgttaccggaatggctttcccaacgggagacgtcaataacttcgtggttggcagtgaggaaggtacagtctacacggcttgtcgtcatggaagcaaagcaggtattggtgaggtctttgaaggtcaccaagggccagtgacaggaattaactgccacatggcagtgggcccaatcgacttttctcacctgtttgtcacatcatcatttgactggactgtcaaactgtggaccaccaagagtgaagtaactggccctcccataaattctagggaaccaggcctcagtgtttattactggaaatgcaccagctttgtggaagtttctggaaaggaatgttgtggaattggtgattaagtggaatagctttctcttctgtcccctggttcattgacttgatctaagcccaaggcaaaagtaagaggaggtctcttataatctgtcagcttccttctcacttaggacct

SEQ ID NO: 304407 - DNA, 183 bp, Homo sapiens
tgcagccgctgcattttttaacatgggatacctgttattttcattatttagtcccaacccctatgtctccctcctcgaaatcagtgagcactcccagtgaagctggaagccaagactcaggcgatctggggccattaacaaggtaagaattgtccctttaaaaggccatgatgggtgtcaatt

SEQ ID NO: 304408 - DNA, 3023 bp, Homo sapiens
ggcgagccccgcagactgagtgctccggggagctgtcagtgtcaggctctgggagagaggaagtgatcgctcccggaggagcgcgagccgagcggccggcgcagcgtgagacagcacatcctgcccgcgccggccccgccaccttcgggagccgcctgcaccaacgctgccgccgcccaggagccgccgccggctcggggagcccagttccgccgctgccgagcgcgtccaggaaaccaacatgtctgacaaaagtgacttaaaagctgagctagagcgcaaaaagcagcgcttagcacagataagagaagagaagaaacggaaggaagaggagaggaaacaagaaagaggctgatatgcagcagaagaaagaacccgttcaggacgactctgatctggatcgcaaacgacgagagacagaggctttgctgcaaagcattggtatctcaccggagccgcctctagtgcagccgctgcattttttaacatgggatacctgttattttcattatttagtcccaacccctatgtctccctcctcgaaatcagtgagcactcccagtgaagctggaagccaagactcaggcgatctggggccattaacaaggaccctgcagtgggacacagacccctcagtgctccagctgcagtcagactcagaacttggaagaagactgcataaactgggcgtgtcaaaggtcacccaagtggatttcctgccaagggaagtagtgtcctactcaaaggagacccagactcctcttgccacgcatcagtctgaagaggatgaggaagatgaggaaatggtggaatctaaagttggccaggactcagaactggaaaatcaggacaaaaaacaggaagtgaaggaagcccctccaagagagttgacagaggaagaaaaacagcagatccttcattcagaggaatttctcatcttttttgaccggacaatacgggtaattgaaagagccctggctgaagattccgacatcttttttgactacagcggccgagagttagaggaaaaagatggggatgttcaggctggagccaatctttctttcaatcgtcagttctatgatgaacattggtccaagcatcgagtggtcacttgtatggactggtccctccagtaccctgagctgatggtggcttcttacaacaacaatgaagatgctccccatgaaccagatggagtggccttggtttggaacatgaagtttaagaaaaccacaccagaatacgtcttccactgtcagtcctctgtgatgtcggtctgcttcgcccgtttccatcctaacttggtggttggtgggacttactcgggccagattgtcctctgggacaatcgcagtcatcgaaggactccagtgcagcggacacccttatcagctgctgcacacacgcatcccgtgtactgtgtaaatgttgttgggacccagaatgctcataacctcatcactgtctccactgatggcaaaatgtgttcctggagcctggacatgctctcaactccacaggagagcatggagctggtgtacaataagtccaagcctgtcgctgttaccggaatggctttcccaacgggagacgtcaataacttcgtggttggcagtgaggaaggtacagtctacacggcttgtcgtcatggaagcaaagcaggtattggtgaggtctttgaaggtcaccaagggccagtgacaggaattaactgccacatggcagtgggcccaatcgacttttctcacctgtttgtcacatcatcatttgactggactgtcaaactgtggaccaccaagcacaacaagccgctctactcctttgaagacaatgcagactatgtgtacgatgtcatgtggtcccccgtgcatcctgcgctttttgcctgcgtggacgggatggggcgcttggacctctggaacctcaacaatgacaccgaggttccaacagcaagtgtggccattgagggggcatccgccctaaaccgtgttcgttgggcccaagctggcaaagaagttgctgttggggactcggaaggccgtatttgggtctatgacgttggagagcttgcagttccccacaatgatgaatggacccgatttgccaggacccttgtggaaattcgtgctaacagagctgatagcgaggaggaaggcactgttgagttatctgcctagtggaaatgagccacccccactgcagcccccacctttgtgtcctagagctcagcgtctgcagtcaagtctcttgtattcggtgtccattcagtatcagtattgctgtgacattttgggtgccatattgtgccagctttgctccaagtattctaaatgtgtcccatcatgctttccactgacccaaaattcaccacagcatttctatctttatatttctgtctcaaaaatgaagagaagggggttatgggttaagttgctgccttttaactactttgtagctgtatttaatagctggaaacctctggttaaatttgtgcttacatgcactcctggcatagtcctattaaatccatatgaagccagatatgattgggtgcagatgtggtgttcctcatattatggtacagggccaaagacttgagacgtggtgttttacatggtgactcacattatgaatggatttactagaagaacattgctgctccttatttattgtagtgtgctgcatggaacgtatttatttgaaagcattaaaataaatgatcctagagcatgtgcataatgagaggactgtattctctctgctgctgttgaggttatattaagttccacatagcaattacagtatgccagttccactgaagacatgaaatctttagaggtttcttgcagtgaacgaaatgaattttaatgcctattatttctgggtactttaacaatatttcaaatatcattgaccactaatacttctcactgaagctaacacagtctgacaaaagtctatggttcctaaatatgacatcagtgttgccaataaaatgtttcaaaccaagaagaaccaga

SEQ ID NO: 304409 - DNA, 936 bp, Homo sapiens
  misc_feature (836)..(836): n is a, c, g, or t
ggcgagccccgcagactgagtgctccggggagctgtcagtgtcaggctctgggagagaggaagtgatcgctcccggaggagcgcgagccgagcggccggcgcagcgtgagacagcacatcctgcccgcgccggccccgccaccttcgggagccgcctgcaccaacgctgccgccgcccaggagccgccgccggctcggggagcccagttccgccgctgccgagcgcgtccaggaaaccaacatgtctgacaaaagtgacttaaaagctgagctagagcgcaaaaagcagcgcttagcacagataagagaagagaagaaacggaaggaagaggagaggaaacaagaaagaggctgatatgcagcagaagaaagaacccgttcaggacgactctgatctggatcgcaaacgacgagagacagaggctttgctgcaaagcattggtatctcaccggagccgcctctagtcccaacccctatgtctccctcctcgaaatcagtgagcactcccagtgaagctggaagccaagactcaggcgatctggggccattaacaaggaccctgcagtgggacacagacccctcagtgctccagctgcagtcagactcagaacttggaagaagactgcataaactgggcgtgtcaaaggtcacccaagtggatttcctgccaagggaagtagtgtcctactcaaaggagacccagactcctcttgccacgcatcagtctgaagaggatgaggaagatgaggaaatggtggaatctaaagttggccaggactcagaactggaaaatcaggacaaaaaacaggaagtgaaggaagcccctccaagagangtgaccgagggaagaaaaacaggacgaatcttcacatccgaggaattccacactttgaacgggcaaaaacgggatgaagaaccccgggggaataacgcat

SEQ ID NO: 304410 - DNA, 2972 bp, Homo sapiens
ggcgagccccgcagactgagtgctccggggagctgtcagtgtcaggctctgggagagaggaagtgatcgctcccggaggagcgcgagccgagcggccggcgcagcgtgagacagcacatcctgcccgcgccggccccgccaccttcgggagccgcctgcaccaacgctgccgccgcccaggagccgccgccggctcggggagcccagttccgccgctgccgagcgcgtccaggaaaccaacatgtctgacaaaagtgacttaaaagctgagctagagcgcaaaaagcagcgcttagcacagataagagaagagaagaaacggaaggaagaggagaggaaacaagaaagaggctgatatgcagcagaagaaagaacccgttcaggacgactctgatctggatcgcaaacgacgagagacagaggctttgctgcaaagcattggtatctcaccggagccgcctctagtcccaacccctatgtctccctcctcgaaatcagtgagcactcccagtgaagctggaagccaagactcaggcgatctggggccattaacaaggaccctgcagtgggacacagacccctcagtgctccagctgcagtcagactcagaacttggaagaagactgcataaactgggcgtgtcaaaggtcacccaagtggatttcctgccaagggaagtagtgtcctactcaaaggagacccagactcctcttgccacgcatcagtctgaagaggatgaggaagatgaggaaatggtggaatctaaagttggccaggactcagaactggaaaatcaggacaaaaaacaggaagtgaaggaagcccctccaagagagttgacagaggaagaaaaacagcagatccttcattcagaggaatttctcatcttttttgaccggacaatacgggtaattgaaagagccctggctgaagattccgacatcttttttgactacagcggccgagagttagaggaaaaagatggggatgttcaggctggagccaatctttctttcaatcgtcagttctatgatgaacattggtccaagcatcgagtggtcacttgtatggactggtccctccagtaccctgagctgatggtggcttcttacaacaacaatgaagatgctccccatgaaccagatggagtggccttggtttggaacatgaagtttaagaaaaccacaccagaatacgtcttccactgtcagtcctctgtgatgtcggtctgcttcgcccgtttccatcctaacttggtggttggtgggacttactcgggccagattgtcctctgggacaatcgcagtcatcgaaggactccagtgcagcggacacccttatcagctgctgcacacacgcatcccgtgtactgtgtaaatgttgttgggacccagaatgctcataacctcatcactgtctccactgatggcaaaatgtgttcctggagcctggacatgctctcaactccacaggagagcatggagctggtgtacaataagtccaagcctgtcgctgttaccggaatggctttcccaacgggagacgtcaataacttcgtggttggcagtgaggaaggtacagtctacacggcttgtcgtcatggaagcaaagcaggtattggtgaggtctttgaaggtcaccaagggccagtgacaggaattaactgccacatggcagtgggcccaatcgacttttctcacctgtttgtcacatcatcatttgactggactgtcaaactgtggaccaccaagcacaacaagccgctctactcctttgaagacaatgcagactatgtgtacgatgtcatgtggtcccccgtgcatcctgcgctttttgcctgcgtggacgggatggggcgcttggacctctggaacctcaacaatgacaccgaggttccaacagcaagtgtggccattgagggggcatccgccctaaaccgtgttcgttgggcccaagctggcaaagaagttgctgttggggactcggaaggccgtatttgggtctatgacgttggagagcttgcagttccccacaatgatgaatggacccgatttgccaggacccttgtggaaattcgtgctaacagagctgatagcgaggaggaaggcactgttgagttatctgcctagtggaaatgagccacccccactgcagcccccacctttgtgtcctagagctcagcgtctgcagtcaagtctcttgtattcggtgtccattcagtatcagtattgctgtgacattttgggtgccatattgtgccagctttgctccaagtattctaaatgtgtcccatcatgctttccactgacccaaaattcaccacagcatttctatctttatatttctgtctcaaaaatgaagagaagggggttatgggttaagttgctgccttttaactactttgtagctgtatttaatagctggaaacctctggttaaatttgtgcttacatgcactcctggcatagtcctattaaatccatatgaagccagatatgattgggtgcagatgtggtgttcctcatattatggtacagggccaaagacttgagacgtggtgttttacatggtgactcacattatgaatggatttactagaagaacattgctgctccttatttattgtagtgtgctgcatggaacgtatttatttgaaagcattaaaataaatgatcctagagcatgtgcataatgagaggactgtattctctctgctgctgttgaggttatattaagttccacatagcaattacagtatgccagttccactgaagacatgaaatctttagaggtttcttgcagtgaacgaaatgaattttaatgcctattatttctgggtactttaacaatatttcaaatatcattgaccactaatacttctcactgaagctaacacagtctgacaaaagtctatggttcctaaatatgacatcagtgttgccaataaaatgtttcaaaccaagaagaaccaga

SEQ ID NO: 304411 - DNA, 1977 bp, Homo sapiens
gtgtagtataccacgtgtatgtaggaataacaaagttttccttgtgttgtcatcttagcataattcatccttgtgacctcttccatttagtaccctgagctgatggtggcttcttacaacaacaatgaagatgctccccatgaaccagatggagtggccttggtttggaacatgaagtttaagaaaaccacaccagaatacgtcttccactgtcagtcctctgtgatgtcggtctgcttcgcccgtttccatcctaacttggtggttggtgggacttactcgggccagattgtcctctgggacaatcgcagtcatcgaaggactccagtgcagcggacacccttatcagctgctgcacacacgcatcccgtgtactgtgtaaatgttgttgggacccagaatgctcataacctcatcactgtctccactgatggcaaaatgtgttcctggagcctggacatgctctcaactccacaggagagcatggagctggtgtacaataagtccaagcctgtcgctgttaccggaatggctttcccaacgggagacgtcaataacttcgtggttggcagtgaggaaggtacagtctacacggcttgtcgtcatggaagcaaagcaggtattggtgaggtctttgaaggtcaccaagggccagtgacaggaattaactgccacatggcagtgggcccaatcgacttttctcacctgtttgtcacatcatcatttgactggactgtcaaactgtggaccaccaagcacaacaagccgctctactcctttgaagacaatgcagactatgtgtacgatgtcatgtggtcccccgtgcatcctgcgctttttgcctgcgtggacgggatggggcgcttggacctctggaacctcaacaatgacaccgaggttccaacagcaagtgtggccattgagggggcatccgccctaaaccgtgttcgttgggcccaagctggcaaagaagttgctgttggggactcggaaggccgtatttgggtctatgacgttggagagcttgcagttccccacaatgatgaatggacccgatttgccaggacccttgtggaaattcgtgctaacagagctgatagcgaggaggaaggcactgttgagttatctgcctagtggaaatgagccacccccactgcagcccccacctttgtgtcctagagctcagcgtctgcagtcaagtctcttgtattcggtgtccattcagtatcagtattgctgtgacattttgggtgccatattgtgccagctttgctccaagtattctaaatgtgtcccatcatgctttccactgacccaaaattcaccacagcatttctatctttatatttctgtctcaaaaatgaagagaagggggttatgggttaagttgctgccttttaactactttgtagctgtatttaatagctggaaacctctggttaaatttgtgcttacatgcactcctggcatagtcctattaaatccatatgaagccagatatgattgggtgcagatgtggtgttcctcatattatggtacagggccaaagacttgagacgtggtgttttacatggtgactcacattatgaatggatttactagaagaacattgctgctccttatttattgtagtgtgctgcatggaacgtatttatttgaaagcattaaaataaatgatcctagagcatgtgcataatgagaggactgtattctctctgctgctgttgaggttatattaagttccacatagcaattacagtatgccagttccactgaagacatgaaatctttagaggtttcttgcagtgaacgaaatgaattttaatgcctattatttctgggtactttaacaatatttcaaatatcattgaccactaatacttctcactgaagctaacacagtctgacaaaagtctatggttcctaaatatgacatcagtgttgccaataaaatgtttcaaaccaagaagaaccaga

SEQ ID NO: 304412 - DNA, 1229 bp, Homo sapiens
atgcatgcatgcatgcatgcatgcatgtgcatgcatgcatgcatgcatgcatgcatgtgcatgcatgcatgcatgcatgcatgcatgtgcatgcatgcatgcatgcatgcatgcatgtgcatgcatgcatgcatgcatgcatgcatgtgcatgcatgcatgcatgcatgcatgcatgtgcatgcatgcatgcatgcatgcatgcatgtgcatgcatgcatgcatgcatgcatgcatgtgcatgcatgcatgcatgcatgcatgcatgtgcatgcatgcatgcatgcatgcatgcatgtgcatgcatgcatgcatgcatgcatgcatgtgcatgcatgcatgcatgcatgcatgcatgtgcatgcatgcatgcatgcatgcatgcatgtgcatgcatgcatgcatgcatgcatgcatgtgcatgcatgcatgcatgcatgcatgcatgtgcatgcatgcatgcatgcatgcatgcatgtgcatgcatgcatgcatgcatgcatgcatgtgcatgcatgcatgcatgcatgcatgcatgtgcatgcatgcatgcatgcatgcatgcatgtgcatgcatgcatgcatgcatgcatgcatgtgcatgcatgcatgcatgcatgcatgcatgtgcatgcatgcatgcatgcatgcatgcatgtgcatgcatgcatgcatgcatgcatgcatgatgcatgcatgcatgcatgcatgcactcctggcatagtcctattaaatccatatgaagccagatatgattgggtgcagatgtggtgttcctcatattatggtacagggccaaagacttgagacgtggtgttttacatggtgactcacattatgaatggatttactagaagaacattgctgctccttatttattgtagtgtgctgcatggaacgtatttatttgaaagcattaaaataaatgatcctagagcatgtgcataatgagaggactgtattctctctgctgctgttgaggttatattaagttccacatagcaattacagtatgccagttccactgaagacatgaaatctttagaggtttcttgcagtgaacgaaatgaattttaatgcctattatttctgggtactttaacaatatttcaaatatcattgaccactaatacttctcactgaagctaacacagtctgacaaaagtctatggttcctaaatatgacatcagtgttgccaataaaatgtttcaaaccaagaagaaccaga

SEQ ID NO: 304413 - DNA, 784 bp, Homo sapiens
gtaccagatggagacccaggctgagcagcaggagctggaaacccttccaaccaccaagatggctcagaccaaccctacgccggggtccctggggccatggaagataaccatctatgatcaggagaactttcagggcaagaggatggagttcaccagctcctgtccaaatgtctctgagcgcagttttgataatgtccggtccctgaaggtggaaagtggcgcctggattggttatgagcataccagcttctgtgggcaacagtttatcctggagagaggagaataccctcgctgggatgcctggagtgggagtaatgcctaccacattgagcgtctcatgtccttccgccccatctgttcagctaatcataaggagtctaagatgaccatctttgagaaggaaaactttattggacgccagtgggagatctctgacgactacccctccttgcaagccatgggctggttcaacaacgaagtcggctccatgaagatacaaagtggggcctgggtttgctaccaatatcctggatatcgtgggtatcagtatatcttggaatgtgaccatcatggaggagactataaacattggagagagtggggctctcatgcccagacttcgcagatccaatcgattcgccgaatccaacagtagctgattaaaagctccaagtacgataattcctcaagcatgagaccttgctaagcactctagaataagttttatgttctgctcacagacattgctttcaaatgttagctgctgaaatccacaataaacgtc

SEQ ID NO: 304414 - DNA, 4696 bp, Homo sapiens
aggagagaagaaattgaaaagcaggcacttgagaagtctaagagaagctctaagacgtttaaggaaatgctgcaggacagggaatcccaaaatcaaaagtctacagttccgtcaagaaggagaatgtattcttttgatgatgtgctggaggaaggaaagcgaccccctacaatgactgtgtcagaagcaagttaccagagtgagagagtagaagagaagggagcaacttatccttcagaaattcccaaagaagattctaccacttttgcaaaaagagaggacccgtgtaacaactgaaattcagcttccttctcaaagtcctgtggaagaacaaagcccagcctctttgtcttctctgcgttcacggagcacacaaatggaatcaactcgtgtttcagcttctctccccagaagttaccggaaaactgatacagtcaggttaacatctgtggtcacaccaagaccctttggctctcagacaaggggaatctcatcactccccagatcttacacgatggatgatgcttggaagtataatggagatgttgaagacattaagagaactccaaacaatgtggtcagcacccctgcaccaagcccggacgcaagccaactggcttcaagcttatctagccagaaagaggtagcagcaacagaagaagatgtgacaaggctgccctctcctacatcccccttctcatctctttcccaagaccaggctgccacttctaaagccacattgtcttccacatctggtcttgatttaatgtctgaatctggagaaggggaaatctccccacaaagagaagtctcaagatcccaggatcagttcagtgatatgagaatcagcataaaccagacgcctgggaagagtcttgactttgggtttacaataaaatgggatattcctgggatcttcgtagcatcagttgaagcaggtagcccagcagaattttctcagctacaagtagatgatgaaattattgctattaacaacaccaagttttcatataacgattcaaaagagtgggaggaagccatggctaaggctcaagaaactggacacctagtgatggatgtgaggcgctatggaaaggctggttcacctgaaacaaagtggattgatgcaacttctggaatttacaactcagaaaaatcttcaaatctatctgtaacaactgatttctccgaaagccttcagagttctaatattgaatccaaagaaatcaatggaattcatgatgaaagcaatgcttttgaatcaaaagcatctgaatccatttctttgaaaaacttaaaaaggcgatcacaattttttgaacaaggaagctctgattcggtggttcctgatcttccagttccaaccatcagtgccccgagtcgctgggtgtgggatcaagaggaggagcggaagcggcaggagaggtggcagaaggagcaggaccgcctactgcaggaaaaatatcaacgtgagcaggagaaactgagggaagagtggcaaagggccaaacaggaggcagagagagagaattccaagtacttggatgaggaactgatggtcctaagctcaaacagcatgtctctgaccacacgggagccctctcttgccacctgggaagctacctggagtgaagggtccaagtcttcagacagagaaggaacccgagcaggagaagaggagaggagacagccacaagaggaagttgttcatgaggaccaaggaaagaagccgcaggatcagcttgttattgagagagagaggaaatgggagcaacagcttcaggaagagcaagagcaaaagcggcttcaggctgaggctgaggagcagaagcgtcctgcggaggagcagaagcgccaggcagagatagagcgggaaacatcagtcagaatataccagtacaggaggcctgttgattcctatgatataccaaagacagaagaagcatcttcaggttttcttcctggtgacaggaataaatccagatctactactgaactggatgattactccacaaataaaaatggaaacaataaatatttagaccaaattgggaacacgacctcttcacagaggagatccaagaaagaacaagtaccatcaggagcagaattggagaggcaacaaatccttcaggaaatgaggaagagaacaccccttcacaatgacaacagctggatccgacagcgcagtgccagtgtcaacaaagagcctgttagtcttcctgggatcatgagaagaggcgaatctttagataacctggactccccccgatccaattcttggagacagcctccttggctcaatcagcccacaggattctatgcttcttcctctgtgcaagactttagtcgcccaccacctcagctggtgtccacatcaaaccgtgcctacatgcggaacccctcctccagcgtgcccccaccttcagctggctccgtgaagacctccaccacaggtgtggccaccacacagtcccccaccccgagaagccattccccttcagcttcacagtcaggctctcagctgcgtaacaggtcagtcagtgggaagcgcatatgctcctactgcaataacattctgggcaaaggagccgccatgatcatcgagtccctgggtctttgttatcatttgcattgttttaagtgtgttgcctgtgagtgtgacctcggaggctcttcctcaggagctgaagtcaggatcagaaaccaccaactgtactgcaacgactgctatctcagattcaaatctggacggccaaccgccatgtgatgtaagcctccatacgaaagcactgttgcagatagaagaagaggtggttgctgctcatgtagatctataaatatgtgttgtatgtcttttttgctttttttttaaaaaaaagaataactttttttgcctctttagattacatagaagcattgtagtcttggtagaaccagtatttttgttgtttatttataaggtaattgtgtgtggggaaaagtgcagtatttacctgttgaattcagcatcttgagagcacaagggaaaaaataagaacctacgaatatttttgaggcagataatgatctagtttgactttctagttagtggtgttttgaagagggtattttattgttttttaaaaaaaggttcttaaacattatttgaaatagttaatataaatacataattgcatttgctctgtttattgtaatgtattctaaattaatgcagaaccatatggaaaatttcattaaaatctatccccaaatgtgctttctgtatccttccttctacctattattctgatttttaaaaatgcagttaatgtaccatttatttgcttgatgaagggagctctattttctttaccagaaatgttgctaagtaattcccaatagaaagctgcttattttcattaatgaaaaataaccatggtttgtatactagaagtcttcttcagaaactggtgagcctttctgttcaattgcatttgtaaataaacttgctgatgcatttaacgagtgggtcgtctttttcttaggtgtatgtgtctgacctcaggccttttagccatatttcagtatgtggccttttttgatgttatgttttatccagtagctttactaaggtataattgatgtaataaactgcatatatttaaagtgtatactttgacaaattttgacatggtgtataccttcgaaactatgccacagtctggatgtgtttactgaaacattttaataaggaagtttatttttgataaagttatgtttttggatacaatatatttgtatggtgagagtgatgaattgttggatcatttgaataaaatcttttactaaccccatgataaaaggagaagacaacagtgagcttagaatatctataaagcaaaaaatgtagtctcttgtttaaaaaatctggagcgggaatgcaaggatacaaaactttagcatgctttgagcaaaaatttaaacttactggaatcttttataataatgtaagtggaatggaggattctaggaactgagaactgtattggaataggttcaaaatatgtaagaaatgctaatgtgggagataaaaattttatttagtacttattctgattattattaaagtaataatgtgttccttgaggataacttgtcaaatgccccaaagcataaagaatataattctgaatcccaaattccaaagacaagaactctgtgtttgaattcattctgcatataattatttataagtatagattgtgaatttttccatgttcttaaaattatttttatcttttttcatggttgcatagtgctccattgtttggccttggtaatatttagttgataattccattactgtgtatttttcacttgtttctaagatcaaacattttaatatgtgcatgttatatataaatatgtaaattctgtgatactctatgatcatctctttctttatattattttcatagacatgaaatagttgctcagagattatgcattttaagacactcatagtatatattgccaaagtggtttccagaaaggcactgctggcttcgactcctataagcagcacgtgggcttgttcatctcactgcatgtttatgaagatacagttcttttgccttgttctctgcctgatgtgtatgcagaggcagccctcaatatgcagtggttgaataaatgaatgaagaaaccactatca

SEQ ID NO: 304415 - DNA, 4587 bp, Homo sapiens
aggagagaagaaattgaaaagcaggcacttgagaagtctaagagaagctctaagacgtttaaggaaatgctgcaggacagggaatcccaaaatcaaaagtctacagttccgtcaagaaggagaatgtattcttttgatgatgtgctggaggaaggaaagcgaccccctacaatgactgtgtcagaagcaagttaccagagtgagagagtagaagagaagggagcaacttatccttcagaaattcccaaagaagattctaccacttttgcaaaaagagaggacccgtgtaacaactgaaattcagcttccttctcaaagtcctgtggaagaacaaagcccagcctctttgtcttctctgcgttcacggagcacacaaatggaatcaactcgtgtttcagcttctctccccagaagttaccggaaaactgatacagtcaggttaacatctgtggtcacaccaagaccctttggctctcagacaaggggaatctcatcactccccagatcttacacgatggatgatgcttggaagtataatggagatgttgaagacattaagagaactccaaacaatgtggtcagcacccctgcaccaagcccggacgcaagccaactggcttcaagcttatctagccagaaagaggtagcagcaacagaagaagatgtgacaaggctgccctctcctacatcccccttctcatctctttcccaagaccaggctgccacttctaaagccacattgtcttccacatctggtcttgatttaatgtctgaatctggagaaggggaaatctccccacaaagagaagtctcaagatcccaggatcagttcagtgatatgagaatcagcataaaccagacgcctgggaagagtcttgactttgggtttacaataaaatgggatattcctgggatcttcgtagcatcagttgaagcaggtagcccagcagaattttctcagctacaagtagatgatgaaattattgctattaacaacaccaagttttcatataacgattcaaaagagtgggaggaagccatggctaaggctcaagaaactggacacctagtgatggatgtgaggcgctatggaaaggctggttcacctgaaacaaagtggattgatgcaacttctggaatttacaactcagaaaaatcttcaaatctatctgtaacaactgatttctccgaaagccttcagagttctaatattgaatccaaagaaatcaatggaattcatgatgaaagcaatgcttttgaatcaaaagcatctgaatccatttctttgaaaaacttaaaaaggcgatcacaattttttgaacaaggaagctctgattcggtggttcctgatcttccagttccaaccatcagtgccccgagtcgctgggtgtgggatcaagaggaggagcggaagcggcaggagaggtggcagaaggagcaggaccgcctactgcaggaaaaatatcaacgtgagcaggagaaactgagggaagagtggcaaagggccaaacaggaggcagagagagagaattccaagtacttggatgaggaactgatggtcctaagctcaaacagcatgtctctgaccacacgggagccctctcttgccacctgggaagctacctggagtgaagggtccaagtcttcagacagagaaggaacccgagcaggagaagaggagaggagacagccacaagaggaagttgttcatgaggaccaaggaaagaagccgcaggatcagcttgttattgagagagagaggaaatgggagcaacagcttcaggaagagcaagagcaaaagcggcttcaggctgaggctgaggagcagaagcgtcctgcggaggagcagaagcgccaggcagagatagagcgggaaacatcagtcagaatataccagtacaggaggcctgttgattcctatgatataccaaagacagaagaagcatcttcaggttttcttcctggtgacaggaataaatccagatctactactgaactggatgattactccacaaataaaaatggaaacaataaatatttagaccaaattgggaacacgacctcttcacagaggagatccaagaaagaacaagtaccatcaggagcagaattggagaggcaacaaatccttcaggaaatgaggaagagaacaccccttcacaatgacaacagctggatccgacagcgcagtgccagtgtcaacaaagagcctgttagtcttcctgggatcatgagaagaggcgaatctttagataacctggactccccccgatccaattcttggagacagcctccttggctcaatcagcccacaggattctatgcttcttcctctgtgcaagactttagtcgcccaccacctcagctggtgtccacatcaaaccgtgcctacatgcggaacccctcctccagcgtgcccccaccttcagctggctccgtgaagacctccaccacaggtgtggccaccacacagtcccccaccccgagaagccattccccttcagcttcacagtcaggctctcagctgcgtaacagtgtgttgcctgtgagtgtgacctcggaggctcttcctcaggagctgaagtcaggatcagaaaccaccaactgtactgcaacgactgctatctcagattcaaatctggacggccaaccgccatgtgatgtaagcctccatacgaaagcactgttgcagatagaagaagaggtggttgctgctcatgtagatctataaatatgtgttgtatgtcttttttgctttttttttaaaaaaaagaataactttttttgcctctttagattacatagaagcattgtagtcttggtagaaccagtatttttgttgtttatttataaggtaattgtgtgtggggaaaagtgcagtatttacctgttgaattcagcatcttgagagcacaagggaaaaaataagaacctacgaatatttttgaggcagataatgatctagtttgactttctagttagtggtgttttgaagagggtattttattgttttttaaaaaaaggttcttaaacattatttgaaatagttaatataaatacataattgcatttgctctgtttattgtaatgtattctaaattaatgcagaaccatatggaaaatttcattaaaatctatccccaaatgtgctttctgtatccttccttctacctattattctgatttttaaaaatgcagttaatgtaccatttatttgcttgatgaagggagctctattttctttaccagaaatgttgctaagtaattcccaatagaaagctgcttattttcattaatgaaaaataaccatggtttgtatactagaagtcttcttcagaaactggtgagcctttctgttcaattgcatttgtaaataaacttgctgatgcatttaacgagtgggtcgtctttttcttaggtgtatgtgtctgacctcaggccttttagccatatttcagtatgtggccttttttgatgttatgttttatccagtagctttactaaggtataattgatgtaataaactgcatatatttaaagtgtatactttgacaaattttgacatggtgtataccttcgaaactatgccacagtctggatgtgtttactgaaacattttaataaggaagtttatttttgataaagttatgtttttggatacaatatatttgtatggtgagagtgatgaattgttggatcatttgaataaaatcttttactaaccccatgataaaaggagaagacaacagtgagcttagaatatctataaagcaaaaaatgtagtctcttgtttaaaaaatctggagcgggaatgcaaggatacaaaactttagcatgctttgagcaaaaatttaaacttactggaatcttttataataatgtaagtggaatggaggattctaggaactgagaactgtattggaataggttcaaaatatgtaagaaatgctaatgtgggagataaaaattttatttagtacttattctgattattattaaagtaataatgtgttccttgaggataacttgtcaaatgccccaaagcataaagaatataattctgaatcccaaattccaaagacaagaactctgtgtttgaattcattctgcatataattatttataagtatagattgtgaatttttccatgttcttaaaattatttttatcttttttcatggttgcatagtgctccattgtttggccttggtaatatttagttgataattccattactgtgtatttttcacttgtttctaagatcaaacattttaatatgtgcatgttatatataaatatgtaaattctgtgatactctatgatcatctctttctttatattattttcatagacatgaaatagttgctcagagattatgcattttaagacactcatagtatatattgccaaagtggtttccagaaaggcactgctggcttcgactcctataagcagcacgtgggcttgttcatctcactgcatgtttatgaagatacagttcttttgccttgttctctgcctgatgtgtatgcagaggcagccctcaatatgcagtggttgaataaatgaatgaagaaaccactatca

SEQ ID NO: 304416 - DNA, 4484 bp, Homo sapiens
aggagagaagaaattgaaaagcaggcacttgagaagtctaagagaagctctaagacgtttaaggaaatgctgcaggacagggaatcccaaaatcaaaagtctacagttccgtcaagaaggagaatgtattcttttgatgatgtgctggaggaaggaaagcgaccccctacaatgactgtgtcagaagcaagttaccagagtgagagagtagaagagaagggagcaacttatccttcagaaattcccaaagaagattctaccacttttgcaaaaagagaggacccgtgtaacaactgaaattcagcttccttctcaaagtcctgtggaagaacaaagcccagcctctttgtcttctctgcgttcacggagcacacaaatggaatcaactcgtgtttcagcttctctccccagaagttaccggaaaactgatacagtcaggttaacatctgtggtcacaccaagaccctttggctctcagacaaggggaatctcatcactccccagatcttacacgatggatgatgcttggaagtataatggagatgttgaagacattaagagaactccaaacaatgtggtcagcacccctgcaccaagcccggacgcaagccaactggcttcaagcttatctagccagaaagaggtagcagcaacagaagaagatgtgacaaggctgccctctcctacatcccccttctcatctctttcccaagaccaggctgccacttctaaagccacattgtcttccacatctggtcttgatttaatgtctgaatctggagaaggggaaatctccccacaaagagaagtctcaagatcccaggatcagttcagtgatatgagaatcagcataaaccagacgcctgggaagagtcttgactttgggtttacaataaaatgggatattcctgggatcttcgtagcatcagttgaagcaggtagcccagcagaattttctcagctacaagtagatgatgaaattattgctattaacaacaccaagttttcatataacgattcaaaagagtgggaggaagccatggctaaggctcaagaaactggacacctagtgatggatgtgaggcgctatggaaaggctggttcacctgaaacaaagtggattgatgcaacttctggaatttacaactcagaaaaatcttcaaatctatctgtaacaactgatttctccgaaagccttcagagttctaatattgaatccaaagaaatcaatggaattcatgatgaaagcaatgcttttgaatcaaaagcatctgaatccatttctttgaaaaacttaaaaaggcgatcacaattttttgaacaaggaagctctgattcggtggttcctgatcttccagttccaaccatcagtgccccgagtcgctgggtgtgggatcaagaggaggagcggaagcggcaggagaggtggcagaaggagcaggaccgcctactgcaggaaaaatatcaacgtgagcaggagaaactgagggaagagtggcaaagggccaaacaggaggcagagagagagaattccaagtacttggatgaggaactgatggtcctaagctcaaacagcatgtctctgaccacacgggagccctctcttgccacctgggaagctacctggagtgaagggtccaagtcttcagacagagaaggaacccgagcaggagaagaggagaggagacagccacaagaggaagttgttcatgaggaccaaggaaagaagccgcaggatcagcttgttattgagagagagaggaaatgggagcaacagcttcaggaagagcaagagcaaaagcggcttcaggctgaggctgaggagcagaagcgtcctgcggaggagcagaagcgccaggcagagatagagcgggaaacatcagtcagaatataccagtacaggaggcctgttgattcctatgatataccaaagacagaagaagcatcttcaggttttcttcctggtgacaggaataaatccagatctactactgaactggatgattactccacaaataaaaatggaaacaataaatatttagaccaaattgggaacacgacctcttcacagaggagatccaagaaagaacaagtaccatcaggagcagaattggagaggcaacaaatccttcaggaaatgaggaagagaacaccccttcacaatgacaacagctggatccgacagcgcagtgccagtgtcaacaaagagcctgttagtcttcctgggatcatgagaagaggcgaatctttagataacctggactccccccgatccaattcttggagacagcctccttggctcaatcagcccacaggattctatgcttcttcctctgtgcaagactttagtcgcccaccacctcagctggtgtccacatcaaaccgtgcctacatgcggaacccctcctccagcgtgcccccaccttcagctggctccgtgaagacctccaccacaggtgtggccaccacacagtcccccaccccgagaagccattccccttcagcttcacagtcaggctctcagctgcgtaacagctggacggccaaccgccatgtgatgtaagcctccatacgaaagcactgttgcagatagaagaagaggtggttgctgctcatgtagatctataaatatgtgttgtatgtcttttttgctttttttttaaaaaaaagaataactttttttgcctctttagattacatagaagcattgtagtcttggtagaaccagtatttttgttgtttatttataaggtaattgtgtgtggggaaaagtgcagtatttacctgttgaattcagcatcttgagagcacaagggaaaaaataagaacctacgaatatttttgaggcagataatgatctagtttgactttctagttagtggtgttttgaagagggtattttattgttttttaaaaaaaggttcttaaacattatttgaaatagttaatataaatacataattgcatttgctctgtttattgtaatgtattctaaattaatgcagaaccatatggaaaatttcattaaaatctatccccaaatgtgctttctgtatccttccttctacctattattctgatttttaaaaatgcagttaatgtaccatttatttgcttgatgaagggagctctattttctttaccagaaatgttgctaagtaattcccaatagaaagctgcttattttcattaatgaaaaataaccatggtttgtatactagaagtcttcttcagaaactggtgagcctttctgttcaattgcatttgtaaataaacttgctgatgcatttaacgagtgggtcgtctttttcttaggtgtatgtgtctgacctcaggccttttagccatatttcagtatgtggccttttttgatgttatgttttatccagtagctttactaaggtataattgatgtaataaactgcatatatttaaagtgtatactttgacaaattttgacatggtgtataccttcgaaactatgccacagtctggatgtgtttactgaaacattttaataaggaagtttatttttgataaagttatgtttttggatacaatatatttgtatggtgagagtgatgaattgttggatcatttgaataaaatcttttactaaccccatgataaaaggagaagacaacagtgagcttagaatatctataaagcaaaaaatgtagtctcttgtttaaaaaatctggagcgggaatgcaaggatacaaaactttagcatgctttgagcaaaaatttaaacttactggaatcttttataataatgtaagtggaatggaggattctaggaactgagaactgtattggaataggttcaaaatatgtaagaaatgctaatgtgggagataaaaattttatttagtacttattctgattattattaaagtaataatgtgttccttgaggataacttgtcaaatgccccaaagcataaagaatataattctgaatcccaaattccaaagacaagaactctgtgtttgaattcattctgcatataattatttataagtatagattgtgaatttttccatgttcttaaaattatttttatcttttttcatggttgcatagtgctccattgtttggccttggtaatatttagttgataattccattactgtgtatttttcacttgtttctaagatcaaacattttaatatgtgcatgttatatataaatatgtaaattctgtgatactctatgatcatctctttctttatattattttcatagacatgaaatagttgctcagagattatgcattttaagacactcatagtatatattgccaaagtggtttccagaaaggcactgctggcttcgactcctataagcagcacgtgggcttgttcatctcactgcatgtttatgaagatacagttcttttgccttgttctctgcctgatgtgtatgcagaggcagccctcaatatgcagtggttgaataaatgaatgaagaaaccactatca

SEQ ID NO: 304417 - DNA, 591 bp, Homo sapiens
ggcgactattgctgagtacagatgtgatcaaaggaagatagtatcagaaactgcaggatggactaattacactgaaattgctcatttatgtgaataggtgtcaagggtctcagagctgccatggagatggttcaaagttagagtataatcaaggcactctttagttggctggtaaaagttattctcccacagatatatgtatagagcttttcttaaattattatcagtgttaatagcagagtgtgacttttaaagaagaatcttgagctgcccaggtgaaagcctccattccattcttgttctgcatctaggtcagtcagtgggaagcgcatatgctcctactgcaataacattctgggcaaaggagccgccatgatcatcgagtccctgggtctttgttatcatttgcattgttttaagtgtgttgcctgtgagtgtgacctcggaggctcttcctcaggagctgaagtcaggatcagaaaccaccaactgtactgcaacgactgctatctcagattcaaatgtaagagagcaaatcagagagaaaatttcttgccttttaaggaggccacgggttcccatgcatttccc

SEQ ID NO: 304418 - DNA, 4777 bp, Homo sapiens
aggagagaagaaattgaaaagcaggcacttgagaagtctaagagaagctctaagacgtttaaggaaatgctgcaggacagggaatcccaaaatcaaaagtctacagttccgtcaagaaggagaatgtattcttttgatgatgtgctggaggaaggaaagcgaccccctacaatgactgtgtcagaagcaagttaccagagtgagagagtagaagagaagggagcaacttatccttcagaaattcccaaagaagattctaccacttttgcaaaaagagaggacccgtgtaacaactgaaattcagcttccttctcaaagtcctgtggaagaacaaagcccagcctctttgtcttctctgcgttcacggagcacacaaatggaatcaactcgtgtttcagcttctctccccagaagttaccggaaaactgatacagtcaggttaacatctgtggtcacaccaagaccctttggctctcagacaaggggaatctcatcactccccagatcttacacgatggatgatgcttggaagtataatggagatgttgaagacattaagagaactccaaacaatgtggtcagcacccctgcaccaagcccggacgcaagccaactggcttcaagcttatctagccagaaagaggtagcagcaacagaagaagatgtgacaaggctgccctctcctacatcccccttctcatctctttcccaagaccaggctgccacttctaaagccacattgtcttccacatctggtcttgatttaatgtctgaatctggagaaggggaaatctccccacaaagagaagtctcaagatcccaggatcagttcagtgatatgagaatcagcataaaccagacgcctgggaagagtcttgactttgggtttacaataaaatgggatattcctgggatcttcgtagcatcagttgaagcaggtagcccagcagaattttctcagctacaagtagatgatgaaattattgctattaacaacaccaagttttcatataacgattcaaaagagtgggaggaagccatggctaaggctcaagaaactggacacctagtgatggatgtgaggcgctatggaaaggctgactggggcaaagaccaaccttccctgccatttatacggcataaaaccctcaatctcaccagtatggctaccaaaattataggttcacctgaaacaaagtggattgatgcaacttctggaatttacaactcagaaaaatcttcaaatctatctgtaacaactgatttctccgaaagccttcagagttctaatattgaatccaaagaaatcaatggaattcatgatgaaagcaatgcttttgaatcaaaagcatctgaatccatttctttgaaaaacttaaaaaggcgatcacaattttttgaacaaggaagctctgattcggtggttcctgatcttccagttccaaccatcagtgccccgagtcgctgggtgtgggatcaagaggaggagcggaagcggcaggagaggtggcagaaggagcaggaccgcctactgcaggaaaaatatcaacgtgagcaggagaaactgagggaagagtggcaaagggccaaacaggaggcagagagagagaattccaagtacttggatgaggaactgatggtcctaagctcaaacagcatgtctctgaccacacgggagccctctcttgccacctgggaagctacctggagtgaagggtccaagtcttcagacagagaaggaacccgagcaggagaagaggagaggagacagccacaagaggaagttgttcatgaggaccaaggaaagaagccgcaggatcagcttgttattgagagagagaggaaatgggagcaacagcttcaggaagagcaagagcaaaagcggcttcaggctgaggctgaggagcagaagcgtcctgcggaggagcagaagcgccaggcagagatagagcgggaaacatcagtcagaatataccagtacaggaggcctgttgattcctatgatataccaaagacagaagaagcatcttcaggttttcttcctggtgacaggaataaatccagatctactactgaactggatgattactccacaaataaaaatggaaacaataaatatttagaccaaattgggaacacgacctcttcacagaggagatccaagaaagaacaagtaccatcaggagcagaattggagaggcaacaaatccttcaggaaatgaggaagagaacaccccttcacaatgacaacagctggatccgacagcgcagtgccagtgtcaacaaagagcctgttagtcttcctgggatcatgagaagaggcgaatctttagataacctggactccccccgatccaattcttggagacagcctccttggctcaatcagcccacaggattctatgcttcttcctctgtgcaagactttagtcgcccaccacctcagctggtgtccacatcaaaccgtgcctacatgcggaacccctcctccagcgtgcccccaccttcagctggctccgtgaagacctccaccacaggtgtggccaccacacagtcccccaccccgagaagccattccccttcagcttcacagtcaggctctcagctgcgtaacaggtcagtcagtgggaagcgcatatgctcctactgcaataacattctgggcaaaggagccgccatgatcatcgagtccctgggtctttgttatcatttgcattgttttaagtgtgttgcctgtgagtgtgacctcggaggctcttcctcaggagctgaagtcaggatcagaaaccaccaactgtactgcaacgactgctatctcagattcaaatctggacggccaaccgccatgtgatgtaagcctccatacgaaagcactgttgcagatagaagaagaggtggttgctgctcatgtagatctataaatatgtgttgtatgtcttttttgctttttttttaaaaaaaagaataactttttttgcctctttagattacatagaagcattgtagtcttggtagaaccagtatttttgttgtttatttataaggtaattgtgtgtggggaaaagtgcagtatttacctgttgaattcagcatcttgagagcacaagggaaaaaataagaacctacgaatatttttgaggcagataatgatctagtttgactttctagttagtggtgttttgaagagggtattttattgttttttaaaaaaaggttcttaaacattatttgaaatagttaatataaatacataattgcatttgctctgtttattgtaatgtattctaaattaatgcagaaccatatggaaaatttcattaaaatctatccccaaatgtgctttctgtatccttccttctacctattattctgatttttaaaaatgcagttaatgtaccatttatttgcttgatgaagggagctctattttctttaccagaaatgttgctaagtaattcccaatagaaagctgcttattttcattaatgaaaaataaccatggtttgtatactagaagtcttcttcagaaactggtgagcctttctgttcaattgcatttgtaaataaacttgctgatgcatttaacgagtgggtcgtctttttcttaggtgtatgtgtctgacctcaggccttttagccatatttcagtatgtggccttttttgatgttatgttttatccagtagctttactaaggtataattgatgtaataaactgcatatatttaaagtgtatactttgacaaattttgacatggtgtataccttcgaaactatgccacagtctggatgtgtttactgaaacattttaataaggaagtttatttttgataaagttatgtttttggatacaatatatttgtatggtgagagtgatgaattgttggatcatttgaataaaatcttttactaaccccatgataaaaggagaagacaacagtgagcttagaatatctataaagcaaaaaatgtagtctcttgtttaaaaaatctggagcgggaatgcaaggatacaaaactttagcatgctttgagcaaaaatttaaacttactggaatcttttataataatgtaagtggaatggaggattctaggaactgagaactgtattggaataggttcaaaatatgtaagaaatgctaatgtgggagataaaaattttatttagtacttattctgattattattaaagtaataatgtgttccttgaggataacttgtcaaatgccccaaagcataaagaatataattctgaatcccaaattccaaagacaagaactctgtgtttgaattcattctgcatataattatttataagtatagattgtgaatttttccatgttcttaaaattatttttatcttttttcatggttgcatagtgctccattgtttggccttggtaatatttagttgataattccattactgtgtatttttcacttgtttctaagatcaaacattttaatatgtgcatgttatatataaatatgtaaattctgtgatactctatgatcatctctttctttatattattttcatagacatgaaatagttgctcagagattatgcattttaagacactcatagtatatattgccaaagtggtttccagaaaggcactgctggcttcgactcctataagcagcacgtgggcttgttcatctcactgcatgtttatgaagatacagttcttttgccttgttctctgcctgatgtgtatgcagaggcagccctcaatatgcagtggttgaataaatgaatgaagaaaccactatca

SEQ ID NO: 304419 - DNA, 3627 bp, Homo sapiens
  misc_feature (11)..(11): n is a, c, g, or t
ctaaaattggnacgatacagagaagattagcatggcccctgcgcaaggatgacacgcaaattcgtgaagcgttccatattttaaaaatcttcaaatctatctgtaacaactgatttctccgaaagccttcagagttctaatattgaatccaaagaaatcaatggaattcatgatgaaagcaatgcttttgaatcaaaagcatctgaatccatttctttgaaaaacttaaaaaggcgatcacaattttttgaacaaggaagctctgattcggtggttcctgatcttccagttccaaccatcagtgccccgagtcgctgggtgtgggatcaagaggaggagcggaagcggcaggagaggtggcagaaggagcaggaccgcctactgcaggaaaaatatcaacgtgagcaggagaaactgagggaagagtggcaaagggccaaacaggaggcagagagagagaattccaagtacttggatgaggaactgatggtcctaagctcaaacagcatgtctctgaccacacgggagccctctcttgccacctgggaagctacctggagtgaagggtccaagtcttcagacagagaaggaacccgagcaggagaagaggagaggagacagccacaagaggaagttgttcatgaggaccaaggaaagaagccgcaggatcagcttgttattgagagagagaggaaatgggagcaacagcttcaggaagagcaagagcaaaagcggcttcaggctgaggctgaggagcagaagcgtcctgcggaggagcagaagcgccaggcagagatagagcgggaaacatcagtcagaatataccagtacaggaggcctgttgattcctatgatataccaaagacagaagaagcatcttcaggttttcttcctggtgacaggaataaatccagatctactactgaactggatgattactccacaaataaaaatggaaacaataaatatttagaccaaattgggaacacgacctcttcacagaggagatccaagaaagaacaagtaccatcaggagcagaattggagaggcaacaaatccttcaggaaatgaggaagagaacaccccttcacaatgacaacagctggatccgacagcgcagtgccagtgtcaacaaagagcctgttagtcttcctgggatcatgagaagaggcgaatctttagataacctggactccccccgatccaattcttggagacagcctccttggctcaatcagcccacaggattctatgcttcttcctctgtgcaagactttagtcgcccaccacctcagctggtgtccacatcaaaccgtgcctacatgcggaacccctcctccagcgtgcccccaccttcagctggctccgtgaagacctccaccacaggtgtggccaccacacagtcccccaccccgagaagccattccccttcagcttcacagtcaggctctcagctgcgtaacaggtcagtcagtgggaagcgcatatgctcctactgcaataacattctgggcaaaggagccgccatgatcatcgagtccctgggtctttgttatcatttgcattgttttaagtgtgttgcctgtgagtgtgacctcggaggctcttcctcaggagctgaagtcaggatcagaaaccaccaactgtactgcaacgactgctatctcagattcaaatctggacggccaaccgccatgtgatgtaagcctccatacgaaagcactgttgcagatagaagaagaggtggttgctgctcatgtagatctataaatatgtgttgtatgtcttttttgctttttttttaaaaaaaagaataactttttttgcctctttagattacatagaagcattgtagtcttggtagaaccagtatttttgttgtttatttataaggtaattgtgtgtggggaaaagtgcagtatttacctgttgaattcagcatcttgagagcacaagggaaaaaataagaacctacgaatatttttgaggcagataatgatctagtttgactttctagttagtggtgttttgaagagggtattttattgttttttaaaaaaaggttcttaaacattatttgaaatagttaatataaatacataattgcatttgctctgtttattgtaatgtattctaaattaatgcagaaccatatggaaaatttcattaaaatctatccccaaatgtgctttctgtatccttccttctacctattattctgatttttaaaaatgcagttaatgtaccatttatttgcttgatgaagggagctctattttctttaccagaaatgttgctaagtaattcccaatagaaagctgcttattttcattaatgaaaaataaccatggtttgtatactagaagtcttcttcagaaactggtgagcctttctgttcaattgcatttgtaaataaacttgctgatgcatttaacgagtgggtcgtctttttcttaggtgtatgtgtctgacctcaggccttttagccatatttcagtatgtggccttttttgatgttatgttttatccagtagctttactaaggtataattgatgtaataaactgcatatatttaaagtgtatactttgacaaattttgacatggtgtataccttcgaaactatgccacagtctggatgtgtttactgaaacattttaataaggaagtttatttttgataaagttatgtttttggatacaatatatttgtatggtgagagtgatgaattgttggatcatttgaataaaatcttttactaaccccatgataaaaggagaagacaacagtgagcttagaatatctataaagcaaaaaatgtagtctcttgtttaaaaaatctggagcgggaatgcaaggatacaaaactttagcatgctttgagcaaaaatttaaacttactggaatcttttataataatgtaagtggaatggaggattctaggaactgagaactgtattggaataggttcaaaatatgtaagaaatgctaatgtgggagataaaaattttatttagtacttattctgattattattaaagtaataatgtgttccttgaggataacttgtcaaatgccccaaagcataaagaatataattctgaatcccaaattccaaagacaagaactctgtgtttgaattcattctgcatataattatttataagtatagattgtgaatttttccatgttcttaaaattatttttatcttttttcatggttgcatagtgctccattgtttggccttggtaatatttagttgataattccattactgtgtatttttcacttgtttctaagatcaaacattttaatatgtgcatgttatatataaatatgtaaattctgtgatactctatgatcatctctttctttatattattttcatagacatgaaatagttgctcagagattatgcattttaagacactcatagtatatattgccaaagtggtttccagaaaggcactgctggcttcgactcctataagcagcacgtgggcttgttcatctcactgcatgtttatgaagatacagttcttttgccttgttctctgcctgatgtgtatgcagaggcagccctcaatatgcagtggttgaataaatgaatgaagaaaccactatca

SEQ ID NO: 304420 - DNA, 3425 bp, Homo sapiens
aaatgaagacttatattgtatatttttcttccttgcccatgtgctgcaacacaggaagctctgattcggtggttcctgatcttccagttccaaccatcagtgccccgagtcgctgggtgtgggatcaagaggaggagcggaagcggcaggagaggtggcagaaggagcaggaccgcctactgcaggaaaaatatcaacgtgagcaggagaaactgagggaagagtggcaaagggccaaacaggaggcagagagagagaattccaagtacttggatgaggaactgatggtcctaagctcaaacagcatgtctctgaccacacgggagccctctcttgccacctgggaagctacctggagtgaagggtccaagtcttcagacagagaaggaacccgagcaggagaagaggagaggagacagccacaagaggaagttgttcatgaggaccaaggaaagaagccgcaggatcagcttgttattgagagagagaggaaatgggagcaacagcttcaggaagagcaagagcaaaagcggcttcaggctgaggctgaggagcagaagcgtcctgcggaggagcagaagcgccaggcagagatagagcgggaaacatcagtcagaatataccagtacaggaggcctgttgattcctatgatataccaaagacagaagaagcatcttcaggttttcttcctggtgacaggaataaatccagatctactactgaactggatgattactccacaaataaaaatggaaacaataaatatttagaccaaattgggaacacgacctcttcacagaggagatccaagaaagaacaagtaccatcaggagcagaattggagaggcaacaaatccttcaggaaatgaggaagagaacaccccttcacaatgacaacagctggatccgacagcgcagtgccagtgtcaacaaagagcctgttagtcttcctgggatcatgagaagaggcgaatctttagataacctggactccccccgatccaattcttggagacagcctccttggctcaatcagcccacaggattctatgcttcttcctctgtgcaagactttagtcgcccaccacctcagctggtgtccacatcaaaccgtgcctacatgcggaacccctcctccagcgtgcccccaccttcagctggctccgtgaagacctccaccacaggtgtggccaccacacagtcccccaccccgagaagccattccccttcagcttcacagtcaggctctcagctgcgtaacaggtcagtcagtgggaagcgcatatgctcctactgcaataacattctgggcaaaggagccgccatgatcatcgagtccctgggtctttgttatcatttgcattgttttaagtgtgttgcctgtgagtgtgacctcggaggctcttcctcaggagctgaagtcaggatcagaaaccaccaactgtactgcaacgactgctatctcagattcaaatctggacggccaaccgccatgtgatgtaagcctccatacgaaagcactgttgcagatagaagaagaggtggttgctgctcatgtagatctataaatatgtgttgtatgtcttttttgctttttttttaaaaaaaagaataactttttttgcctctttagattacatagaagcattgtagtcttggtagaaccagtatttttgttgtttatttataaggtaattgtgtgtggggaaaagtgcagtatttacctgttgaattcagcatcttgagagcacaagggaaaaaataagaacctacgaatatttttgaggcagataatgatctagtttgactttctagttagtggtgttttgaagagggtattttattgttttttaaaaaaaggttcttaaacattatttgaaatagttaatataaatacataattgcatttgctctgtttattgtaatgtattctaaattaatgcagaaccatatggaaaatttcattaaaatctatccccaaatgtgctttctgtatccttccttctacctattattctgatttttaaaaatgcagttaatgtaccatttatttgcttgatgaagggagctctattttctttaccagaaatgttgctaagtaattcccaatagaaagctgcttattttcattaatgaaaaataaccatggtttgtatactagaagtcttcttcagaaactggtgagcctttctgttcaattgcatttgtaaataaacttgctgatgcatttaacgagtgggtcgtctttttcttaggtgtatgtgtctgacctcaggccttttagccatatttcagtatgtggccttttttgatgttatgttttatccagtagctttactaaggtataattgatgtaataaactgcatatatttaaagtgtatactttgacaaattttgacatggtgtataccttcgaaactatgccacagtctggatgtgtttactgaaacattttaataaggaagtttatttttgataaagttatgtttttggatacaatatatttgtatggtgagagtgatgaattgttggatcatttgaataaaatcttttactaaccccatgataaaaggagaagacaacagtgagcttagaatatctataaagcaaaaaatgtagtctcttgtttaaaaaatctggagcgggaatgcaaggatacaaaactttagcatgctttgagcaaaaatttaaacttactggaatcttttataataatgtaagtggaatggaggattctaggaactgagaactgtattggaataggttcaaaatatgtaagaaatgctaatgtgggagataaaaattttatttagtacttattctgattattattaaagtaataatgtgttccttgaggataacttgtcaaatgccccaaagcataaagaatataattctgaatcccaaattccaaagacaagaactctgtgtttgaattcattctgcatataattatttataagtatagattgtgaatttttccatgttcttaaaattatttttatcttttttcatggttgcatagtgctccattgtttggccttggtaatatttagttgataattccattactgtgtatttttcacttgtttctaagatcaaacattttaatatgtgcatgttatatataaatatgtaaattctgtgatactctatgatcatctctttctttatattattttcatagacatgaaatagttgctcagagattatgcattttaagacactcatagtatatattgccaaagtggtttccagaaaggcactgctggcttcgactcctataagcagcacgtgggcttgttcatctcactgcatgtttatgaagatacagttcttttgccttgttctctgcctgatgtgtatgcagaggcagccctcaatatgcagtggttgaataaatgaatgaagaaaccactatca

SEQ ID NO: 304421 - DNA, 3503 bp, Homo sapiens
aggagagaagaaattgaaaagcaggcacttgagaagtctaagagaagctctaagacgtttaaggaaatgctgcaggacagggaatcccaaaatcaaaagtctacagttccgtcaagaaggagaatgtattcttttgatgatgtgctggaggaaggaaagcgaccccctacaatgactgtgtcagaagcaagttaccagagtgagagagtagaagagaagggagcaacttatccttcagaaattcccaaagaagattctaccacttttgcaaaaagagaggacccgtgtaacaactgaaattcagcttccttctcaaagtcctgtggaagaacaaagcccagcctctttgtcttctctgcgttcacggagcacacaaatggaatcaactcgtgtttcagcttctctccccagaagttaccggaaaactgatacagtcaggttaacatctgtggtcacaccaagaccctttggctctcagacaaggggaatctcatcactccccagatcttacacgatggatgatgcttggaagtataatggagatgttgaagacattaagagaactccaaacaatgtggtcagcacccctgcaccaagcccggacgcaagccaactggcttcaagcttatctagccagaaagaggtagcagcaacagaagaagatgtgacaaggctgccctctcctacatcccccttctcatctctttcccaagaccaggctgccacttctaaagccacattgtcttccacatctggtcttgatttaatgtctgaatctggagaaggggaaatctccccacaaagagaagtctcaagatcccaggatcagttcagtgatatgagaatcagcataaaccagacgcctgggaagagtcttgactttgggtttacaataaaatgggatattcctgggatcttcgtagcatcagttgaagcaggtagcccagcagaattttctcagctacaagtagatgatgaaattattgctattaacaacaccaagttttcatataacgattcaaaagagtgggaggaagccatggctaaggctcaagaaactggacacctagtgatggatgtgaggcgctatggaaaggctggttcacctgaaacaaagtggattgatgcaacttctggaatttacaactcagaaaaatcttcaaatctatctgtaacaactgatttctccgaaagccttcagagttctaatattgaatccaaagaaatcaatggaattcatgatgaaagcaatgcttttgaatcaaaagcatctgaatccatttctttgaaaaacttaaaaaggcgatcacaattttttgaacaaggaagctctgattcggtggttcctgatcttccagttccaaccatcagtgccccgagtcgctgggtgtgggatcaagaggaggagcggaagcggcaggagaggtggcagaaggagcaggaccgcctactgcaggaaaaatatcaacgtgagcaggagaaactgagggaagagtggcaaagggccaaacaggaggcagagagagagaattccaagtacttggatgaggaactgatggtcctaagctcaaacagcatgtctctgaccacacgggagccctctcttgccacctgggaagctacctggagtgaagggtccaagtcttcagacagagaaggaacccgagcaggagaagaggagaggagacagccacaagaggaagttgttcatgaggaccaaggaaagaagccgcaggatcagcttgttattgagagagagaggaaatgggagcaacagcttcaggaagagcaagagcaaaagcggcttcaggctgaggctgaggagcagaagcgtcctgcggaggagcagaagcgccaggcagagatagagcgggaaacatcagtcagaatataccagtacaggaggcctgttgattcctatgatataccaaagacagaagaagcatcttcaggttttcttcctggtgacaggaataaatccagatctactactgaactggatgattactccacaaataaaaatggaaacaataaatatttagaccaaattgggaacacgacctcttcacagaggagatccaagaaagaacaagtaccatcaggagcagaattggagaggcaacaaatccttcaggaaatgaggaagagaacaccccttcacaatgacaacagctggatccgacagcgcagtgccagtgtcaacaaagagcctgttagtcttcctgggatcatgagaagaggcgaatctttagataacctggactccccccgatccaattcttggagacagcctccttggctcaatcagcccacaggattctatgcttcttcctctgtgcaagactttagtcgcccaccacctcagctggtgtccacatcaaaccgtgcctacatgcggaacccctcctccagcgtgcccccaccttcagctggctccgtgaagacctccaccacaggtgtggccaccacacagtcccccaccccgagaagccattccccttcagcttcacagtcaggctctcagctgcgtaacaggtcagtcagtgggaagcgcatatgctcctactgcaataacattctgggcaaaggagccgccatgatcatcgagtccctgggtctttgttatcatttgcattgttttaagtgtgttgcctgtgagtgtgacctcggaggctcttcctcaggagctgaagtcaggatcagaaaccaccaactgtactgcaacgactgctatctcagattcaaatctggacggccaaccgccatgtgatgtaagcctccatacgaaagcactgttgcagatagaagaagaggtggttgctgctcatgtagatctataaatatgtgttgtatgtcttttttgctttttttttaaaaaaaagaataactttttttgcctctttagattacatagaagcattgtagtcttggtagaaccagtatttttgttgtttatttataaggtaattgtgtgtggggaaaagtgcagtatttacctgttgaattcagcatcttgagagcacaagggaaaaaataagaacctacgaatatttttgaggcagataatgatctagtttgactttctagttagtggtgttttgaagagggtattttattgttttttaaaaaaaggttcttaaacattatttgaaatagttaatataaatacataattgcatttgctctgtttattgtaatgtattctaaattaatgcagaaccatatggaaaatttcattaaaatctatccccaaatgtgctttctgtatccttccttctacctattattctgatttttaaaaatgcagttaatgtaccatttatttgcttgatgaagggagctctattttctttaccagaaatgttgctaagtaattcccaatagaaagctgcttattttcattaatgaaaaataaccatggtttgtatactagaagtcttcttcagaaactggtgagcctttctgttcaattgcatttgtaaataaacttgctgatgcattta

SEQ ID NO: 304422 - DNA, 2775 bp, Homo sapiens
ttatggttttgatttgcatttccctgatcactagtgatgtcaatcatcactgtcacttttaaaaggtactaatcccaaagcttttgatttgtttttaatttaggaaacaataaatatttagaccaaattgggaacacgacctcttcacagaggagatccaagaaagaacaagtaccatcaggagcagaattggagaggcaacaaatccttcaggaaatgaggaagagaacaccccttcacaatgacaacagctggatccgacagcgcagtgccagtgtcaacaaagagcctgttagtcttcctgggatcatgagaagaggcgaatctttagataacctggactccccccgatccaattcttggagacagcctccttggctcaatcagcccacaggattctatgcttcttcctctgtgcaagactttagtcgcccaccacctcagctggtgtccacatcaaaccgtgcctacatgcggaacccctcctccagcgtgcccccaccttcagctggctccgtgaagacctccaccacaggtgtggccaccacacagtcccccaccccgagaagccattccccttcagcttcacagtcaggctctcagctgcgtaacaggtcagtcagtgggaagcgcatatgctcctactgcaataacattctgggcaaaggagccgccatgatcatcgagtccctgggtctttgttatcatttgcattgttttaagtgtgttgcctgtgagtgtgacctcggaggctcttcctcaggagctgaagtcaggatcagaaaccaccaactgtactgcaacgactgctatctcagattcaaatctggacggccaaccgccatgtgatgtaagcctccatacgaaagcactgttgcagatagaagaagaggtggttgctgctcatgtagatctataaatatgtgttgtatgtcttttttgctttttttttaaaaaaaagaataactttttttgcctctttagattacatagaagcattgtagtcttggtagaaccagtatttttgttgtttatttataaggtaattgtgtgtggggaaaagtgcagtatttacctgttgaattcagcatcttgagagcacaagggaaaaaataagaacctacgaatatttttgaggcagataatgatctagtttgactttctagttagtggtgttttgaagagggtattttattgttttttaaaaaaaggttcttaaacattatttgaaatagttaatataaatacataattgcatttgctctgtttattgtaatgtattctaaattaatgcagaaccatatggaaaatttcattaaaatctatccccaaatgtgctttctgtatccttccttctacctattattctgatttttaaaaatgcagttaatgtaccatttatttgcttgatgaagggagctctattttctttaccagaaatgttgctaagtaattcccaatagaaagctgcttattttcattaatgaaaaataaccatggtttgtatactagaagtcttcttcagaaactggtgagcctttctgttcaattgcatttgtaaataaacttgctgatgcatttaacgagtgggtcgtctttttcttaggtgtatgtgtctgacctcaggccttttagccatatttcagtatgtggccttttttgatgttatgttttatccagtagctttactaaggtataattgatgtaataaactgcatatatttaaagtgtatactttgacaaattttgacatggtgtataccttcgaaactatgccacagtctggatgtgtttactgaaacattttaataaggaagtttatttttgataaagttatgtttttggatacaatatatttgtatggtgagagtgatgaattgttggatcatttgaataaaatcttttactaaccccatgataaaaggagaagacaacagtgagcttagaatatctataaagcaaaaaatgtagtctcttgtttaaaaaatctggagcgggaatgcaaggatacaaaactttagcatgctttgagcaaaaatttaaacttactggaatcttttataataatgtaagtggaatggaggattctaggaactgagaactgtattggaataggttcaaaatatgtaagaaatgctaatgtgggagataaaaattttatttagtacttattctgattattattaaagtaataatgtgttccttgaggataacttgtcaaatgccccaaagcataaagaatataattctgaatcccaaattccaaagacaagaactctgtgtttgaattcattctgcatataattatttataagtatagattgtgaatttttccatgttcttaaaattatttttatcttttttcatggttgcatagtgctccattgtttggccttggtaatatttagttgataattccattactgtgtatttttcacttgtttctaagatcaaacattttaatatgtgcatgttatatataaatatgtaaattctgtgatactctatgatcatctctttctttatattattttcatagacatgaaatagttgctcagagattatgcattttaagacactcatagtatatattgccaaagtggtttccagaaaggcactgctggcttcgactcctataagcagcacgtgggcttgttcatctcactgcatgtttatgaagatacagttcttttgccttgttctctgcctgatgtgtatgcagaggcagccctcaatatgcagtggttgaataaatgaatgaagaaaccactatca

SEQ ID NO: 304423 - DNA, 3449 bp, Homo sapiens
aggagagaagaaattgaaaagcaggcacttgagaagtctaagagaagctctaagacgtttaaggaaatgctgcaggacagggaatcccaaaatcaaaagtctacagttccgtcaagaaggagaatgtattcttttgatgatgtgctggaggaaggaaagcgaccccctacaatgactgtgtcagaagcaagttaccagagtgagagagtagaagagaagggagcaacttatccttcagaaattcccaaagaagattctaccacttttgcaaaaagagaggacccgtgtaacaactgaaattcagcttccttctcaaagtcctgtggaagaacaaagcccagcctctttgtcttctctgcgttcacggagcacacaaatggaatcaactcgtgtttcagcttctctccccagaagttaccggaaaactgatacagtcaggttaacatctgtggtcacaccaagaccctttggctctcagacaaggggaatctcatcactccccagatcttacacgatggatgatgcttggaagtataatggagatgttgaagacattaagagaactccaaacaatgtggtcagcacccctgcaccaagcccggacgcaagccaactggcttcaagcttatctagccagaaagaggtagcagcaacagaagaagatgtgacaaggctgccctctcctacatcccccttctcatctctttcccaagaccaggctgccacttctaaagccacattgtcttccacatctggtcttgatttaatgtctgaatctggagaaggggaaatctccccacaaagagaagtctcaagatcccaggatcagttcagtgatatgagaatcagcataaaccagacgcctgggaagagtcttgactttgggtttacaataaaatgggatattcctgggatcttcgtagcatcagttgaagcaggtagcccagcagaattttctcagctacaagtagatgatgaaattattgctattaacaacaccaagttttcatataacgattcaaaagagtgggaggaagccatggctaaggctcaagaaactggacacctagtgatggatgtgaggcgctatggaaaggctggttcacctgaaacaaagtggattgatgcaacttctggaatttacaactcagaaaaatcttcaaatctatctgtaacaactgatttctccgaaagccttcagagttctaatattgaatccaaagaaatcaatggaattcatgatgaaagcaatgcttttgaatcaaaagcatctgaatccatttctttgaaaaacttaaaaaggcgatcacaattttttgaacaaggaagctctgattcggtggttcctgatcttccagttccaaccatcagtgccccgagtcgctgggtgtgggatcaagaggaggagcggaagcggcaggagaggtggcagaaggagcaggaccgcctactgcaggaaaaatatcaacgtgagcaggagaaactgagggaagagtggcaaagggccaaacaggaggcagagagagagaattccaagtacttggatgaggaactgatggtcctaagctcaaacagcatgtctctgaccacacgggagccctctcttgccacctgggaagctacctggagtgaagggtccaagtcttcagacagagaaggaacccgagcaggagaagaggagaggagacagccacaagaggaagttgttcatgaggaccaaggaaagaagccgcaggatcagcttgttattgagagagagaggaaatgggagcaacagcttcaggaagagcaagagcaaaagcggcttcaggctgaggctgaggagcagaagcgtcctgcggaggagcagaagcgccaggcagagatagagcgggaaacatcagtcagaatataccagtacaggaggcctgttgattcctatgatataccaaagacagaagaagcatcttcaggttttcttcctggtgacaggaataaatccagatctactactgaactggatgattactccacaaataaaaatggaaacaataaatatttagaccaaattgggaacacgacctcttcacagaggagatccaagaaagaacaagtaccatcaggagcagaattggagaggcaacaaatccttcaggaaatgaggaagagaacaccccttcacaatgacaacagctggatccgacagcgcagtgccagtgtcaacaaagagcctgttagtcttcctgggatcatgagaagaggcgaatctttagataacctggactccccccgatccaattcttggagacagcctccttggctcaatcagcccacaggattctatgcttcttcctctgtgcaagactttagtcgcccaccacctcagctggtgtccacatcaaaccgtgcctacatgcggaacccctcctccagcgtgcccccaccttcagctggctccgtgaagacctccaccacaggtgtggccaccacacagtcccccaccccgagaagccattccccttcagcttcacagtcaggctctcagctgcgtaacaggtcagtcagtgggaagcgcatatgctcctactgcaataacattctgggcaaaggagccgccatgatcatcgagtccctgggtctttgttatcatttgcattgttttaagtgtgttgcctgtgagtgtgacctcggaggctcttcctcaggagctgaagtcaggatcagaaaccaccaactgtactgcaacgactgctatctcagattcaaatctggacggccaaccgccatgtgatgtaagcctccatacgaaagcactgttgcagatagaagaagaggtggttgctgctcatgtagatctataaatatgtgttgtatgtcttttttgctttttttttaaaaaaaagaataactttttttgcctctttagattacatagaagcattgtagtcttggtagaaccagtatttttgttgtttatttataaggtaattgtgtgtggggaaaagtgcagtatttacctgttgaattcagcatcttgagagcacaagggaaaaaataagaacctacgaatatttttgaggcagataatgatctagtttgactttctagttagtggtgttttgaagagggtattttattgttttttaaaaaaaggttcttaaacattatttgaaatagttaatataaatacataattgcatttgctctgtttattgtaatgtattctaaattaatgcagaaccatatggaaaatttcattaaaataaaaatgcagttaatgtaccatttatttgcttgatgaagggagctctattttctttaccagaaatgttgctaagtaattcccaatagaaagctgcttattttcattaatgaaaaataaccatggtttgtatactagaagtcttcttcagaaactggtgagcctttctgttcaattgcatttgtaaataaacttgctgatgcattta

SEQ ID NO: 304424 - DNA, 2472 bp, Homo sapiens
ggcgactattgctgagtacagatgtgatcaaaggaagatagtatcagaaactgcaggatggactaattacactgaaattgctcatttatgtgaataggtgtcaagggtctcagagctgccatggagatggttcaaagttagagtataatcaaggcactctttagttggctggtaaaagttattctcccacagatatatgtatagagcttttcttaaattattatcagtgttaatagcagagtgtgacttttaaagaagaatcttgagctgcccaggtgaaagcctccattccattcttgttctgcatctaggtcagtcagtgggaagcgcatatgctcctactgcaataacattctgggcaaaggagccgccatgatcatcgagtccctgggtctttgttatcatttgcattgttttaagtgtgttgcctgtgagtgtgacctcggaggctcttcctcaggagctgaagtcaggatcagaaaccaccaactgtactgcaacgactgctatctcagattcaaatctggacggccaaccgccatgtgatgtaagcctccatacgaaagcactgttgcagatagaagaagaggtggttgctgctcatgtagatctataaatatgtgttgtatgtcttttttgctttttttttaaaaaaaagaataactttttttgcctctttagattacatagaagcattgtagtcttggtagaaccagtatttttgttgtttatttataaggtaattgtgtgtggggaaaagtgcagtatttacctgttgaattcagcatcttgagagcacaagggaaaaaataagaacctacgaatatttttgaggcagataatgatctagtttgactttctagttagtggtgttttgaagagggtattttattgttttttaaaaaaaggttcttaaacattatttgaaatagttaatataaatacataattgcatttgctctgtttattgtaatgtattctaaattaatgcagaaccatatggaaaatttcattaaaatctatccccaaatgtgctttctgtatccttccttctacctattattctgatttttaaaaatgcagttaatgtaccatttatttgcttgatgaagggagctctattttctttaccagaaatgttgctaagtaattcccaatagaaagctgcttattttcattaatgaaaaataaccatggtttgtatactagaagtcttcttcagaaactggtgagcctttctgttcaattgcatttgtaaataaacttgctgatgcatttaacgagtgggtcgtctttttcttaggtgtatgtgtctgacctcaggccttttagccatatttcagtatgtggccttttttgatgttatgttttatccagtagctttactaaggtataattgatgtaataaactgcatatatttaaagtgtatactttgacaaattttgacatggtgtataccttcgaaactatgccacagtctggatgtgtttactgaaacattttaataaggaagtttatttttgataaagttatgtttttggatacaatatatttgtatggtgagagtgatgaattgttggatcatttgaataaaatcttttactaaccccatgataaaaggagaagacaacagtgagcttagaatatctataaagcaaaaaatgtagtctcttgtttaaaaaatctggagcgggaatgcaaggatacaaaactttagcatgctttgagcaaaaatttaaacttactggaatcttttataataatgtaagtggaatggaggattctaggaactgagaactgtattggaataggttcaaaatatgtaagaaatgctaatgtgggagataaaaattttatttagtacttattctgattattattaaagtaataatgtgttccttgaggataacttgtcaaatgccccaaagcataaagaatataattctgaatcccaaattccaaagacaagaactctgtgtttgaattcattctgcatataattatttataagtatagattgtgaatttttccatgttcttaaaattatttttatcttttttcatggttgcatagtgctccattgtttggccttggtaatatttagttgataattccattactgtgtatttttcacttgtttctaagatcaaacattttaatatgtgcatgttatatataaatatgtaaattctgtgatactctatgatcatctctttctttatattattttcatagacatgaaatagttgctcagagattatgcattttaagacactcatagtatatattgccaaagtggtttccagaaaggcactgctggcttcgactcctataagcagcacgtgggcttgttcatctcactgcatgtttatgaagatacagttcttttgccttgttctctgcctgatgtgtatgcagaggcagccctcaatatgcagtggttgaataaatgaatgaagaaaccactatca

SEQ ID NO: 304425 - DNA, 2672 bp, Homo sapiens
ctaagcatgtgtttgtgtgttataaaaggtaggctagcataactaggttgtgtgttgtgtatagctacagcaagacaagtattactgctgttttatattttaaaccttgatgctggtaacatgtgtttcttccttattgtgaaagggtgttacaagtggtatcagcaaaatcatttgcttttgaactctgaggtatttatatggcccctatgtgaagagtgctttggaaatggtttaagcccagtcaactctcttttatctgtcggtgggttctgagccttcctgctgcagctgtccagtcctttcctggatgctgacactgaggttggagaaagtcaaggctgggcatgtactggtggggggtgtgtgtatgtgtgtgtgtttttctctctctcatcaaattccaaagccaaatagaaatgatttctggaatcaccattgtaaaattgcccatgccttttctctcctccaaaacaaataatagagagttgagtgtaatttatttctattgtgagcagttcatttttactccatttttacaaataaagaattccagagacgagacactgagacttgcctagctttatcctaagagtgagtgacaggttactctttctacctcattgggccactttctgagtgatgactgctatgtatcccagatggcaatattcacgtttctgaatctaagcacttttctttcttttctccttgcccgatcagctggacggccaaccgccatgtgatgtaagcctccatacgaaagcactgttgcagatagaagaagaggtggttgctgctcatgtagatctataaatatgtgttgtatgtcttttttgctttttttttaaaaaaaagaataactttttttgcctctttagattacatagaagcattgtagtcttggtagaaccagtatttttgttgtttatttataaggtaattgtgtgtggggaaaagtgcagtatttacctgttgaattcagcatcttgagagcacaagggaaaaaataagaacctacgaatatttttgaggcagataatgatctagtttgactttctagttagtggtgttttgaagagggtattttattgttttttaaaaaaaggttcttaaacattatttgaaatagttaatataaatacataattgcatttgctctgtttattgtaatgtattctaaattaatgcagaaccatatggaaaatttcattaaaatctatccccaaatgtgctttctgtatccttccttctacctattattctgatttttaaaaatgcagttaatgtaccatttatttgcttgatgaagggagctctattttctttaccagaaatgttgctaagtaattcccaatagaaagctgcttattttcattaatgaaaaataaccatggtttgtatactagaagtcttcttcagaaactggtgagcctttctgttcaattgcatttgtaaataaacttgctgatgcatttaacgagtgggtcgtctttttcttaggtgtatgtgtctgacctcaggccttttagccatatttcagtatgtggccttttttgatgttatgttttatccagtagctttactaaggtataattgatgtaataaactgcatatatttaaagtgtatactttgacaaattttgacatggtgtataccttcgaaactatgccacagtctggatgtgtttactgaaacattttaataaggaagtttatttttgataaagttatgtttttggatacaatatatttgtatggtgagagtgatgaattgttggatcatttgaataaaatcttttactaaccccatgataaaaggagaagacaacagtgagcttagaatatctataaagcaaaaaatgtagtctcttgtttaaaaaatctggagcgggaatgcaaggatacaaaactttagcatgctttgagcaaaaatttaaacttactggaatcttttataataatgtaagtggaatggaggattctaggaactgagaactgtattggaataggttcaaaatatgtaagaaatgctaatgtgggagataaaaattttatttagtacttattctgattattattaaagtaataatgtgttccttgaggataacttgtcaaatgccccaaagcataaagaatataattctgaatcccaaattccaaagacaagaactctgtgtttgaattcattctgcatataattatttataagtatagattgtgaatttttccatgttcttaaaattatttttatcttttttcatggttgcatagtgctccattgtttggccttggtaatatttagttgataattccattactgtgtatttttcacttgtttctaagatcaaacattttaatatgtgcatgttatatataaatatgtaaattctgtgatactctatgatcatctctttctttatattattttcatagacatgaaatagttgctcagagattatgcattttaagacactcatagtatatattgccaaagtggtttccagaaaggcactgctggcttcgactcctataagcagcacgtgggcttgttcatctcactgcatgtttatgaagatacagttcttttgccttgttctctgcctgatgtgtatgcagaggcagccctcaatatgcagtggttgaataaatgaatgaagaaaccactatca

SEQ ID NO: 304426 - DNA, 2397 bp, Homo sapiens
acgccattatagcccagaaaagagacaccaggaacagttgcaaaacaccccagtgtcacagcgtccaacccgagaatgtgcctggctcggcctcaggctcagagccctctgcaatgtggcagtccaagaacttggggcaggtcagtgaccatttctccatctttgcctcagctctccatccactcggtggcagtcccagagctgagcagctcgcagcttccgagcaatggctcttaccccgagcccccggccctgctacttccaaggcatataatatcactcggtctcttcaaatctcaatttccctgcctgtgaaatggggccgctgaatctcgatttccccgctgtgttgcctgtgagtgtgacctcggaggctcttcctcaggagctgaagtcaggatcagaaaccaccaactgtactgcaacgactgctatctcagattcaaatctggacggccaaccgccatgtgatgtaagcctccatacgaaagcactgttgcagatagaagaagaggtggttgctgctcatgtagatctataaatatgtgttgtatgtcttttttgctttttttttaaaaaaaagaataactttttttgcctctttagattacatagaagcattgtagtcttggtagaaccagtatttttgttgtttatttataaggtaattgtgtgtggggaaaagtgcagtatttacctgttgaattcagcatcttgagagcacaagggaaaaaataagaacctacgaatatttttgaggcagataatgatctagtttgactttctagttagtggtgttttgaagagggtattttattgttttttaaaaaaaggttcttaaacattatttgaaatagttaatataaatacataattgcatttgctctgtttattgtaatgtattctaaattaatgcagaaccatatggaaaatttcattaaaatctatccccaaatgtgctttctgtatccttccttctacctattattctgatttttaaaaatgcagttaatgtaccatttatttgcttgatgaagggagctctattttctttaccagaaatgttgctaagtaattcccaatagaaagctgcttattttcattaatgaaaaataaccatggtttgtatactagaagtcttcttcagaaactggtgagcctttctgttcaattgcatttgtaaataaacttgctgatgcatttaacgagtgggtcgtctttttcttaggtgtatgtgtctgacctcaggccttttagccatatttcagtatgtggccttttttgatgttatgttttatccagtagctttactaaggtataattgatgtaataaactgcatatatttaaagtgtatactttgacaaattttgacatggtgtataccttcgaaactatgccacagtctggatgtgtttactgaaacattttaataaggaagtttatttttgataaagttatgtttttggatacaatatatttgtatggtgagagtgatgaattgttggatcatttgaataaaatcttttactaaccccatgataaaaggagaagacaacagtgagcttagaatatctataaagcaaaaaatgtagtctcttgtttaaaaaatctggagcgggaatgcaaggatacaaaactttagcatgctttgagcaaaaatttaaacttactggaatcttttataataatgtaagtggaatggaggattctaggaactgagaactgtattggaataggttcaaaatatgtaagaaatgctaatgtgggagataaaaattttatttagtacttattctgattattattaaagtaataatgtgttccttgaggataacttgtcaaatgccccaaagcataaagaatataattctgaatcccaaattccaaagacaagaactctgtgtttgaattcattctgcatataattatttataagtatagattgtgaatttttccatgttcttaaaattatttttatcttttttcatggttgcatagtgctccattgtttggccttggtaatatttagttgataattccattactgtgtatttttcacttgtttctaagatcaaacattttaatatgtgcatgttatatataaatatgtaaattctgtgatactctatgatcatctctttctttatattattttcatagacatgaaatagttgctcagagattatgcattttaagacactcatagtatatattgccaaagtggtttccagaaaggcactgctggcttcgactcctataagcagcacgtgggcttgttcatctcactgcatgtttatgaagatacagttcttttgccttgttctctgcctgatgtgtatgcagaggcagccctcaatatgcagtggttgaataaatgaatgaagaaaccactatca

SEQ ID NO: 304427 - DNA, 2618 bp, Homo sapiens
ctaagcatgtgtttgtgtgttataaaaggtaggctagcataactaggttgtgtgttgtgtatagctacagcaagacaagtattactgctgttttatattttaaaccttgatgctggtaacatgtgtttcttccttattgtgaaagggtgttacaagtggtatcagcaaaatcatttgcttttgaactctgaggtatttatatggcccctatgtgaagagtgctttggaaatggtttaagcccagtcaactctcttttatctgtcggtgggttctgagccttcctgctgcagctgtccagtcctttcctggatgctgacactgaggttggagaaagtcaaggctgggcatgtactggtggggggtgtgtgtatgtgtgtgtgtttttctctctctcatcaaattccaaagccaaatagaaatgatttctggaatcaccattgtaaaattgcccatgccttttctctcctcctttactccatttttacaaataaagaattccagagacgagacactgagacttgcctagctttatcctaagagtgagtgacaggttactctttctacctcattgggccactttctgagtgatgactgctatgtatcccagatggcaatattcacgtttctgaatctaagcacttttctttcttttctccttgcccgatcagctggacggccaaccgccatgtgatgtaagcctccatacgaaagcactgttgcagatagaagaagaggtggttgctgctcatgtagatctataaatatgtgttgtatgtcttttttgctttttttttaaaaaaaagaataactttttttgcctctttagattacatagaagcattgtagtcttggtagaaccagtatttttgttgtttatttataaggtaattgtgtgtggggaaaagtgcagtatttacctgttgaattcagcatcttgagagcacaagggaaaaaataagaacctacgaatatttttgaggcagataatgatctagtttgactttctagttagtggtgttttgaagagggtattttattgttttttaaaaaaaggttcttaaacattatttgaaatagttaatataaatacataattgcatttgctctgtttattgtaatgtattctaaattaatgcagaaccatatggaaaatttcattaaaatctatccccaaatgtgctttctgtatccttccttctacctattattctgatttttaaaaatgcagttaatgtaccatttatttgcttgatgaagggagctctattttctttaccagaaatgttgctaagtaattcccaatagaaagctgcttattttcattaatgaaaaataaccatggtttgtatactagaagtcttcttcagaaactggtgagcctttctgttcaattgcatttgtaaataaacttgctgatgcatttaacgagtgggtcgtctttttcttaggtgtatgtgtctgacctcaggccttttagccatatttcagtatgtggccttttttgatgttatgttttatccagtagctttactaaggtataattgatgtaataaactgcatatatttaaagtgtatactttgacaaattttgacatggtgtataccttcgaaactatgccacagtctggatgtgtttactgaaacattttaataaggaagtttatttttgataaagttatgtttttggatacaatatatttgtatggtgagagtgatgaattgttggatcatttgaataaaatcttttactaaccccatgataaaaggagaagacaacagtgagcttagaatatctataaagcaaaaaatgtagtctcttgtttaaaaaatctggagcgggaatgcaaggatacaaaactttagcatgctttgagcaaaaatttaaacttactggaatcttttataataatgtaagtggaatggaggattctaggaactgagaactgtattggaataggttcaaaatatgtaagaaatgctaatgtgggagataaaaattttatttagtacttattctgattattattaaagtaataatgtgttccttgaggataacttgtcaaatgccccaaagcataaagaatataattctgaatcccaaattccaaagacaagaactctgtgtttgaattcattctgcatataattatttataagtatagattgtgaatttttccatgttcttaaaattatttttatcttttttcatggttgcatagtgctccattgtttggccttggtaatatttagttgataattccattactgtgtatttttcacttgtttctaagatcaaacattttaatatgtgcatgttatatataaatatgtaaattctgtgatactctatgatcatctctttctttatattattttcatagacatgaaatagttgctcagagattatgcattttaagacactcatagtatatattgccaaagtggtttccagaaaggcactgctggcttcgactcctataagcagcacgtgggcttgttcatctcactgcatgtttatgaagatacagttcttttgccttgttctctgcctgatgtgtatgcagaggcagccctcaatatgcagtggttgaataaatgaatgaagaaaccactatca

SEQ ID NO: 304428 - DNA, 1883 bp, Homo sapiens
aaaataaaaaaaaaataaaaaaaaaaaaaaaaaaaaaaaaaaaaaaaaaaaaaaaaaaaaaaaaaaaagaataactttttttgcctctttagattacatagaagcattgtagtcttggtagaaccagtatttttgttgtttatttataaggtaattgtgtgtggggaaaagtgcagtatttacctgttgaattcagcatcttgagagcacaagggaaaaaataagaacctacgaatatttttgaggcagataatgatctagtttgactttctagttagtggtgttttgaagagggtattttattgttttttaaaaaaaggttcttaaacattatttgaaatagttaatataaatacataattgcatttgctctgtttattgtaatgtattctaaattaatgcagaaccatatggaaaatttcattaaaatctatccccaaatgtgctttctgtatccttccttctacctattattctgatttttaaaaatgcagttaatgtaccatttatttgcttgatgaagggagctctattttctttaccagaaatgttgctaagtaattcccaatagaaagctgcttattttcattaatgaaaaataaccatggtttgtatactagaagtcttcttcagaaactggtgagcctttctgttcaattgcatttgtaaataaacttgctgatgcatttaacgagtgggtcgtctttttcttaggtgtatgtgtctgacctcaggccttttagccatatttcagtatgtggccttttttgatgttatgttttatccagtagctttactaaggtataattgatgtaataaactgcatatatttaaagtgtatactttgacaaattttgacatggtgtataccttcgaaactatgccacagtctggatgtgtttactgaaacattttaataaggaagtttatttttgataaagttatgtttttggatacaatatatttgtatggtgagagtgatgaattgttggatcatttgaataaaatcttttactaaccccatgataaaaggagaagacaacagtgagcttagaatatctataaagcaaaaaatgtagtctcttgtttaaaaaatctggagcgggaatgcaaggatacaaaactttagcatgctttgagcaaaaatttaaacttactggaatcttttataataatgtaagtggaatggaggattctaggaactgagaactgtattggaataggttcaaaatatgtaagaaatgctaatgtgggagataaaaattttatttagtacttattctgattattattaaagtaataatgtgttccttgaggataacttgtcaaatgccccaaagcataaagaatataattctgaatcccaaattccaaagacaagaactctgtgtttgaattcattctgcatataattatttataagtatagattgtgaatttttccatgttcttaaaattatttttatcttttttcatggttgcatagtgctccattgtttggccttggtaatatttagttgataattccattactgtgtatttttcacttgtttctaagatcaaacattttaatatgtgcatgttatatataaatatgtaaattctgtgatactctatgatcatctctttctttatattattttcatagacatgaaatagttgctcagagattatgcattttaagacactcatagtatatattgccaaagtggtttccagaaaggcactgctggcttcgactcctataagcagcacgtgggcttgttcatctcactgcatgtttatgaagatacagttcttttgccttgttctctgcctgatgtgtatgcagaggcagccctcaatatgcagtggttgaataaatgaatgaagaaaccactatca

SEQ ID NO: 304429 - DNA, 2462 bp, Homo sapiens
aggagagaagaaattgaaaagcaggcacttgagaagtctaagagaagctctaagacgtttaaggaaatgctgcaggacagggaatcccaaaatcaaaagtctacagttccgtcaagaaggagaatgtattcttttgatgatgtgctggaggaaggaaagcgaccccctacaatgactgtgtcagaagcaagttaccagagtgagagagtagaagagaagggagcaacttatccttcagaaattcccaaagaagattctaccacttttgcaaaaagagaggacccgtgtaacaactgaaattcagcttccttctcaaagtcctgtggaagaacaaagcccagcctctttgtcttctctgcgttcacggagcacacaaatggaatcaactcgtgtttcagcttctctccccagaagttaccggaaaactgatacagtcaggttaacatctgtggtcacaccaagaccctttggctctcagacaaggggaatctcatcactccccagatcttacacgatggatgatgcttggaagtataatggagatgttgaagacattaagagaactccaaacaatgtggtcagcacccctgcaccaagcccggacgcaagccaactggcttcaagcttatctagccagaaagaggtagcagcaacagaagaagatgtgacaaggctgccctctcctacatcccccttctcatctctttcccaagaccaggctgccacttctaaagccacattgtcttccacatctggtcttgatttaatgtctgaatctggagaaggggaaatctccccacaaagagaagtctcaagatcccaggatcagttcagtgatatgagaatcagcataaaccagacgcctgggaagagtcttgactttgggtttacaataaaatgggatattcctgggatcttcgtagcatcagttgaagcaggtagcccagcagaattttctcagctacaagtagatgatgaaattattgctattaacaacaccaagttttcatataacgattcaaaagagtgggaggaagccatggctaaggctcaagaaactggacacctagtgatggatgtgaggcgctatggaaaggctggttcacctgaaacaaagtggattgatgcaacttctggaatttacaactcagaaaaatcttcaaatctatctgtaacaactgatttctccgaaagccttcagagttctaatattgaatccaaagaaatcaatggaattcatgatgaaagcaatgcttttgaatcaaaagcatctgaatccatttctttgaaaaacttaaaaaggcgatcacaattttttgaacaaggaagctctgattcggtggttcctgatcttccagttccaaccatcagtgccccgagtcgctgggtgtgggatcaagaggaggagcggaagcggcaggagaggtggcagaaggagcaggaccgcctactgcaggaaaaatatcaacgtgagcaggagaaactgagggaagagtggcaaagggccaaacaggaggcagagagagagaattccaagtacttggatgaggaactgatggtcctaagctcaaacagcatgtctctgaccacacgggagccctctcttgccacctgggaagctacctggagtgaagggtccaagtcttcagacagagaaggaacccgagcaggagaagaggagaggagacagccacaagaggaagttgttcatgaggaccaaggaaagaagccgcaggatcagcttgttattgagagagagaggaaatgggagcaacagcttcaggaagagcaagagcaaaagcggcttcaggctgaggctgaggagcagaagcgtcctgcggaggagcagaagcgccaggcagagatagagcgggaaacatcagtcagaatataccagtacaggaggcctgttgattcctatgatataccaaagacagaagaagcatcttcaggttttcttcctggtgacaggaataaatccagatctactactgaactggatgattactccacaaataaaaatggaaacaataaatatttagaccaaattgggaacacgacctcttcacagaggagatccaagaaagaacaagtaccatcaggagcagaattggagaggcaacaaatccttcaggaaatgaggaagagaacaccccttcacaatgacaacagctggatccgacagcgcagtgccagtgtcaacaaagagcctgttagtcttcctgggatcatgagaagaggcgaatctttagataacctggactccccccgatccaattcttggagacagcctccttggctcaatcagcccacaggattctatgcttcttcctctgtgcaagactttagtcgcccaccacctcagctggtgtccacatcaaaccgtgccgagccatggaaccatgggaagaccttcacttgcactgctgcctaccccgagtccaaaccccgggaagtttcca

SEQ ID NO: 304430 - DNA, 1901 bp, Homo sapiens
aggagagaagaaattgaaaagcaggcacttgagaagtctaagagaagctctaagacgtttaaggaaatgctgcaggacagggaatcccaaaatcaaaagtctacagttccgtcaagaaggagaatgtattcttttgatgatgtgctggaggaaggaaagcgaccccctacaatgactgtgtcagaagcaagttaccagagtgagagagtagaagagaagggagcaacttatccttcagaaattcccaaagaagattctaccacttttgcaaaaagagaggacccgtgtaacaactgaaattcagcttccttctcaaagtcctgtggaagaacaaagcccagcctctttgtcttctctgcgttcacggagcacacaaatggaatcaactcgtgtttcagcttctctccccagaagttaccggaaaactgatacagtcaggttaacatctgtggtcacaccaagaccctttggctctcagacaaggggaatctcatcactccccagatcttacacgatggatgatgcttggaagtataatggagatgttgaagacattaagagaactccaaacaatgtggtcagcacccctgcaccaagcccggacgcaagccaactggcttcaagcttatctagccagaaagaggtagcagcaacagaagaagatgtgacaaggctgccctctcctacatcccccttctcatctctttcccaagaccaggctgccacttctaaagccacattgtcttccacatctggtcttgatttaatgtctgaatctggagaaggggaaatctccccacaaagagaagtctcaagatcccaggatcagttcagtgatatgagaatcagcataaaccagacgcctgggaagagtcttgactttgggtttacaataaaatgggatattcctgggatcttcgtagcatcagttgaagcaggtagcccagcagaattttctcagctacaagtagatgatgaaattattgctattaacaacaccaagttttcatataacgattcaaaagagtgggaggaagccatggctaaggctcaagaaactggacacctagtgatggatgtgaggcgctatggaaaggctggttcacctgaaacaaagtggattgatgcaacttctggaatttacaactcagaaaaatcttcaaatctatctgtaacaactgatttctccgaaagccttcagagttctaatattgaatccaaagaaatcaatggaattcatgatgaaagcaatgcttttgaatcaaaagcatctgaatccatttctttgaaaaacttaaaaaggcgatcacaattttttgaacaaggaagctctgattcggtggttcctgatcttccagttccaaccatcagtgccccgagtcgctgggtgtgggatcaagaggaggagcggaagcggcaggagaggtggcagaaggagcaggaccgcctactgcaggaaaaatatcaacgtgagcaggagaaactgagggaagagtggcaaagggccaaacaggaggcagagagagagaattccaagtacttggatgaggaactgatggtcctaagctcaaacagcatgtctctgaccacacgggagccctctcttgccacctgggaagctacctggagtgaagggtccaagtcttcagacagagaaggaacccgagcaggagaagaggagaggagacagccacaagaggaagttgttcatgaggaccaaggaaagaagccgcaggatcagcttgttattgagagagagaggaaatgggagcaacagcttcaggaagagcaagagcaaaagcggcttcaggctgaggctgaggagcagaagcgtcctgcggaggagcagaagcgccaggcagaccacaggacggggtcgacgcggccgcgaatttagtagt

SEQ ID NO: 304431 - DNA, 1672 bp, Homo sapiens
aggagagaagaaattgaaaagcaggcacttgagaagtctaagagaagctctaagacgtttaaggaaatgctgcaggacagggaatcccaaaatcaaaagtctacagttccgtcaagaaggagaatgtattcttttgatgatgtgctggaggaaggaaagcgaccccctacaatgactgtgtcagaagcaagttaccagagtgagagagtagaagagaagggagcaacttatccttcagaaattcccaaagaagattctaccacttttgcaaaaagagaggacccgtgtaacaactgaaattcagcttccttctcaaagtcctgtggaagaacaaagcccagcctctttgtcttctctgcgttcacggagcacacaaatggaatcaactcgtgtttcagcttctctccccagaagttaccggaaaactgatacagtcaggttaacatctgtggtcacaccaagaccctttggctctcagacaaggggaatctcatcactccccagatcttacacgatggatgatgcttggaagtataatggagatgttgaagacattaagagaactccaaacaatgtggtcagcacccctgcaccaagcccggacgcaagccaactggcttcaagcttatctagccagaaagaggtagcagcaacagaagaagatgtgacaaggctgccctctcctacatcccccttctcatctctttcccaagaccaggctgccacttctaaagccacattgtcttccacatctggtcttgatttaatgtctgaatctggagaaggggaaatctccccacaaagagaagtctcaagatcccaggatcagttcagtgatatgagaatcagcataaaccagacgcctgggaagagtcttgactttgggtttacaataaaatgggatattcctgggatcttcgtagcatcagttgaagcaggtagcccagcagaattttctcagctacaagtagatgatgaaattattgctattaacaacaccaagttttcatataacgattcaaaagagtgggaggaagccatggctaaggctcaagaaactggacacctagtgatggatgtgaggcgctatggaaaggctgactggggcaaagaccaaccttccctgccatttatacggcataaaaccctcaatctcaccagtatggctaccaaaattataggttcacctgaaacaaagtggattgatgcaacttctggaatttacaactcagaaaaatcttcaaatctatctgtaacaactgatttctccgaaagccttcagagttctaatattgaatccaaagaaatcaatggaattcatgatgaaagcaatgcttttgaatcaaaagcatctgaatccatttctttgaaaaacttaaaaaggcgatcacaattttttgaacaaggtaaaccacaaagctaacaattcatgcactttcatggaattgttctccctctccactcttcctcatggtctgtggtgctgggcactgagcctcttcaatttgtctgtcattatgaccaagcgacataacccatttccattctttccctagggtcatcaggcttttcttacagttcatgggtctacctctgtggtaatgggtctttgtgtgtcctttgtatacctctaaacattttacttttttttttttaactttgtaaaaaaaaa

SEQ ID NO: 304432 - DNA, 1683 bp, Homo sapiens
aggagagaagaaattgaaaagcaggcacttgagaagtctaagagaagctctaagacgtttaaggaaatgctgcaggacagggaatcccaaaatcaaaagtctacagttccgtcaagaaggagaatgtattcttttgatgatgtgctggaggaaggaaagcgaccccctacaatgactgtgtcagaagcaagttaccagagtgagagagtagaagagaagggagcaacttatccttcagaaattcccaaagaagattctaccacttttgcaaaaagagaggacccgtgtaacaactgaaattcagcttccttctcaaagtcctgtggaagaacaaagcccagcctctttgtcttctctgcgttcacggagcacacaaatggaatcaactcgtgtttcagcttctctccccagaagttaccggaaaactgatacagtcaggttaacatctgtggtcacaccaagaccctttggctctcagacaaggggaatctcatcactccccagatcttacacgatggatgatgcttggaagtataatggagatgttgaagacattaagagaactccaaacaatgtggtcagcacccctgcaccaagcccggacgcaagccaactggcttcaagcttatctagccagaaagaggtagcagcaacagaagaagatgtgacaaggctgccctctcctacatcccccttctcatctctttcccaagaccaggctgccacttctaaagccacattgtcttccacatctggtcttgatttaatgtctgaatctggagaaggggaaatctccccacaaagagaagtctcaagatcccaggatcagttcagtgatatgagaatcagcataaaccagacgcctgggaagagtcttgactttgggtttacaataaaatgggatattcctgggatcttcgtagcatcagttgaagcaggtagcccagcagaattttctcagctacaagtagatgatgaaattattgctattaacaacaccaagttttcatataacgattcaaaagagtgggaggaagccatggctaaggctcaagaaactggacacctagtgatggatgtgaggcgctatggaaaggctgactggggcaaagaccaaccttccctgccatttatacggcataaaaccctcaatctcaccagtatggctaccaaaattataggttcacctgaaacaaagtggattgatgcaacttctggaatttacaactcagaaaaatcttcaaatctatctgtaacaactgatttctccgaaagccttcagagttctaatattgaatccaaagaaatcaatggaattcatgatgaaagcaatgcttttgaatcaaaaggaagctctgattcggtggttcctgatcttccagttccaaccatcagtgccccgagtcgctgggtgtgggatcaagaggaggagcggaagcggcaggagaggtggcagaaggagcaggaccgcctactgcaggaaaaatattcacacgtgagccagggcagaactgagggaagagtggccacaggcacacaaggcggcgaaaggagagattccacgtactttggtcgaggaacgttgagctagccaaccgctgtctcgaccacgaggccttttgcgcctgcaagcaacggagacggccatgaaaaaaataacgaacagaaagaggcacacaagaa

SEQ ID NO: 304433 - DNA, 1574 bp, Homo sapiens
gaacttttcattcataaaaagaaaagactccgcacggcgcgggtgagtcagaacccagcagccgtgtaccccgcagagccgccagccccgggcatgttccgagacttcggggaacccggcccgagctccgggaacggcggcgggtacggcggccccgcgcagcccccggccgcagcgcaggcagcccagcagaagttccacctggtgccaagcatcaacaccatgagtggcagtcaggagctgcagtggatggtacagcctcatttcctggggcccagcagttaccccaggcctctgacctaccctcagtacagccccccacaaccccggccaggagtcatccgggccctggggccgcctccaggggtacgtcgaaggccttgtgaacagatcagcccggaggaagaggagcgccgccgagtaaggcgcgagcggaacaagctggctgcggccaagtgcaggaaccggaggaaggaactgaccgacttcctgcaggcggagactgacaaactggaagatgagaaatctgggctgcagcgagagattgaggagctgcagaagcagaaggagcgcctagagctggtgctggaagcccaccgacccatctgcaaaatcccggaaggagccaaggagggggacacaggcagtaccagtggcaccagcagcccaccagccccctgccgccctgtaccttgtatctccctttccccagggcctgtgcttgaacctgaggcactgcacacccccacactcatgaccacaccctccctaactcctttcacccccagcctggtcttcacctaccccagcactcctgagccttgtgcctcagctcatcgcaagagtagcagcagcagcggagacccatcctctgacccccttggctctccaaccctcctcgctttgtgaggcgcctgagccctactccctgcagatgccaccctagccaatgtctcctccccttcccccaccggtccagctggcctggacagtatcccacatccaactccagcaacttcttctccatccctctaatgagactgaccatattgtgcttcacagtagagccagcttggggccaccaaagctgcccactgtttctcttgagctggcctctctagcacaatttgcactaaatcagagacaaaatatttcccatttgtgccagaggaatcctggcagcccagagactttgtagatccttagaggtcctctggagccctaaccccttccagatcactgccacactctccatcaccctcttcctgtgatccacccaaccctatctcctgacagaaggtgccactttacccacctagaacactaactcaccagccccactgccagcagcagcaggtgattggaccaggccattctgccgccccctcctgaaccgcacagctcaggaggcgcccttggcttctgtgatgagctgatctgcggatctcagctttgagaagccttcagctccagggaatccaagcctccacagcgagggcagctgctatttattttcctaaagagagtatttttatacaaacctaccaaaatggaataaaaggcttgaagctgtg

SEQ ID NO: 304434 - DNA, 1665 bp, Homo sapiens
gaacttttcattcataaaaagaaaagactccgcacggcgcgggtgagtcagaacccagcagccgtgtaccccgcagagccgccagccccgggcatgttccgagacttcggggaacccggcccgagctccgggaacggcggcgggtacggcggccccgcgcagcccccggccgcagcgcaggcagcccagcagaagttccacctggtgccaagcatcaacaccatgagtggcagtcaggagctgcagtggatggtacagcctcatttcctggggcccagcagttaccccaggcctctgacctaccctcagtacagccccccacaaccccggccaggagtcatccgggccctggggccgcctccaggggtacgtcgaaggccttgtgaacagatcagcccggaggaagaggagcgccgccgagtaaggcgcgagcggaacaagctggctgcggccaagtgcaggaaccggaggaaggaactgaccgacttcctgcaggcggagactgacaaactggaagatgagaaatctgggctgcagcgagagattgaggagctgcagaagcagaaggagcgcctagagctggtgctggaagcccaccgacccatctgcaaaatcccggaaggagccaaggagggggacacaggcagtaccagtggcaccagcagcccaccagccccctgccgccctgtaccttgtatctccctttccccagggcctgtgcttgaacctgaggcactgcacacccccacactcatgaccacaccctccctaactcctttcacccccagcctggtcttcacctaccccagcactcctgagccttgtgcctcagctcatcgcaagagtagcagcagcagcggagacccatcctctgacccccttggctctccaaccctcctcgctttgtgaggcgcctgagccctactccctgcagatgccaccctagccaatgtctcctccccttcccccaccggtccagctggcctggacagtatcccacatccaactccagcaacttcttctccatccctctaatgagactgaccatattgtgcttcacagtagagccagcttggggccaccaaagctgcccactgtttctcttgagctggcctctctagcacaatttgcactaaatcagagacaaaatatttcccatttgtgccagaggaatcctggcagcccagagactttgtagatccttagaggtcctctggagccctaaccccttccagatcactgccacactctccatcaccctcttcctgtgatccacccaaccctatctcctgacagaaggtgccactttacccacctagaacactaactcaccagccccactgccagcagcagcaggtgattggaccaggccattctgccgccccctcctgaaccgcacagctcaggaggcgcccttggcttctgtgatgagctgatctgcggatctcagctttgagaagccttcagctccagggaatccaagcctccacagcgagggcagctgctatttattttcctaaagagagtatttttatacaaacctaccaaaatggaataaaaggcttgaagctgtggcctgagtgcctcactggacccagaggccaatgggagagtatttggagccctaggtcccagccttagctctacagactcactgcatgacct

SEQ ID NO: 304435 - DNA, 1578 bp, Homo sapiens
cccgggctgccccaaagccacacagcttatgagcagggatttgccaccaggtcagtctctgactgccaagctgtgctctttctgttcccagagctagcctgtacattgaaggtagacagcagtgtagcctctgcccagtggaagcccctcaatccacacggacctcatctgtggccttccatttcttattccttagaagttccacctggtgccaagcatcaacaccatgagtggcagtcaggagctgcagtggatggtacagcctcatttcctggggcccagcagttaccccaggcctctgacctaccctcagtacagccccccacaaccccggccaggagtcatccgggccctggggccgcctccaggggtacgtcgaaggccttgtgaacagatcagcccggaggaagaggagcgccgccgagtaaggcgcgagcggaacaagctggctgcggccaagtgcaggaaccggaggaaggaactgaccgacttcctgcaggcggagactgacaaactggaagatgagaaatctgggctgcagcgagagattgaggagctgcagaagcagaaggagcgcctagagctggtgctggaagcccaccgacccatctgcaaaatcccggaaggagccaaggagggggacacaggcagtaccagtggcaccagcagcccaccagccccctgccgccctgtaccttgtatctccctttccccagggcctgtgcttgaacctgaggcactgcacacccccacactcatgaccacaccctccctaactcctttcacccccagcctggtcttcacctaccccagcactcctgagccttgtgcctcagctcatcgcaagagtagcagcagcagcggagacccatcctctgacccccttggctctccaaccctcctcgctttgtgaggcgcctgagccctactccctgcagatgccaccctagccaatgtctcctccccttcccccaccggtccagctggcctggacagtatcccacatccaactccagcaacttcttctccatccctctaatgagactgaccatattgtgcttcacagtagagccagcttggggccaccaaagctgcccactgtttctcttgagctggcctctctagcacaatttgcactaaatcagagacaaaatatttcccatttgtgccagaggaatcctggcagcccagagactttgtagatccttagaggtcctctggagccctaaccccttccagatcactgccacactctccatcaccctcttcctgtgatccacccaaccctatctcctgacagaaggtgccactttacccacctagaacactaactcaccagccccactgccagcagcagcaggtgattggaccaggccattctgccgccccctcctgaaccgcacagctcaggaggcgcccttggcttctgtgatgagctgatctgcggatctcagctttgagaagccttcagctccagggaatccaagcctccacagcgagggcagctgctatttattttcctaaagagagtatttttatacaaacctaccaaaatggaataaaaggcttgaagctgtg

SEQ ID NO: 304436 - DNA, 1466 bp, Homo sapiens
gaacttttcattcataaaaagaaaagactccgcacggcgcgggtgagtcagaacccagcagccgtgtaccccgcagagccgccagccccgggcatgttccgagacttcggggaacccggcccgagctccgggaacggcggcgggtacggcggccccgcgcagcccccggccgcagcgcaggcagcccagcagaagttccacctggtgccaagcatcaacaccatgagtggcagtcaggagctgcagtggatggtacagcctcatttcctggggcccagcagttaccccaggcctctgacctaccctcagtacagccccccacaaccccggccaggagtcatccgggccctggggccgcctccaggggtacgtcgaaggccttgtgaacaggagactgacaaactggaagatgagaaatctgggctgcagcgagagattgaggagctgcagaagcagaaggagcgcctagagctggtgctggaagcccaccgacccatctgcaaaatcccggaaggagccaaggagggggacacaggcagtaccagtggcaccagcagcccaccagccccctgccgccctgtaccttgtatctccctttccccagggcctgtgcttgaacctgaggcactgcacacccccacactcatgaccacaccctccctaactcctttcacccccagcctggtcttcacctaccccagcactcctgagccttgtgcctcagctcatcgcaagagtagcagcagcagcggagacccatcctctgacccccttggctctccaaccctcctcgctttgtgaggcgcctgagccctactccctgcagatgccaccctagccaatgtctcctccccttcccccaccggtccagctggcctggacagtatcccacatccaactccagcaacttcttctccatccctctaatgagactgaccatattgtgcttcacagtagagccagcttggggccaccaaagctgcccactgtttctcttgagctggcctctctagcacaatttgcactaaatcagagacaaaatatttcccatttgtgccagaggaatcctggcagcccagagactttgtagatccttagaggtcctctggagccctaaccccttccagatcactgccacactctccatcaccctcttcctgtgatccacccaaccctatctcctgacagaaggtgccactttacccacctagaacactaactcaccagccccactgccagcagcagcaggtgattggaccaggccattctgccgccccctcctgaaccgcacagctcaggaggcgcccttggcttctgtgatgagctgatctgcggatctcagctttgagaagccttcagctccagggaatccaagcctccacagcgagggcagctgctatttattttcctaaagagagtatttttatacaaacctaccaaaatggaataaaaggcttgaagctgtg

SEQ ID NO: 304437 - DNA, 1065 bp, Homo sapiens
gaacttttcattcataaaaagaaaagactccgcacggcgcgggtgagtcagaacccagcagccgtgtaccccgcagagccgccagccccgggcatgttccgagacttcggggaacccggcccgagctccgggaacggcggcgggtacggcggccccgcgcagcccccggccgcagcgcaggcagcccagcagaagttccacctggtgccaagcatcaacaccatgagtggcagtcaggagctgcagtggatggtacagcctcatttcctggggcccagcagttaccccaggcctctgacctaccctcagtacagccccccacaaccccggccaggagtcatccgggccctggggccgcctccaggggtacgtcgaaggccttgtgaacagatcagcccggaggaagaggagcgccgccgagtaaggcgcgagcggaacaagctggctgcggccaagtgcaggaaccggaggaaggaactgaccgacttcctgcaggcggagactgacaaactggaagatgagaaatctgggctgcagcgagagattgaggagctgcagaagcagaaggagcgcctagagctggtgctggaagcccaccgacccatctgcaaaatcccggaaggagccaaggagggggacacaggcagtaccagtggcaccagcagcccaccagccccctgccgccctgtaccttgtatctccctttccccagggcctgtgcttgaacctgaggcactgcacacccccacactcatgaccacaccctccctaactcctttcacccccagcctggtcttcacctaccccagcactcctgagccttgtgcctcagctcatcgcaagagtagcagcagcagcggagacccatcctctgaccccctgaaccgcacagctcaggaggcgcccttggcttctgtgatgagctgatctgcggatctcagctttgagaagccttcagctccagggaatccaagcctccacagcgagggcagctgctatttattttcctaaagagagtatttttatacaaacctaccaaaatggaataaaaggcttgaagctgtg

SEQ ID NO: 304438 - DNA, 4255 bp, Homo sapiens
gggttgcaagctgaactcattactggttttcataacaacacaatagtaagaacaagcaaacacaacaaattctcctggaggcagacttggcttaaaaaggcagacttggcttggtgatagtttttcttgaaagttccagatccacagtggagagtgagcctgtctcatatttggcaaaaatatttgttgaaatgtccacataggggatgttggatgtttaacacttttgagagtttaacacatgaatattctttctcctagaaaacacattagacctgttggagggagtctcccgtattccttttctgccacttttcgtccccatttcatttcattaatgataggatatgatttacctgtgacttactacttcaaatggatggcagtgcacttggatttttttttaatatccagaagattgaacagagggttgctattgttgaatgtatttggactgatagattaaaatcaaagttcaatttttaaggaacaaaaaagtaaatcctgttttcattttatctccccttttaaaactgagaaccagagcagaagggaaatatagaattttaagcaattaatcttcctgtggatgaattaaacccattagatgctgatgggatttttttaaggaatggtaccttaactatatatttgatttcgtttcccctgagggctagaggctgaatggaggctggttttattttgcctttccctcaccgcccagtcccattgagtgtattcattactagaaggaaaatctttcagaattggtgacacatggtaggctgtcttaaggagtcccctggcccccttcccctaggccatggcctaataaaataaactgtcaattgttctcacagcatatcatttaataatgaatactttagaacaatgcttatgggctggagaattgtatttgattagcccattcagtttgatagcccaaatgctgaacagcacagcgggatcctagcagtgcaagttcaaaagtaagtccaatcatttctgtgatactcgccctggtagcaaacagatcatctcagccaagctcttcatgtatctttgacctattaggtgaacaaatgaacctcacaggacacacagtattttttaaaggcagactcgctctcttttttgccagtgagcagttctagctaaccaagttacacactgtgggtattcctgcctgcctcttgaatacaaaggcctagttcaagtgttgctttttttatttcaaatcaattttttcttctttcctttttgagataaaactattaaaagtactactatatatataaaatctcaaatcaacttttcggcctcctcctcgtgtaccaggaagtatattctgacgaagggccccacttttgcaggtcttgcacgcccctcccttacccagaactgcagagcttcaggatggcgaaggtcacccaagggcatgagtagggagtggtgtctccaaccatcagttccgtggcactgttcagcctttgtgtgctgccctgccacccaccactcacagtgcctctgaagcgtgttacccctggagtgacgtgagcatttgaggcttgtctaaggaaaaaaataaaaggcagtgaaggagactgtacataaagacatggcaaaaatcttaattatagcaatatagttatcgggtaatgttcgggtgggcagctccattaaaaaatatgtgaatgaatctgtgaagctgcaagtagcgagaagagcgaaaggtcttcttaatgaaccgcctaccttgtagacagtaatttgtacactgtatagttttgttaagaattttttttaaattaaaattcccatgtttgtaaagctaactttttaacaattataatggaactatatgttgtttccatttttaaagtaaacaagaatattccttgtttagagactggacttgagttaaaactctccagtctcttaagttatgtattaaaaagaaaatctgtccatgttaggagttatttcacagattcctgtgcttgaaaagcataggatactaatcctttaaaaaagtgtaaatggagaaaagttatattttatgaaggttattttgttgtatttagtattggaaaagttggtttccagagcatttcagaatgtcgaagcaccactgtctttttattagtatatacggcctttagcaaaagtttttgtgattgttacgtgatggtatttaaggttaagtttcacagagcattcaggataggcagaaaactaaaacagtgctatgtctcacataacgtgtcctcagggagcagaatcttggatttgtgacttgtagcttcataaggactcaacgaaagagattgcacagggacatcttcagcggtgtgacagcaggacatgttctttacctagattcaaattctatgtactgtgtgaaatgatgaaggctgcagaaagttatcccatattcagtgtacagtattcatttttaatgaaacaactctacaatattgctggcagataggccccaagcatgacattcaatatagtttacatgttcctgtcaaggtcttttgttaacattaaccagctgcatgctttctggactttaagaaattgggtttctatagaaaactttttttttttttttttttttaatgtgcaggctattcaagttcaatagtaaaagctcaaaaatgaatgttctactccatgctgaaggagctgaaagctgccttcttcatattttgcactttctggtagttcccctgttttttctaattccctaaaattgtgtgggtggagtggagccctgcagttggggggtaacatggaccactgattttgccctttgaccctgcacaatgacctttgcatcagccaaactcattgccatgacaactctttgtactgtgtccgtgccacagatctgttggtcacattgttaatagtaaaggggacaagttggagacggtcaatttttacattttttgttgcaattttttcttcaatggttgtaagtagttttttttttttttaataataaaagggttcactagttaatactctagaaatatctgtgtgttgcaattcaaatgtatgttgagattgtgaaaagcgcttcagtgccactagcttaccggtacactagactaagcccttgatgacttattgcatgatacagtaccaggaacaacaggtggcctaaatacatgaaaagcagtgtaagctagtgacactaaagccagtcttgtattactgtatttttgacagaatggttttgaaaactgtgctacagggactgatgtggcaaatatatctctttatgcagaaggaagtctttttttttcttttttttttttttaagaagtatggctttttatgcatccttcatcgagggcattgaagttgcatggactgataaaagttgatgcaaaacaagaaagaaacaaacaaaaaaaaaaaaaccagcaaaatgtttaccaaaaaactcaaacaaatgagcagtgcctgttcaatttcacagtctctgttgagttcagttgtaaatatgtttcaaatgacattttcttgggaaaaaaaatctctacaacattgtagaatgtgaggggtaactacatcccaggcataggtttctcaaagctgcagtagattatgtcttcatcaagctgttaatttgtgcttatatcatatagaacttttagcatcctgggaagagctgcccccacctcaatgatatttctctgagaacaacttttgtaggactgtgtgtttctttagatacatttagtacaactgtaggtgacgagtagtcagttattgcttgctagctacacaccagggttgatccattttaaaacttttggcattttgtcctcatgggccataaatacagaaccttgtattttaattaaatttttttacaaaaggaggcacatgcacaatctccatgtaacaaacctttagcagtaggatgtattatacgacagttacttaatttctagagttcaggcctctgggatcaaccccagactgggccagaatgttagtgaaggttttattgtgcccggttggaggataacgttctttgggtactttttgtgggttgcaaatgaactcaattgccacaagttttaaactggtgtaaatcaagcttgacttaatgtgattgttactgttatatccagcctatactgctagcagctgctcatactgcagtcaattactggaagcggatatatttcctatgcaaaaactgtttaaacaataaaatgagctatgctacaga
